United States Patent Application Publication US 2011/0183924 A1 - sequence listing, part 191

SEQ ID NO: 456917 - DNA, 2770 bp, Homo sapiens
gagctagcggcgccctcccttatcgccttggcaacgacccagccgcgccgcgaggagagccgggaatggaggtcgtggcgtgaggggcgccgagcgaggggaggcgcgggccacgggagttccgggagttccggcgttgcccggcagtccgcagtcctcggcgggaaggctgtcccggcgcctcaggcagctctgcgtgggccggggtgacttcctcgcgatcccctgcgcgaggtgaagggcagggacctttgccgcgccttccacgcgccgtgccccaccggcgagtggctccatcttcctcagacttatcgctcgcggacaggcgccgtgggtctcccgggcctccgtaccgtcctccttcccagcggctccgggaagcggttccctgtcttcggacgcatttcacccgcgcggggagagcttcccgggaaggttccacggcggccgagggtttccgcgcccgggacgcgtttcggctgaggccgtgggtccagtccacgggttctgcccgcacggtccaatggccggggaggcggaggacttgcaccttcgagatcccctgtgtttacccagctggaggatgatgaacagtcgtgggtgcccagctgggtggatgtgactccagtcagcagagcagaagccaggagaggttttggtcttgatggtttgtgtagagtggaggatgagagagcccatcctgagcatctaaagagctacagagtcatccagcaccaggacactcatagtgaggggaaaccaagaaggcacactgagcatggggcagctttcccacctggttccagttgtgggcaacagcaagaagtccatgtggcagagaagctgttcaaatgcagtgactgtgggaaggtgttcttaaaggcctttgccctccttgaccatctgataacgcattctgaagagagacccttcagatgcccaacaggcagaagtgctttcaagaagtcagctcatattaacccccgaaaaattcacactggagaaacagcccatgtgtgtaatgaatgtgggaaggccttcagttacccgtctaagctgaggaaacaccagaaggttcacacaggcataaaaccttttaagtgtagtgactgtggtaaaaccttcaaccgcaaagacgcacttgttctacaccagaggattcacactggagaaaggccttacgagtgcagcaaatgtggtaaaaccttcagtgttctgtctaccctcattcggcaccggaaagtgcacattggagaaaggccctatgagtgtgcagaatgtgggaagttctttaaatacaataatagcttcattcttcaccagagagttcacactggagaaaggccttttgaatgcaagcaatgtgggaaaggctacgtgacccgttcaggcctctatcagcactggaaagtccacactggggaacggccctatgaatgtagcctgtgtgggaaaaccttcactaccagatcctaccgcaatcggcaccagcagttccacactgaagagaggtcttatgaatgtacagagtgtgggaaggccttcaaacatagttccaccctccttcagcacaagaaagtccatactccagaaaggcgtcaggaggacagggcacatgggaaggtcgttagctgctagcaccgtgttcatcaggaaaggtcttattccagaaaggaggttaaggagagtggccgtgagagtgccatccgaaagaagctaaaccttgcacatcccaacacccaccccagggagagttcccgtgtgtgcctggtgtgtgggacgctttcgggagccacattgcactctgacttgcctggggctgttggcagtgtcacatcactgagtttatccaccgccatccacctctatccaccccataaggtccctacagcaagtgggacagcagaccttgtgctccttgctctaaacagtagagaatcgttaatagtggagcccaaaacaggcctcattccctacccttgactggtttagctgtggacatgacccacctctggccggaggagctgagctggtatctgctgggggcttcctgggaaggtttaccattttcatggaaatggttgacattacacatggtatttgtcatgccctagcatggactgtctcatactgctctggactatgtggtaataaaggctttattgtttaagccgcttaaaattttttttttattttttttttgagatggtcttattctgttgcccaggctggaatgcagtggtgccatcatagctcaccacagccttgaactgctggtctcaagggatcttcctgcttcagcctcctgagtagctggcactacaggtgtgcgccatcacacctggctaatttttttttttcatttgtggacagggtcttgctatattgcccaagctggtctcgaactctgagcctcaagctatcctcctgccttggcctcccaaagtgctgggagccactgtgcctggcctagtttttttagagacagggtctcacagtcttgcccaggctggagtgcagtagtgtgaagctagctcattgcagacttgaactactggactcaagtgatcctcctgcttcagcgtattgaatagctaggattgtacttgtgtggcaccacatctgactaattttaaaaatttgtatagagacaggatcttgctacattgcccaggctggtcatgaactctttgcctcaagcagtcctcttgcctcagccttccaaagtgctggtattatagttgtgagccactgtgccctgccaagtctc

SEQ ID NO: 456918 - DNA, 2897 bp, Homo sapiens
gagctagcggcgccctcccttatcgccttggcaacgacccagccgcgccgcgaggagagccgggaatggaggtcgtggcgtgaggggcgccgagcgaggggaggcgcgggccacgggagttccgggagttccggcgttgcccggcagtccgcagtcctcggcgggaaggctgtcccggcgcctcaggcagctctgcgtgggccggggtgacttcctcgcgatcccctgcgcgaggtgaagggcagggacctttgccgcgccttccacgcgccgtgccccaccggcgagtggctccatcttcctcagacttatcgctcgcggacaggcgccgtgggtctcccgggcctccgtaccgtcctccttcccagcggctccgggaagcggttccctgtcttcggacgcatttcacccgcgcggggagagcttcccgggaaggttccacggcggccgagggtttccgcgcccgggacgcgtttcggctgaggccgtgggtccagtccacgggttctgcccgcacggtccaatggccggggaggcggagggcttggtgatgtttgaggatgtgacggtatatttctccagggaggagtgggggctccttaatgtgacccagaagggcctataccgggatgtgatgctggagaactttgcactcgttagctcactgggacttgcaccttcgagatcccctgtgtttacccagctggaggatgatgaacagtcgtgggtgcccagctgggtggatgtgactccagtcagcagagcagaagccaggagaggttttggtcttgatggtttgtgtagagtggaggatgagagagcccatcctgagcatctaaagagctacagagtcatccagcaccaggacactcatagtgaggggaaaccaagaaggcacactgagcatggggcagctttcccacctggttccagttgtgggcaacagcaagaagtccatgtggcagagaagctgttcaaatgcagtgactgtgggaaggtgttcttaaaggcctttgccctccttgaccatctgataacgcattctgaagagagacccttcagatgcccaacaggcagaagtgctttcaagaagtcagctcatattaacccccgaaaaattcacactggagaaacagcccatgtgtgtaatgaatgtgggaaggccttcagttacccgtctaagctgaggaaacaccagaaggttcacacaggcataaaaccttttaagtgtagtgactgtggtaaaaccttcaaccgcaaagacgcacttgttctacaccagaggattcacactggagaaaggccttacgagtgcagcaaatgtggtaaaaccttcagtgttctgtctaccctcattcggcaccggaaagtgcacattggagaaaggccctatgagtgtgcagaatgtgggaagttctttaaatacaataatagcttcattcttcaccagagagttcacactggagaaaggccttttgaatgcaagcaatgtgggaaaggctacgtgacccgttcaggcctctatcagcactggaaagtccacactggggaacggccctatgaatgtagcctgtgtgggaaaaccttcactaccagatcctaccgcaatcggcaccagcagttccacactgaagagaggtcttatgaatgtacagagtgtgggaaggccttcaaacatagttccaccctccttcagcacaagaaagtccatactccagaaaggcgtcaggaggacagggcacatgggaaggtcgttagctgctagcaccgtgttcatcaggaaaggtcttattccagaaaggaggttaaggagagtggccgtgagagtgccatccgaaagaagctaaaccttgcacatcccaacacccaccccagggagagttcccgtgtgtgcctggtgtgtgggacgctttcgggagccacattgcactctgacttgcctggggctgttggcagtgtcacatcactgagtttatccaccgccatccacctctatccaccccataaggtccctacagcaagtgggacagcagaccttgtgctccttgctctaaacagtagagaatcgttaatagtggagcccaaaacaggcctcattccctacccttgactggtttagctgtggacatgacccacctctggccggaggagctgagctggtatctgctgggggcttcctgggaaggtttaccattttcatggaaatggttgacattacacatggtatttgtcatgccctagcatggactgtctcatactgctctggactatgtggtaataaaggctttattgtttaagccgcttaaaattttttttttattttttttttgagatggtcttattctgttgcccaggctggaatgcagtggtgccatcatagctcaccacagccttgaactgctggtctcaagggatcttcctgcttcagcctcctgagtagctggcactacaggtgtgcgccatcacacctggctaatttttttttttcatttgtggacagggtcttgctatattgcccaagctggtctcgaactctgagcctcaagctatcctcctgccttggcctcccaaagtgctgggagccactgtgcctggcctagtttttttagagacagggtctcacagtcttgcccaggctggagtgcagtagtgtgaagctagctcattgcagacttgaactactggactcaagtgatcctcctgcttcagcgtattgaatagctaggattgtacttgtgtggcaccacatctgactaattttaaaaatttgtatagagacaggatcttgctacattgcccaggctggtcatgaactctttgcctcaagcagtcctcttgcctcagccttccaaagtgctggtattatagttgtgagccactgtgccctgccaagtctc

SEQ ID NO: 456919 - DNA, 2867 bp, Homo sapiens
gagctagcggcgccctcccttatcgccttggcaacgacccagccgcgccgcgaggagagccgggaatggaggtcgtggcgtgaggggcgccgagcgaggggaggcgcgggccacgggagttccgggagttccggcgttgcccggcagtccgcagtcctcggcgggaaggctgtcccggcgcctcaggcagctctgcgtgggccggggtgacttcctcgcgatcccctgcgcgaggtgaagggcagggacctttgccgcgccttccacgcgccgtgccccaccggcgagtggctccatcttcctcagacttatcgctcgcggacaggcgccgtgggtctcccgggcctccgtaccgtcctccttcccagcggctccgggaagcggttccctgtcttcggacgcatttcacccgcgcggggagagcttcccgggaaggttccacggcggccgagggtttccgcgcccgggacgcgtttcggctgaggccgtgggtccagtccacgggttctgcccgcacggtccaatggccggggaggcggaggctcagttggacccatcattgcagggcttggtgatgtttgaggatgtgacggtatatttctccagggaggagtgggggctccttaatgtgacccagaagggcctataccgggatgtgatgctggagaactttgcactcgttagctcactgggacttgcaccttcgagatcccctgtgtttacccagctggaggatgatgaacagtcgtgggtgcccagctgggtggatgtgactccagtcagcagagcagaagccaggagaggttttggtcttgatggtttgtgtagagtggaggatgagagagcccatcctgagcatctaaagagctacagagtcatccagcaccaggacactcatagtgaggggaaaccaagaaggcacactgagcatggggcagctttcccacctggttccagttgtgggcaacagcaagaagtccatgtggcagagaagctgttcaaatgcagtgactgtgggaaggtgttcttaaaggcctttgccctccttgaccatctgataacgcattctgaagagagacccttcagatgcccaacaggcagaagtgctttcaagaagtcagctcatattaacccccgaaaaattcacactggagaaacagcccatgtgtgtaatgaatgtgggaaggccttcagttacccgtctaagctgaggaaacaccagaaggttcacacaggcataaaaccttttaagtgtagtgactgtggtaaaaccttcaaccgcaaagacgcacttgttctacaccagaggattcacactggagaaaggccttacgagtgcagcaaatgtggtaaaaccttcagtgttctgtctaccctcattcggcaccggaaagtgcacattggagaaaggccctatgagtgtgcagaatgtgggaagttctttaaatacaataatagcttcattcttcaccagagagttcacactggagaaaggccttttgaatgcaagcaatgtgggaaaggctacgtgacccgttcaggcctctatcagcactggaaagtccacactggggaacggccctatgaatgtagcctgtgtgggaaaaccttcactaccagatcctaccgcaatcggcaccagcagttccacactgaagagaggtcttatgaatgtacagagtgtgggaaggccttcaaacatagttccaccctccttcagcacaagaaagtccatactccagaaaggcgtcaggaggacagggcacatgggaaggtcgttagctgctagcaccgtgttcatcaggaaaggtcttattccagaaaggaggttaaggagagtggccgtgagagtgccatccgaaagaagctaaaccttgcacatcccaacacccaccccagggagagttcccgtgtgtgcctggtgtgtgggacgctttcgggagccacattgcactctgacttgcctggggctgttggcagtgtcacatcactgagtttatccaccgccatccacctctatccaccccataaggtccctacagcaagtgggacagcagaccttgtgctccttgctctaaacagtagagaatcgttaatagtggagccctctggccggaggagctgagctggtatctgctgggggcttcctgggaaggtttaccattttcatggaaatggttgacattacacatggtatttgtcatgccctagcatggactgtctcatactgctctggactatgtggtaataaaggctttattgtttaagccgcttaaaattttttttttattttttttttgagatggtcttattctgttgcccaggctggaatgcagtggtgccatcatagctcaccacagccttgaactgctggtctcaagggatcttcctgcttcagcctcctgagtagctggcactacaggtgtgcgccatcacacctggctaatttttttttttcatttgtggacagggtcttgctatattgcccaagctggtctcgaactctgagcctcaagctatcctcctgccttggcctcccaaagtgctgggagccactgtgcctggcctagtttttttagagacagggtctcacagtcttgcccaggctggagtgcagtagtgtgaagctagctcattgcagacttgaactactggactcaagtgatcctcctgcttcagcgtattgaatagctaggattgtacttgtgtggcaccacatctgactaattttaaaaatttgtatagagacaggatcttgctacattgcccaggctggtcatgaactctttgcctcaagcagtcctcttgcctcagccttccaaagtgctggtattatagttgtgagccactgtgccctgccaagtctc

SEQ ID NO: 456920 - DNA, 997 bp, Homo sapiens
ggtcggtgcgcgcttctcccgaggtggaacgggcggcagtcaagcgccggcgttctctgccatcaccctttccttgccggccggcacttcggctgcagagttttgcccacgcttcgagacttagggagcagtgcctttcagaatttgcccactcatctggtataactggttctgatggctgggaataaaggaagaggacgtgctgcttatacctttaatattgaggctgttggatttagcaaaggtgaaaagttacctgatgtagtgttgaaaccacccccactatttcctgatacagattataaaccagtgccactgaaaacaggagaaggtgaagaatatatgctggctttgaaacaggagttgagagaaacaatgaaaagaatgccttattttattgaaacacctgaagaaagacaagatattgaaaggtatcgtaaaaagcatacatgaaaggtatacacagggacaggaatggataccagattggagaagaacttccaagagagatgatgccacggcaaatacctgttaaaaaggccaaacgcaaaaagggcaaaggacgccggcaaaggccaccacttcactaattactgacgatgtgctggaccaccaactgggggcactcggcaacaacggaggcgacggtgacaaaatccgagtgcggacatcgaggagcaacgcaggacgcgcccgacccacgttcacgaacggtggacgactgacgagacgatgccttcgcgacacacggcggcactgagagcaaacgcggcagcggaagcgcccctacgccagccggacacgcgatgactgggcgcaccgctgacacggtagggaccccatgaccgacgtgacacaccccatacagcagccgttgaccgatcaccatcgacgggcgacgtgggccgaccaccgcaccagacgccgccacacacaaaacgagagctcaaagccttcgccgactacgacggccccccagacgccagggcagaagcaa

SEQ ID NO: 456921 - DNA, 3307 bp, Homo sapiens
  misc_feature (984)..(985): n is a, c, g, or t
  misc_feature (1010)..(1011): n is a, c, g, or t
cacctggattatgttaacagcaagttagcaggccacatcattcagaagatacgggaaattaatattcttgagaagagaggaaattagacactacctgagagggtggggcatccagctcctaatgaaaaacaacttttgataacacggataacacagtactatcaccttcaaagtgtttgtgcctttcagaatttgcccactcatctggtataactggttctgatggctgggaataaaggaagaggacgtgctgcttatacctttaatattgaggctgttggatttagcaaaggtgaaaagttacctgatgtagtgttgaaaccacccccactatttcctgatacagattataaaccagtgccactgaaaacaggagaaggtgaagaatatatgctggctttgaaacaggagttgagagaaacaatgaaaagaatgccttattttattgaaacacctgaagaaagacaagatattgaaaggtatagtaaaagatacatgaaggtataccaggaagaatggataccagattggagaagacttccaagagagatgatgccaagaaataaatgtaaaaaagcaggcccaaaacccaaaaaggcaaaagacgcaggcaaaggcacaccactcactaatactgaagatgtgttgaaaaaaatggtggaattggaaaaaagaggtgatggtgaaaaatcagatgaggaaaatgaagagaaagaaggaagcaaagagaaaagtaaagaaggtgatgatgacgatgacgatgatgccgcagaacaggaggaatatgatgaagaagagcaagaagaggaaaatgactacattaattcatactttgaagatggagatgattttggcgcagacgtgatgacaacatggatgaggcaacctattaggcatgaaatttttcaaaaaatatttttatgatgcagcttctgaacatttggacagacttgatttgtattttatttctgataaggaataagnncttgtttctgttgttttggacaaanngttgttaccaaaatattcaaaaccactttgagtttacatactagttaccttaaaaattattccctgacactctgacattccttctaaacacctctgccatctctcttatgtactctcatgggtttttttgtatgatttgaatatgaatgtgcctaaagaatttttgctctcttaatctatgtatacatacttgaacaaatcattcttgcttaactgctgatcttttgtaaaactattgctagtcataatggatttctataacctgaaagttgatataatacagcacgtggagcactttaaaaacaaagaaacttgaaaataattttattttttacctttacatggtgtgttctagactactgcattatgactacataaacctacctgagctcttacaagtacagaattgtgagacagaggttttgtgatggaaaacatacacatagggaaaaataccaaactgagcaatataaatttcacagctcacatcttagccagtacaaagaaactttcacatggggtgaatattataatacttgaatttgagacttaatactgtatatgaattaatcatcccactgtaataactgacatcttcaaatagttgggcttatgaaaaatttgactaagacattttattttatactttatgtaaatgtgaaataagttctggtcatataaatatgtagaatgcatgtgtgtgaactctatgaagtgaagtgtggtggccttttatgtttcagagtactcaagtgtacaattgatttatataaaaatgcaaaatgaactcaggtcattttgaaattaatattaatatttttgttgtttaactttaaagctagctcccctaactttatatattttttgggaaaaaatacctaaaaacctcagcctacaaagactctcagaaatgccaaagattttcaaggaaattcatattatatatttcaaaaatgatttatcaatgttatctaccaaaagaaataattttatttttcccctttggggagatattatcctctaatatgagaatcagatccctagattctatttctacctatactattaaactcaaccttgaacctgagcttggttgtttctgtgccttagtttctccactcgtaaacaatttcctataaaaattgtttaaacaccaaccaaaatttaccatatgtattcattctcttgccttaaagatcacttcttaacttacatttggctctcaccctctaaaaatttgtagtttggagagtaactgaaagcacaattttaagaaacatgttttcctcacaaaatatattgtaatctgattttcctatcttgtattcatgcagaaaattggagaaaatgtgtattgtcttgtgccattctgcaatatgaatttctcaggaaaaagatgtttcaatggcaatactttcttaaataattcaagatgggtgtgaggacctatcttattagtttagtgctgtgttaaccatttgtgaattacttcttgtttaaaggaagttgtcaaaaaattttaagattctaaatggaatacacgaataaagtaagccttagaatagaaacctcacaaaaagttgtcatttgcggttgataattaacataggtgttttattctctcaactccttagtaccagagccaaatacaatttagttttcagaaatcttatcaatattgttctatttacctacttataaatctgcagataaccacttgaaccaggcaaatacactgaagataaaggttatttctttttttagctttgaatttgtcatgaccattttagtcttgcagatagcagggcagccccttggggcaaggatttactctgggaggtaccgttaagagccttctttccccctttgaaagatccttttacaatgttaaagtatactagttgcaagaacaagcaggatttgcaggttgctttaccagcatgagtctcatttttctggcttaaaatctgggactgtgaaattattccataggaaagtgaatgttattttgcagaattagcctcttacataaaagtatttgttgaagtgtctttaaaattgctatcatgagcaaaactggttgctgtaatgcttgtttttctgtatttatttacacattaaattcttacaaaacaaaatgtgttcgtttgttttatagtaagatgttttattttgaacttatttaaatgtttatttgttagagaaaactaatttgttaatatagatcttaactagtaactattaagcagggatgtttgttccaaatattcttgaataaacaatcaccacaaacaac

SEQ ID NO: 456922 - DNA, 3259 bp, Homo sapiens
  misc_feature (936)..(937): n is a, c, g, or t
  misc_feature (962)..(963): n is a, c, g, or t
ggtcggtgcgcgcttctcccgaggtggaacgggcggcagtcaagcgccggcgttctctgccatcaccctttccttgccggccggcacttcggctgcagagttttgcccacgcttcgagacttagggagcagtgcctttcagaatttgcccactcatctggtataactggttctgatggctgggaataaaggaagaggacgtgctgcttatacctttaatattgaggctgttggatttagcaaaggtgaaaagttacctgatgtagtgttgaaaccacccccactatttcctgatacagattataaaccagtgccactgaaaacaggagaaggtgaagaatatatgctggctttgaaacaggagttgagagaaacaatgaaaagaatgccttattttattgaaacacctgaagaaagacaagatattgaaaggtatagtaaaagatacatgaaggtataccaggaagaatggataccagattggagaagacttccaagagagatgatgccaagaaataaatgtaaaaaagcaggcccaaaacccaaaaaggcaaaagacgcaggcaaaggcacaccactcactaatactgaagatgtgttgaaaaaaatggtggaattggaaaaaagaggtgatggtgaaaaatcagatgaggaaaatgaagagaaagaaggaagcaaagagaaaagtaaagaaggtgatgatgacgatgacgatgatgccgcagaacaggaggaatatgatgaagaagagcaagaagaggaaaatgactacattaattcatactttgaagatggagatgattttggcgcagacgtgatgacaacatggatgaggcaacctattaggcatgaaatttttcaaaaaatatttttatgatgcagcttctgaacatttggacagacttgatttgtattttatttctgataaggaataagnncttgtttctgttgttttggacaaanngttgttaccaaaatattcaaaaccactttgagtttacatactagttaccttaaaaattattccctgacactctgacattccttctaaacacctctgccatctctcttatgtactctcatgggtttttttgtatgatttgaatatgaatgtgcctaaagaatttttgctctcttaatctatgtatacatacttgaacaaatcattcttgcttaactgctgatcttttgtaaaactattgctagtcataatggatttctataacctgaaagttgatataatacagcacgtggagcactttaaaaacaaagaaacttgaaaataattttattttttacctttacatggtgtgttctagactactgcattatgactacataaacctacctgagctcttacaagtacagaattgtgagacagaggttttgtgatggaaaacatacacatagggaaaaataccaaactgagcaatataaatttcacagctcacatcttagccagtacaaagaaactttcacatggggtgaatattataatacttgaatttgagacttaatactgtatatgaattaatcatcccactgtaataactgacatcttcaaatagttgggcttatgaaaaatttgactaagacattttattttatactttatgtaaatgtgaaataagttctggtcatataaatatgtagaatgcatgtgtgtgaactctatgaagtgaagtgtggtggccttttatgtttcagagtactcaagtgtacaattgatttatataaaaatgcaaaatgaactcaggtcattttgaaattaatattaatatttttgttgtttaactttaaagctagctcccctaactttatatattttttgggaaaaaatacctaaaaacctcagcctacaaagactctcagaaatgccaaagattttcaaggaaattcatattatatatttcaaaaatgatttatcaatgttatctaccaaaagaaataattttatttttcccctttggggagatattatcctctaatatgagaatcagatccctagattctatttctacctatactattaaactcaaccttgaacctgagcttggttgtttctgtgccttagtttctccactcgtaaacaatttcctataaaaattgtttaaacaccaaccaaaatttaccatatgtattcattctcttgccttaaagatcacttcttaacttacatttggctctcaccctctaaaaatttgtagtttggagagtaactgaaagcacaattttaagaaacatgttttcctcacaaaatatattgtaatctgattttcctatcttgtattcatgcagaaaattggagaaaatgtgtattgtcttgtgccattctgcaatatgaatttctcaggaaaaagatgtttcaatggcaatactttcttaaataattcaagatgggtgtgaggacctatcttattagtttagtgctgtgttaaccatttgtgaattacttcttgtttaaaggaagttgtcaaaaaattttaagattctaaatggaatacacgaataaagtaagccttagaatagaaacctcacaaaaagttgtcatttgcggttgataattaacataggtgttttattctctcaactccttagtaccagagccaaatacaatttagttttcagaaatcttatcaatattgttctatttacctacttataaatctgcagataaccacttgaaccaggcaaatacactgaagataaaggttatttctttttttagctttgaatttgtcatgaccattttagtcttgcagatagcagggcagccccttggggcaaggatttactctgggaggtaccgttaagagccttctttccccctttgaaagatccttttacaatgttaaagtatactagttgcaagaacaagcaggatttgcaggttgctttaccagcatgagtctcatttttctggcttaaaatctgggactgtgaaattattccataggaaagtgaatgttattttgcagaattagcctcttacataaaagtatttgttgaagtgtctttaaaattgctatcatgagcaaaactggttgctgtaatgcttgtttttctgtatttatttacacattaaattcttacaaaacaaaatgtgttcgtttgttttatagtaagatgttttattttgaacttatttaaatgtttatttgttagagaaaactaatttgttaatatagatcttaactagtaactattaagcagggatgtttgttccaaatattcttgaataaacaatcaccacaaacaac

SEQ ID NO: 456923 - DNA, 502 bp, Homo sapiens
atgcctcaggattattagcagctaagcagagttagaaaagattaataactgatacaaaaggctattcatttgattctagtgtttactgctaataatcctgaggcatagaaattgaagaatttgtaaaaatagaattgccttaaaggatttgaagtaagaacataattttggggagagttttttagtgattcacagtatccctcttagcattaatttaaggtaaagaggcagattgattttccctctttcctggtaattcctaagtaattaagaataaataagttccaaaagaaattgtagctggaatcttaataacaattgtgagtggctgtttgagttgcccccaccatgtccttagatctaatctgtgctaccttattaactcacagcaggcttactgaatggcttcatttcagatttagttgatttctccaccaaatgcatgtcatgtattctcaataggctgtattcccagcagtcaataaatgaacacccgtaaaaa

SEQ ID NO: 456924 - DNA, 669 bp, Homo sapiens
gcgatatccgtacacttgcctcttctacccttagaaaattgactaacagagggagcaaaataaattaacattctgatgaatatatatggatggacatatgttcatgtgcaatggaggaagggaagaggggctgacaccagctaaaatgattcaagtctcccagagccaaaatgtgtgaagattggtgcgttagaaggatatagaggccaaagagtaaaggtgtttggctgggtccacaggctgcgcaggcaaggaaagaatttaatgtttctggtgttgcgagatggtacaggttatcttcagtgtgtcttggcggatgagttgtgtcagtgctacaatggagttctcttgtccacggagagcagtgttgcagtgtatggaatgctaaatcttaccccaaagggcaagcaggctccaggtggccatgagctgagttgtgacttctgggaactaattgggttggcccctgctggaggagctgacaacctgatcaatgaggagtctgacgttgatgtccagctcaacaacagacacatgatgatccaagtctcccagagccaaaatgtgtgaagattggtgcgttagaaggatatagaggccaaagagtaaaggtgtttggctgggtccacaggctgcgcaggcaaggaaagaattaatgtttctggtgtt

SEQ ID NO: 456925 - DNA, 377 bp, Homo sapiens
gagttttaagaatatgtttatttctttttgaaagaaattattctttacacaaatgtgtatgggttaagggtaggtgtgtatcctctactctgttgaattgataggaggaaggactggtacagggtgaaggagctgcttctgtcttgttgcgatccaagttgtaaatgttaatgaagtcttgtttgacctcaggatatcccagaagctcctgagagactgatgacagacaccattaatgaaccaatcttgctgtgtcgatttcctgtggagatcaagtccttctacatgcagcgatgtcctgaggattcccgtcttactgaatctgacagttctaaaccgacgttagtttgggactggggccaacactctatactacc

SEQ ID NO: 456926 - DNA, 2797 bp, Homo sapiens
  misc_feature (67)..(67): n is a, c, g, or t
caacagaaacgacagggctagtgtaaaaccggctttaacgaggcagtactatacggctaggtacganggctgggtgtgcgccggtgcacgttggagtcataagacggcgtcggtgttgcagtctgtgtccttggaggtgaccagggccactgcaggcatggtgctagcagagctgtacgtctctgaccgagagggaagcgatgccacgggagatggaaccaaggagaaaccatttaaaacaggtctaaaggctttgatgacagtagggaaagaaccatttcctaccatttacgtagattcacaaaaagaaaatgagaggtggaatgttatttctaaatcacagttgaagaacattaaaaagatgtggcatagggaacaaatgaagagtgaatcccgggaaaagaaagaggcagaagatagtttacgaagagaaaagaacctggaagaagcaaagaagattaccattaaaaatgatccaagtctcccagagccaaaatgtgtgaagattggtgcgttagaaggatatagaggccaaagagtaaaggtgtttggctgggtccacaggctgcgcaggcaaggaaagaatttaatgtttctggtgttgcgagatggtacaggttatcttcagtgtgtcttggcggatgagttgtgtcagtgctacaatggagttctcttgtccacggagagcagtgttgcagtgtatggaatgctaaatcttaccccaaagggcaagcaggctccaggtggccatgagctgagttgtgacttctgggaactaattgggttggcccctgctggaggagctgacaacctgatcaatgaggagtctgacgttgatgtccagctcaacaacagacacatgatgatccgaggagaaaacatgtccaaaatcctaaaagcacgatccatggtcaccaggtgctttagagatcacttctttgatagggggtactatgaagttactcctccaacattagtgcaaacacaagtagaaggtggtgccacactcttcaagcttgactattttggggaagaggcatttttgactcaatcctctcagttgtacttggagacctgcctcccagccctgggagatgttttttgtattgctcagtcataccgggcagagcagtccagaacacgaaggcacctggctgagtacactcacgtggaagctgagtgtcctttcctgacttttgacgacctcctgaaccggttggaggacttggtttgtgatgtggtagatcgaatattgaagtcacctgcagggagcatagtgcatgagctcaacccgaactttcagccccccaaacggcctttcaaacggatgaactattcagatgctatcgtttggctaaaagaacatgatgtaaagaaagaagatggaactttctatgaatttggagaagatatcccagaagctcctgagagactgatgacagacaccattaatgaaccaatcttgctgtgtcgatttcctgtggagatcaagtccttctacatgcagcgatgtcctgaggattcccgtcttactgaatctgtcgacgtgttgatgcccaatgttggtgagattgtgggaggctcaatgcgtatctttgatagtgaagaaatactggcaggttataaaagggaagggattgaccccactccctattactggtatacggatcagagaaaatacggtacatgtccccatggaggatatggcttgggcttggaacgattcttaacgtggattctgaataggtatcacatccgagacgtgtgcttataccctcgatttgtccagcgttgcacgccataaccattttctccagaagcgtggaggaaagattatgaaaggaacaggctctttaaaaaagaaaacaaaaagccagaatcttcctttttttgtttcattggggtttctctttctgtttttctttctactaccataaaaactatctcaaatcacctgaacatcaagtgatattaaggttgtcatcttaagaaaaaatatccatttttttcttaagttcgggaaacaaagttcggggaaaatacctggcatgaaactgtagttagggatacatttcagcattttactcactttatccaagttattcattttattcaagttatatgtatgtataattcaacaattttagattatggtgtaagatactccagtaacttatctttctgtccttttaagtgtacctggaattctttgatttattttattgcatcaatgaattaaaacaaaaatcttgggggaagaaattggcaatatcgtataaaaatctgctcatattagaacacagtataattcagcagtaaacactagaatcaaatgaatagccttttgtatcagttattaatcttttctaactctgcttagctgctaataatcctgaggcatagaaattgaagaatttgtaaaaatagaattgccttaaaggatttgaagtaagaacataattttggggagagttttttagtgattcacagtatccctcttagcattaatttaaggtaaagaggcagattgattttccctctttcctggtaattcctaagtaattaagaataaataagttccaaaagaaattgtagctggaatcttaataacaattgtgagtggctgtttgagttgcccccaccatgtccttagatctaatctgtgctaccttattaactcacagcaggcttactgaatggcttcatttcagatttagttgatttctccaccaaatgcatgtcatgtattctcaataggctgtattcccagcagtcaataaatgaacacccgtaaaaa

SEQ ID NO: 456927 - DNA, 3360 bp, Homo sapiens
gaagggtgcaaaagtgacactgtgccagggtctccagggccgcggagctccgggacaggcagcgccttccgagctgcacaaacgcgtggggcggggcgtctctggatccggaagttgcctctgccctcaccaaagatggcggccccggcgccgctcgcccacctctcgtaaccaatggaaccgcggcgctcggccgattctcgcagacgccctcagatctacgctctctgatgcaacgccggaatcgcggaaaccgccggtgcacgttggagtcataagacggcgtcggtgttgcagtctgtgtccttggaggtgaccagggccactgcaggcatggtgctagcagagctgtacgtctctgaccgagagggaagcgatgccacgggagatggaaccaaggagaaaccatttaaaacaggtctaaaggctttgatgacagtagggaaagaaccatttcctaccatttacgtagattcacaaaaagaaaatgagaggtggaatgttatttctaaatcacagttgaagaacattaaaaagatgtggcatagggaacaaatgaagagtgaatcccgggaaaagaaagaggcagaagatagtttacgaagagaaaagaacctggaagaagcaaagaagattaccattaaaaatgatccaagtctcccagagccaaaatgtgtgaagattggtgcgttagaaggatatagaggccaaagagtaaaggtgtttggctgggtccacaggctgcgcaggcaaggaaagaatttaatgtttctggtgttgcgagatggtacaggttatcttcagtgtgtcttggcggatgagttgtgtcagtgctacaatggagttctcttgtccacggagagcagtgttgcagtgtatggaatgctaaatcttaccccaaagggcaagcaggctccaggtggccatgagctgagttgtgacttctgggaactaattgggttggcccctgctggaggagctgacaacctgatcaatgaggagtctgacgttgatgtccagctcaacaacagacacatgatgatccgaggagaaaacatgtccaaaatcctaaaagcacgatccatggtcaccaggtgctttagagatcacttctttgatagggggtactatgaagttactcctccaacattagtgcaaacacaagtagaaggtggtgccacactcttcaagcttgactattttggggaagaggcatttttgactcaatcctctcagttgtacttggagacctgcctcccagccctgggagatgttttttgtattgctcagtcataccgggcagagcagtccagaacacgaaggcacctggctgaagtatgaagttgtctttttgttttatttctttctaggtaatatctttagagaagaaatcttagtgtaggtaaattatgtttatgttttaaaaaaaaccaactgatatattaagtggttaatggaagaacatataacaaagttttgccaccttagatcgtagctaagttctcttttttcactttgacttgatcttttatatataaaggagcaaacaagaaattgctactcagtggagaagaggggagtccacagctaatttgcaaagttgggaattggtagcattgttggcattttatggacagcttcccaatgttaaaagccttgctggataaaaaaccagtgcaggagaaaagcagtgctgagctattgtctcgttcttcaggtacgtacactcacgtggaagctgagtgtcctttcctgacttttgacgacctcctgaaccggttggaggacttggtttgtgatgtggtagatcgaatattgaagtcacctgcagggagcatagtgcatgagctcaacccgaactttcagccccccaaacggcctttcaaacggatgaactattcagatgctatcgtttggctaaaagaacatgatgtaaagaaagaagatggaactttctatgaatttggagaagatatcccagaagctcctgagagactgatgacagacaccattaatgaaccaatcttgctgtgtcgatttcctgtggagatcaagtccttctacatgcagcgatgtcctgaggattcccgtcttactgaatctgtcgacgtgttgatgcccaatgttggtgagattgtgggaggctcaatgcgtatctttgatagtgaagaaatactggcaggttataaaagggaagggattgaccccactccctattactggtatacggatcagagaaaatacggtacatgtccccatggaggatatggcttgggcttggaacgattcttaacgtggattctgaataggtatcacatccgagacgtgtgcttataccctcgatttgtccagcgttgcacgccataaccattttctccagaagcgtggaggaaagattatgaaaggaacaggctctttaaaaaagaaaacaaaaagccagaatcttcctttttttgtttcattggggtttctctttctgtttttctttctactaccataaaaactatctcaaatcacctgaacatcaagtgatattaaggttgtcatcttaagaaaaaatatccatttttttcttaagttcgggaaacaaagttcggggaaaatacctggcatgaaactgtagttagggatacatttcagcattttactcactttatccaagttattcattttattcaagttatatgtatgtataattcaacaattttagattatggtgtaagatactccagtaacttatctttctgtccttttaagtgtacctggaattctttgatttattttattgcatcaatgaattaaaacaaaaatcttgggggaagaaattggcaatatcgtataaaaatctgctcatattagaacacagtataattcagcagtaaacactagaatcaaatgaatagccttttgtatcagttattaatcttttctaactctgcttagctgctaataatcctgaggcatagaaattgaagaatttgtaaaaatagaattgccttaaaggatttgaagtaagaacataattttggggagagttttttagtgattcacagtatccctcttagcattaatttaaggtaaagaggcagattgattttccctctttcctggtaattcctaagtaattaagaataaataagttccaaaagaaattgtagctggaatcttaataacaattgtgagtggctgtttgagttgcccccaccatgtccttagatctaatctgtgctaccttattaactcacagcaggcttactgaatggcttcatttcagatttagttgatttctccaccaaatgcatgtcatgtattctcaataggctgtattcccagcagtcaataaatgaacacccgtaaaaa

SEQ ID NO: 456928 - DNA, 3119 bp, Homo sapiens
gaagggtgcaaaagtgacactgtgccagggtctccagggccgcggagctccgggacaggcagcgccttccgagctgcacaaacgcgtggggcggggcgtctctggatccggaagttgcctctgccctcaccaaagatggcggccccggcgccgctcgcccacctctcgtaaccaatggaaccgcggcgctcggccgattctcgcagacgccctcagatctacgctctctgatgcaacgccggaatcgcggaaaccgccggtgcacgttggagtcataagacggcgtcggtgttgcagtctgtgtccttggaggtgaccagggccactgcaggcatggtgctagcagagctgtacgtctctgaccgagagggaagcgatgccacgggagatggaaccaaggagaaaccatttaaaacaggtctaaaggctttgatgacagtagggaaagaaccatttcctaccatttacgtagattcacaaaaagaaaatgagaggtggaatgttatttctaaatcacagttgaagaacattaaaaagatgtggcatagggaacaaatgaagagtgaatcccgggaaaagaaagaggcagaagatagtttacgaagagaaaagaacctggaagaagcaaagaagattaccattaaaaatgatccaagtctcccagagccaaaatgtgtgaagattggtgcgttagaaggatatagaggccaaagagtaaaggtgtttggctgggtccacaggctgcgcaggcaaggaaagaatttaatgtttctggtgttgcgagatggtacaggttatcttcagtgtgtcttggcggatgagttgtgtcagtgctacaatggagttctcttgtccacggagagcagtgttgcagtgtatggaatgctaaatcttaccccaaagggcaagcaggctccaggtggccatgagctgagttgtgacttctgggaactaattgggttggcccctgctggaggagctgacaacctgatcaatgaggagtctgacgttgatgtccagctcaacaacagacacatgatgatccgaggagaaaacatgtccaaaatcctaaaagcacgatccatggtcaccaggtgctttagagatcacttctttgatagggggtactatgaagttactcctccaacattagtgcaaacacaagtagaaggtggtgccacactcttcaagcttgactattttggggaagaggcatttttgactcaatcctctcagttgtacttggagacctgcctcccagccctgggagatgttttttgtattgctcagtcataccgggcagagcagtccagaacacgaaggcacctggctgagtacactcacgtggaagctgagtgtcctttcctgacttttgacgacctcctgaaccggttggaggacttggtttgtgatgtggtagatcgaatattgaagtcacctgcagggagcatagtgcatgagctcaacccgaactttcagccccccaaacggcctttcaaacggatgaactattcagatgctatcgtttggctaaaagaacatgatgtaaagaaagaagatggaactttctatgaatttggagaagatatcccagaagctcctgagagactgatgacagacaccattaatgaaccaatcttgctgtgtcgatttcctgtggagatcaagtccttctacatgcagcgatgtcctgaggattcccgtcttactgaatctgtcgacgtgttgatgcccaatgttggtgagattgtgggaggctcaatgcgtatctttgatagtgaagaaatactggcaggttataaaagggaagggattgaccccactccctattactggtatacggatcagagaaaatacggtacatgtccccatggaggatatggcttgggcttggaacgattcttaacgtggattctgaataggtatcacatccgagacgtgtgcttataccctcgatttgtccagcgttgcacgccataaccattttctccagaagcgtggaggaaagattatgaaaggaacaggctctttaaaaaagaaaacaaaaagccagaatcttcctttttttgtttcattggggtttctctttctgtttttctttctactaccataaaaactatctcaaatcacctgaacatcaagtgatattaaggttgtcatcttaagaaaaaatatccatttttttcttaagttcgggaaacaaagttcggggaaaatacctggcatgaaactgtagttagggatacatttcagcattttactcactttatccaagttattcattttattcaagttatatgtatgtataattcaacaattttagattatggtgtaagatactccagtaacttatctttctgtccttttaagtgtacctggaattctttgatttattttattgcatcaatgaattaaaacaaaaatcttgggggaagaaattggcaatatcgtataaaaatctgctcatattagaacacagtataattcagcagtaaacactagaatcaaatgaatagccttttgtatcagttattaatcttttctaactctgcttagctgctaataatcctgaggcatagaaattgaagaatttgtaaaaatagaattgccttaaaggatttgaagtaagaacataattttggggagagttttttagtgattcacagtatccctcttagcattaatttaaggtaaagaggcagattgattttccctctttcctggtaattcctaagtaattaagaataaataagttccaaaagaaattgtagctggaatcttaataacaattgtgagtggctgtttgagttgcccccaccatgtccttagatctaatctgtgctaccttattaactcacagcaggcttactgaatggcttcatttcagatttagttgatttctccaccaaatgcatgtcatgtattctcaataggctgtattcccagcagtcaataaatgaacacccgtaaaaatctttgctggcttaattttcttaaagctaaacatctctttgtcacattcgttcatgcttttgcaattattttatcttttttatgatgtatatatgtgaaattaagtactactaaatttagtagatattgctaacgttatatggtaa

SEQ ID NO: 456929 - DNA, 3298 bp, Homo sapiens
gaagggtgcaaaagtgacactgtgccagggtctccagggccgcggagctccgggacaggcagcgccttccgagctgcacaaacgcgtggggcggggcgtctctggatccggaagttgcctctgccctcaccaaagatggcggccccggcgccgctcgcccacctctcgtaaccaatggaaccgcggcgctcggccgattctcgcagacgccctcagatctacgctctctgatgcaacgccggaatcgcggaaaccgccggtgcacgttggagtcataagacggcgtcggtgttgcagtctgtgtccttggaggtgaccagggccactgcaggcatggtgctagcagagctgtacgtctctgaccgagagggaagcgatgccacgggagatggaaccaaggagaaaccatttaaaacaggtctaaaggctttgatgacagtagggaaagaaccatttcctaccatttacgtagattcacaaaaagaaaatgagaggtggaatgttatttctaaatcacagttgaagaacattaaaaagatgtggcatagggaacaaatgaagagtgaatcccgggaaaagaaagaggcagaagatagtttacgaagagaaaagaacctggaagaagcaaagaagattaccattaaaaatgatccaagtctcccagagccaaaatgtgtgaagattggtgcgttagaaggatatagaggccaaagagtaaaggtgtttggctgggtccacaggctgcgcaggcaaggaaagaatttaatgtttctggtgttgcgagatggtacaggttatcttcagtgtgtcttggcggatgagttgtgtcagtgctacaatggagttctcttgtccacggagagcagtgttgcagtgtatggaatgctaaatcttaccccaaagggcaagcaggctccaggtggccatgagctgagttgtgacttctgggaactaattgggttggcccctgctggaggagctgacaacctgatcaatgaggagtctgacgttgatgtccagctcaacaacagacacatgatgatccgaggagaaaacatgtccaaaatcctaaaagcacgatccatggtcaccaggtgctttagagatcacttctttgatagggggtactatgaagttactcctccaacattagtgcaaacacaagtagaaggtggtgccacactcttcaagcttgactattttggggaagaggcatttttgactcaatcctctcagttgtacttggagacctgcctcccagccctgggagatgttttttgtattgctcagtcataccgggcagagcagtccagaacacgaaggcacctggctgagtacactcacgtggaagctgagtgtcctttcctgacttttgacgacctcctgaaccggttggaggacttggtttgtgatgtggtagatcgaatattgaagtcacctgcagggagcatagtgcatgagctcaacccgaactttcagccccccaaacggcctttcaaacggatgaactattcagatgctatcgtttggctaaaagaacatgatgtaaagaaagaagatggaactttctatgaatttggagaagatatcccagaagctcctgagagactgatgacagacaccattaatgaaccaatcttgctgtgtcgatttcctgtggagatcaagtccttctacatgcagcgatgtcctgaggattcccgtcttactgaatctgtcagtttctgtttcaaagagtattaataattttgctttttaagggggtggggactgtcatctggaatcaggtacagctcatgccaaatatttcattctctatctagaataacaatatttaaagacgttgggttttttcaccctcccctgattgaagttgacatgctttgttaaattagagaaatgtaaacatttgaatattacatgatcatagtggctcctttagcccttggagcttaattgtaattttcatttaaactctagggcagtgctgtgtctgatcgcttgatagtaattgtgtatcttctttcacttatatttaaaggtcgacgtgttgatgcccaatgttggtgagattgtgggaggctcaatgcgtatctttgatagtgaagaaatactggcaggttataaaagggaagggattgaccccactccctattactggtatacggatcagagaaaatacggtacatgtccccatggaggatatggcttgggcttggaacgattcttaacgtggattctgaataggtatcacatccgagacgtgtgcttataccctcgatttgtccagcgttgcacgccataaccattttctccagaagcgtggaggaaagattatgaaaggaacaggctctttaaaaaagaaaacaaaaagccagaatcttcctttttttgtttcattggggtttctctttctgtttttctttctactaccataaaaactatctcaaatcacctgaacatcaagtgatattaaggttgtcatcttaagaaaaaatatccatttttttcttaagttcgggaaacaaagttcggggaaaatacctggcatgaaactgtagttagggatacatttcagcattttactcactttatccaagttattcattttattcaagttatatgtatgtataattcaacaattttagattatggtgtaagatactccagtaacttatctttctgtccttttaagtgtacctggaattctttgatttattttattgcatcaatgaattaaaacaaaaatcttgggggaagaaattggcaatatcgtataaaaatctgctcatattagaacacagtataattcagcagtaaacactagaatcaaatgaatagccttttgtatcagttattaatcttttctaactctgcttagctgctaataatcctgaggcatagaaattgaagaatttgtaaaaatagaattgccttaaaggatttgaagtaagaacataattttggggagagttttttagtgattcacagtatccctcttagcattaatttaaggtaaagaggcagattgattttccctctttcctggtaattcctaagtaattaagaataaataagttccaaaagaaattgtagctggaatcttaataacaattgtgagtggctgtttgagttgcccccaccatgtccttagatctaatctgtgctaccttattaactcacagcaggcttactgaatggcttcatttcagatttagttgatttctccaccaaatgcatgtcatgtattctcaataggctgtattcccagcagtcaataaatgaacacccgtaaaaa

SEQ ID NO: 456930 - DNA, 2927 bp, Homo sapiens
gaagggtgcaaaagtgacactgtgccagggtctccagggccgcggagctccgggacaggcagcgccttccgagctgcacaaacgcgtggggcggggcgtctctggatccggaagttgcctctgccctcaccaaagatggcggccccggcgccgctcgcccacctctcgtaaccaatggaaccgcggcgctcggccgattctcgcagacgccctcagatctacgctctctgatgcaacgccggaatcgcggaaaccgccggtgcacgttggagtcataagacggcgtcggtgttgcagtctgtgtccttggaggtgaccagggccactgcaggcatggtgctagcagagctgtacgtctctgaccgagagggaagcgatgccacgggagatggaaccaaggagaaaccatttaaaacaggtctaaaggctttgatgacagtagggaaagaaccatttcctaccatttacgtagattcacaaaaagaaaatgagaggtggaatgttatttctaaatcacagttgaagaacattaaaaagatgtggcatagggaacaaatgaagagtgaatcccgggaaaagaaagaggcagaagatagtttacgaagagaaaagaacctggaagaagcaaagaagattaccattaaaaatgatccaagtctcccagagccaaaatgtgtgaagattggtgcgttagaaggatatagaggccaaagagtaaaggtgtttggctgggtccacaggctgcgcaggcaaggaaagaatttaatgtttctggtgttgcgagatggtacaggttatcttcagtgtgtcttggcggatgagttgtgtcagtgctacaatggagttctcttgtccacggagagcagtgttgcagtgtatggaatgctaaatcttaccccaaagggcaagcaggctccaggtggccatgagctgagttgtgacttctgggaactaattgggttggcccctgctggaggagctgacaacctgatcaatgaggagtctgacgttgatgtccagctcaacaacagacacatgatgatccgaggagaaaacatgtccaaaatcctaaaagcacgatccatggtcaccaggtgctttagagatcacttctttgatagggggtactatgaagttactcctccaacattagtgcaaacacaagtagaaggtggtgccacactcttcaagcttgactattttggggaagaggcatttttgactcaatcctctcagttgtacttggagacctgcctcccagccctgggagatgttttttgtattgctcagtcataccgggcagagcagtccagaacacgaaggcacctggctgagtacactcacgtggaagctgagtgtcctttcctgacttttgacgacctcctgaaccggttggaggacttggtttgtgatgtggtagatcgaatattgaagtcacctgcagggagcatagtgcatgagctcaacccgaactttcagccccccaaacggcctttcaaacggatgaactattcagatgctatcgtttggctaaaagagatatcccagaagctcctgagagactgatgacagacaccattaatgaaccaatcttgctgtgtcgatttcctgtggagatcaagtccttctacatgcagcgatgtcctgaggattcccgtcttactgaatctgtcgacgtgttgatgcccaatgttggtgagattgtgggaggctcaatgcgtatctttgatagtgaagaaatactggcaggttataaaagggaagggattgaccccactccctattactggtatacggatcagagaaaatacggtacatgtccccatggaggatatggcttgggcttggaacgattcttaacgtggattctgaataggtatcacatccgagacgtgtgcttataccctcgatttgtccagcgttgcacgccataaccattttctccagaagcgtggaggaaagattatgaaaggaacaggctctttaaaaaagaaaacaaaaagccagaatcttcctttttttgtttcattggggtttctctttctgtttttctttctactaccataaaaactatctcaaatcacctgaacatcaagtgatattaaggttgtcatcttaagaaaaaatatccatttttttcttaagttcgggaaacaaagttcggggaaaatacctggcatgaaactgtagttagggatacatttcagcattttactcactttatccaagttattcattttattcaagttatatgtatgtataattcaacaattttagattatggtgtaagatactccagtaacttatctttctgtccttttaagtgtacctggaattctttgatttattttattgcatcaatgaattaaaacaaaaatcttgggggaagaaattggcaatatcgtataaaaatctgctcatattagaacacagtataattcagcagtaaacactagaatcaaatgaatagccttttgtatcagttattaatcttttctaactctgcttagctgctaataatcctgaggcatagaaattgaagaatttgtaaaaatagaattgccttaaaggatttgaagtaagaacataattttggggagagttttttagtgattcacagtatccctcttagcattaatttaaggtaaagaggcagattgattttccctctttcctggtaattcctaagtaattaagaataaataagttccaaaagaaattgtagctggaatcttaataacaattgtgagtggctgtttgagttgcccccaccatgtccttagatctaatctgtgctaccttattaactcacagcaggcttactgaatggcttcatttcagatttagttgatttctccaccaaatgcatgtcatgtattctcaataggctgtattcccagcagtcaataaatgaacacccgtaaaaa

SEQ ID NO: 456931 - DNA, 2319 bp, Homo sapiens
ttgtttatttcaatttgacaggtgaagattggtgcgttagaaggatatagaggccaaagagtaaaggtgtttggctgggtccacaggctgcgcaggcaaggaaagaatttaatgtttctggtgttgcgagatggtacaggttatcttcagtgtgtcttggcggatgagttgtgtcagtgctacaatggagttctcttgtccacggagagcagtgttgcagtgtatggaatgctaaatcttaccccaaagggcaagcaggctccaggtggccatgagctgagttgtgacttctgggaactaattgggttggcccctgctggaggagctgacaacctgatcaatgaggagtctgacgttgatgtccagctcaacaacagacacatgatgatccgaggagaaaacatgtccaaaatcctaaaagcacgatccatggtcaccaggtgctttagagatcacttctttgatagggggtactatgaagttactcctccaacattagtgcaaacacaagtagaaggtggtgccacactcttcaagcttgactattttggggaagaggcatttttgactcaatcctctcagttgtacttggagacctgcctcccagccctgggagatgttttttgtattgctcagtcataccgggcagagcagtccagaacacgaaggcacctggctgagtacactcacgtggaagctgagtgtcctttcctgacttttgacgacctcctgaaccggttggaggacttggtttgtgatgtggtagatcgaatattgaagtcacctgcagggagcatagtgcatgagctcaacccgaactttcagccccccaaacggcctttcaaacggatgaactattcagatgctatcgtttggctaaaagaacatgatgtaaagaaagaagatggaactttctatgaatttggagaagatatcccagaagctcctgagagactgatgacagacaccattaatgaaccaatcttgctgtgtcgatttcctgtggagatcaagtccttctacatgcagcgatgtcctgaggattcccgtcttactgaatctgtcgacgtgttgatgcccaatgttggtgagattgtgggaggctcaatgcgtatctttgatagtgaagaaatactggcaggttataaaagggaagggattgaccccactccctattactggtatacggatcagagaaaatacggtacatgtccccatggaggatatggcttgggcttggaacgattcttaacgtggattctgaataggtatcacatccgagacgtgtgcttataccctcgatttgtccagcgttgcacgccataaccattttctccagaagcgtggaggaaagattatgaaaggaacaggctctttaaaaaagaaaacaaaaagccagaatcttcctttttttgtttcattggggtttctctttctgtttttctttctactaccataaaaactatctcaaatcacctgaacatcaagtgatattaaggttgtcatcttaagaaaaaatatccatttttttcttaagttcgggaaacaaagttcggggaaaatacctggcatgaaactgtagttagggatacatttcagcattttactcactttatccaagttattcattttattcaagttatatgtatgtataattcaacaattttagattatggtgtaagatactccagtaacttatctttctgtccttttaagtgtacctggaattctttgatttattttattgcatcaatgaattaaaacaaaaatcttgggggaagaaattggcaatatcgtataaaaatctgctcatattagaacacagtataattcagcagtaaacactagaatcaaatgaatagccttttgtatcagttattaatcttttctaactctgcttagctgctaataatcctgaggcatagaaattgaagaatttgtaaaaatagaattgccttaaaggatttgaagtaagaacataattttggggagagttttttagtgattcacagtatccctcttagcattaatttaaggtaaagaggcagattgattttccctctttcctggtaattcctaagtaattaagaataaataagttccaaaagaaattgtagctggaatcttaataacaattgtgagtggctgtttgagttgcccccaccatgtccttagatctaatctgtgctaccttattaactcacagcaggcttactgaatggcttcatttcagatttagttgatttctccaccaaatgcatgtcatgtattctcaataggctgtattcccagcagtcaataaatgaacacccgtaaaaa

SEQ ID NO: 456932 - DNA, 2512 bp, Homo sapiens
gaagggtgcaaaagtgacactgtgccagggtctccagggccgcggagctccgggacaggcagcgccttccgagctgcacaaacgcgtggggcggggcgtctctggatccggaagttgcctctgccctcaccaaagatggcggccccggcgccgctcgcccacctctcgtaaccaatggaaccgcggcgctcggccgattctcgcagacgccctcagatctacgctctctgatgcaacgccggaatcgcggaaaccgccggtgcacgttggagtcataagacggcgtcggtgttgcagtctgtgtccttggaggtgaccagggccactgcaggcatggtgctagcagagctgtacgtctctgaccgagagggaagcgatgccacgggagatggaaccaaggagaaaccatttaaaacaggtctaaaggctttgatgacagtagggaaagaaccatttcctaccatttacgtagattcacaaaaagaaaatgagaggtggaatgttatttctaaatcacagttgaagaacattaaaaagatgtggcatagggaacaaatgaagagtgaatcccgggaaaagaaagaggcagaagatagtttacgaagagaaaagaacctggaagaagcaaagaagattaccattaaaaatgatccaagtctcccagagccaaaatgtgtgaagattggtgcgttagaaggatatagaggccaaagagtaaaggtgtttggctgggtccacaggctgcgcaggcaaggaaagaatttaatgtttctggtgttgcgagatggtacaggttatcttcagtgtgtcttggcggatgagttgtgtcagtgctacaatggagttctcttgtccacggagagcagtgttgcagtgtatggaatgctaaatcttaccccaaagggcaagcaggctccaggtggccatgagctgagttgtgacttctgggaactaattgggttggcccctgctggaggagctgacaacctgatcaatgaggagtctgacgttgatgtccagctcaacaacagacacatgatgatccgaggagaaaacatgtccaaaatcctaaaagcacgatccatggtcaccaggtgctttagagatcacttctttgatagggggtactatgaagttactcctccaacattagtgcaaacacaagtagaaggtggtgccacactcttcaagcttgactattttggggaagaggcatttttgactcaatcctctcagttgtacttggagacctgcctcccagccctgggagatgttttttgtattgctcagtcataccgggcagagcagtccagaacacgaaggcacctggctgagtacactcacgtggaagctgagtgtcctttcctgacttttgacgacctcctgaaccggttggaggacttggtttgtgatgtggtagatcgaatattgaagtcacctgcagggagcatagtgcatgagctcaacccgaactttcagccccccaaacggcctttcaaacggatgaactattcagatgctatcgtttggctaaaagaacatgatgtaaagaaagaagatggaactttctatgaatttggagaagatatcccagaagctcctgagagactgatgacagacaccattaatgaaccaatcttgctgtgtcgatttcctgtggagatcaagtccttctacatgcagcgatgtcctgaggattcccgtcttactgaatctgtcgacgtgttgatgcccaatgttggtgagattgtgggaggctcaatgcgtatctttgatagtgaagaaatactggcaggttataaaagggaagggattgaccccactccctattactggtatacggatcagagaaaatacggtacatgtccccatggaggatatggcttgggcttggaacgattcttaacgtggattctgaataggtatcacatccgagacgtgtgcttataccctcgatttgtccagcgttgcacgccataaccattttctccagaagcgtggaggaaagattatgaaaggaacaggctctttaaaaaagaaaacaaaaagccagaatcttcctttttttgtttcattggggtttctctttctgtttttctttctactaccataaaaactatctcaaatcacctgaacatcaagtgatattaaggttgtcatcttaagaaaaaatatccatttttttcttaagttcgggaaacaaagttcggggaaaatacctggcatgaaactgtagttagggatacatttcagcattttactcactttatccaagttattcattttattcaagttatatgtatgtataattcaacaattttagattatggtgtaagatactccagtaacttatctttctgtccttttaagtgtacctggaattctttgatttattttattgcatcaatgaattaaaacaaaaatcttgggggaagaaattggcaatatcgtataaaaatctgctcatattagaacacagtataattcagcagtaaacactagaatcaaatga

SEQ ID NO: 456933 - DNA, 1844 bp, Homo sapiens
  misc_feature (67)..(67): n is a, c, g, or t
caacagaaacgacagggctagtgtaaaaccggctttaacgaggcagtactatacggctaggtacganggctgggtgtgaagaggcatttttgactcaatcctctcagttgtacttggagacctgcctcccagccctgggagatgttttttgtattgctcagtcataccgggcagagcagtccagaacacgaaggcacctggctgagtacactcacgtggaagctgagtgtcctttcctgacttttgacgacctcctgaaccggttggaggacttggtttgtgatgtggtagatcgaatattgaagtcacctgcagggagcatagtgcatgagctcaacccgaactttcagccccccaaacggcctttcaaacggatgaactattcagatgctatcgtttggctaaaagaacatgatgtaaagaaagaagatggaactttctatgaatttggagaagatatcccagaagctcctgagagactgatgacagacaccattaatgaaccaatcttgctgtgtcgatttcctgtggagatcaagtccttctacatgcagcgatgtcctgaggattcccgtcttactgaatctgtcgacgtgttgatgcccaatgttggtgagattgtgggaggctcaatgcgtatctttgatagtgaagaaatactggcaggttataaaagggaagggattgaccccactccctattactggtatacggatcagagaaaatacggtacatgtccccatggaggatatggcttgggcttggaacgattcttaacgtggattctgaataggtatcacatccgagacgtgtgcttataccctcgatttgtccagcgttgcacgccataaccattttctccagaagcgtggaggaaagattatgaaaggaacaggctctttaaaaaagaaaacaaaaagccagaatcttcctttttttgtttcattggggtttctctttctgtttttctttctactaccataaaaactatctcaaatcacctgaacatcaagtgatattaaggttgtcatcttaagaaaaaatatccatttttttcttaagttcgggaaacaaagttcggggaaaatacctggcatgaaactgtagttagggatacatttcagcattttactcactttatccaagttattcattttattcaagttatatgtatgtataattcaacaattttagattatggtgtaagatactccagtaacttatctttctgtccttttaagtgtacctggaattctttgatttattttattgcatcaatgaattaaaacaaaaatcttgggggaagaaattggcaatatcgtataaaaatctgctcatattagaacacagtataattcagcagtaaacactagaatcaaatgaatagccttttgtatcagttattaatcttttctaactctgcttagctgctaataatcctgaggcatagaaattgaagaatttgtaaaaatagaattgccttaaaggatttgaagtaagaacataattttggggagagttttttagtgattcacagtatccctcttagcattaatttaaggtaaagaggcagattgattttccctctttcctggtaattcctaagtaattaagaataaataagttccaaaagaaattgtagctggaatcttaataacaattgtgagtggctgtttgagttgcccccaccatgtccttagatctaatctgtgctaccttattaactcacagcaggcttactgaatggcttcatttcagatttagttgatttctccaccaaatgcatgtcatgtattctcaataggctgtattcccagcagtcaataaatgaacacccgtaaaaa

SEQ ID NO: 456934 - DNA, 2334 bp, Homo sapiens
gaagggtgcaaaagtgacactgtgccagggtctccagggccgcggagctccgggacaggcagcgccttccgagctgcacaaacgcgtggggcggggcgtctctggatccggaagttgcctctgccctcaccaaagatggcggccccggcgccgctcgcccacctctcgtaaccaatggaaccgcggcgctcggccgattctcgcagacgccctcagatctacgctctctgatgcaacgccggaatcgcggaaaccgccggtgcacgttggagtcataagacggcgtcggtgttgcagtctgtgtccttggaggtgaccagggccactgcaggcatggtgctagcagagctgtacgtctctgaccgagagggaagcgatgccacgggagatggaaccaaggagaaaccatttaaaacaggtctaaaggctttgatgacagtagggaaagaaccatttcctaccatttacgtagattcacaaaaagaaaatgagaggtggaatgttatttctaaatcacagttgaagaacattaaaaagatgtggcatagggaacaaatgaagagtgaatcccgggaaaagaaagaggcagaagatagtttacgaagagaaaagaacctggaagaagcaaagaagattaccattaaaaatgatccaagtctcccagagccaaaatgtgtgaagattggtgcgttagaaggatatagaggccaaagagtaaaggtgtttggctgggtccacaggctgcgcaggcaaggaaagaatttaatgtttctggtgttgcgagatggtacaggttatcttcagtgtgtcttggcggatgagttgtgtcagtgctacaatggagttctcttgtccacggagagcagtgttgcagtgtatggaatgctaaatcttaccccaaagggcaagcaggctccaggtggccatgagctgagttgtgacttctgggaactaattgggttggcccctgctggaggagctgacaacctgatcaatgaggagtctgacgttgatgtccagctcaacaacagacacatgatgatccgaggagaaaacatgtccaaaatcctaaaagcacgatccatggtcaccaggtgctttagagatcacttctttgatagggggtactatgaagttactcctccaacattagtgcaaacacaagtagaaggtggtgccacactcttcaagcttgactattttggggaagaggcatttttgactcaatcctctcagttgtacttggagacctgcctcccagccctgggagatgttttttgtattgctcagtcataccgggcagagcagtccagaacacgaaggcacctggctgagtacactcacgtggaagctgagtgtcctttcctgacttttgacgacctcctgaaccggttggaggacttggtttgtgatgtggtagatcgaatattgaagtcacctgcagggagcatagtgcatgagctcaacccgaactttcagccccccaaacggcctttcaaacggatgaactattcagatgctatcgtttggctaaaagaacatgatgtaaagaaagaagatggaactttctatgaatttggagaagatatcccagaagctcctgagagactgatgacagacaccattaatgaaccaatcttgctgtgtcgatttcctgtggagatcaagtccttctacatgcagcgatgtcctgaggattcccgtcttactgaatctgtcgacgtgttgatgcccaatgttggtgagattgtgggaggctcaatgcgtatctttgatagtgaagaaatactggcaggttataaaagggaagggattgaccccactccctattactggtatacggatcagagaaaatacggtacatgtccccatggaggatatggcttgggcttggaacgattcttaacgtggattctgaataggtatcacatccgagacgtgtgcttataccctcgatttgtccagcgttgcacgccataaccattttctccagaagcgtggaggaaagattatgaaaggaacaggctctttaaaaaagaaaacaaaaagccagaatcttcctttttttggtaccaagggggtaccattcctggttccttgctactaccatctatttcaattccgtaactcagatgaattaaggggggctctctgaacaaattccttatttcctagatcgtgaccactacggggagacacggtagaacagtctagggaatatcgcatatatcccactagcaacatcatcggagttatataccacacactggctgacagcacgaattcgtcctctcctcgtacttcacacgcacaacgcaccggtgtgtcccctcc

SEQ ID NO: 456935 - DNA, 1906 bp, Homo sapiens
gagttttaagaatatgtttatttctttttgaaagaaattattctttacacaaatgtgtatgggttaagggtaggtgtgtatcctctactctgttgaattgataggaggaaggactggtacagggtgaaggagctgcttctgtcttgttgcgatccaagttgtaaatgttaatgaagtcttgtttgacctcaggatatcccagaagctcctgagagactgatgacagacaccattaatgaaccaatcttgctgtgtcgatttcctgtggagatcaagtccttctacatgcagcgatgtcctgaggattcccgtcttactgaatctgtcagtttctgtttcaaagagtattaataattttgctttttaagggggtggggactgtcatctggaatcaggtacagctcatgccaaatatttcattctctatctagaataacaatatttaaagacgttgggttttttcaccctcccctgattgaagttgacatgctttgttaaattagagaaatgtaaacatttgaatattacatgatcatagtggctcctttagcccttggagcttaattgtaattttcatttaaactctagggcagtgctgtgtctgatcgcttgatagtaattgtgtatcttctttcacttatatttaaaggtcgacgtgttgatgcccaatgttggtgagattgtgggaggctcaatgcgtatctttgatagtgaagaaatactggcaggttataaaagggaagggattgaccccactccctattactggtatacggatcagagaaaatacggtacatgtccccatggaggatatggcttgggcttggaacgattcttaacgtggattctgaataggtatcacatccgagacgtgtgcttataccctcgatttgtccagcgttgcacgccataaccattttctccagaagcgtggaggaaagattatgaaaggaacaggctctttaaaaaagaaaacaaaaagccagaatcttcctttttttgtttcattggggtttctctttctgtttttctttctactaccataaaaactatctcaaatcacctgaacatcaagtgatattaaggttgtcatcttaagaaaaaatatccatttttttcttaagttcgggaaacaaagttcggggaaaatacctggcatgaaactgtagttagggatacatttcagcattttactcactttatccaagttattcattttattcaagttatatgtatgtataattcaacaattttagattatggtgtaagatactccagtaacttatctttctgtccttttaagtgtacctggaattctttgatttattttattgcatcaatgaattaaaacaaaaatcttgggggaagaaattggcaatatcgtataaaaatctgctcatattagaacacagtataattcagcagtaaacactagaatcaaatgaatagccttttgtatcagttattaatcttttctaactctgcttagctgctaataatcctgaggcatagaaattgaagaatttgtaaaaatagaattgccttaaaggatttgaagtaagaacataattttggggagagttttttagtgattcacagtatccctcttagcattaatttaaggtaaagaggcagattgattttccctctttcctggtaattcctaagtaattaagaataaataagttccaaaagaaattgtagctggaatcttaataacaattgtgagtggctgtttgagttgcccccaccatgtccttagatctaatctgtgctaccttattaactcacagcaggcttactgaatggcttcatttcagatttagttgatttctccaccaaatgcatgtcatgtattctcaataggctgtattcccagcagtcaataaatgaacacccgtaaaaa

SEQ ID NO: 456936 - DNA, 1184 bp, Homo sapiens
  misc_feature (18)..(18): n is a, c, g, or t
  misc_feature (56)..(56): n is a, c, g, or t
  misc_feature (69)..(69): n is a, c, g, or t
gtagtctgggcttatggntttgggggcagaataccaccaggcgaggttcccatctnatcacattatgtnaggaattgtttcacatcaacatgccttatcacttggaacgattcttaacgtggattctgaataggtatcacatccgagacgtgtgcttataccctcgatttgtccagcgttgcacgccataaccattttctccagaagcgtggaggaaagattatgaaaggaacaggctctttaaaaaagaaaacaaaaagccagaatcttcctttttttgtttcattggggtttctctttctgtttttctttctactaccataaaaactatctcaaatcacctgaacatcaagtgatattaaggttgtcatcttaagaaaaaatatccatttttttcttaagttcgggaaacaaagttcggggaaaatacctggcatgaaactgtagttagggatacatttcagcattttactcactttatccaagttattcattttattcaagttatatgtatgtataattcaacaattttagattatggtgtaagatactccagtaacttatctttctgtccttttaagtgtacctggaattctttgatttattttattgcatcaatgaattaaaacaaaaatcttgggggaagaaattggcaatatcgtataaaaatctgctcatattagaacacagtataattcagcagtaaacactagaatcaaatgaatagccttttgtatcagttattaatcttttctaactctgcttagctgctaataatcctgaggcatagaaattgaagaatttgtaaaaatagaattgccttaaaggatttgaagtaagaacataattttggggagagttttttagtgattcacagtatccctcttagcattaatttaaggtaaagaggcagattgattttccctctttcctggtaattcctaagtaattaagaataaataagttccaaaagaaattgtagctggaatcttaataacaattgtgagtggctgtttgagttgcccccaccatgtccttagatctaatctgtgctaccttattaactcacagcaggcttactgaatggcttcatttcagatttagttgatttctccaccaaatgcatgtcatgtattctcaataggctgtattcccagcagtcaataaatgaacacccgtaaaaa

SEQ ID NO: 456937 - DNA, 1831 bp, Homo sapiens
gaagggtgcaaaagtgacactgtgccagggtctccagggccgcggagctccgggacaggcagcgccttccgagctgcacaaacgcgtggggcggggcgtctctggatccggaagttgcctctgccctcaccaaagatggcggccccggcgccgctcgcccacctctcgtaaccaatggaaccgcggcgctcggccgattctcgcagacgccctcagatctacgctctctgatgcaacgccggaatcgcggaaaccgccggtgcacgttggagtcataagacggcgtcggtgttgcagtctgtgtccttggaggtgaccagggccactgcaggcatggtgctagcagagctgtacgtctctgaccgagagggaagcgatgccacgggagatggaaccaaggagaaaccatttaaaacaggtctaaaggctttgatgacagtagggaaagaaccatttcctaccatttacgtagattcacaaaaagaaaatgagaggtggaatgttatttctaaatcacagttgaagaacattaaaaagatgtggcatagggaacaaatgaagagtgaatcccgggaaaagaaagaggcagaagatagtttacgaagagaaaagaacctggaagaagcaaagaagattaccattaaaaatgatccaagtctcccagagccaaaatgtgtgaagattggtgcgttagaaggatatagaggccaaagagtaaaggtgtttggctgggtccacaggctgcgcaggcaaggaaagaatttaatgtttctggtgttgcgagatggtacaggttatcttcagtgtgtcttggcggatgagttgtgtcagtgctacaatggagttctcttgtccacggagagcagtgttgcagtgtatggaatgctaaatcttaccccaaagggcaagcaggctccaggtggccatgagctgagttgtgacttctgggaactaattgggttggcccctgctggaggagctgacaacctgatcaatgaggagtctgacgttgatgtccagctcaacaacagacacatgatgatccgaggagaaaacatgtccaaaatcctaaaagcacgatccatggtcaccaggtgctttagagatcacttctttgatagggggtactatgaagttactcctccaacattagtgcaaacacaagtagaaggtggtgccacactcttcaagcttgactattttggggaagaggcatttttgactcaatcctctcagttgtacttggagacctgcctcccagccctgggagatgttttttgtattgctcagtcataccgggcagagcagtccagaacacgaaggcacctggctgagtacactcacgtggaagctgagtgtcctttcctgacttttgacgacctcctgaaccggttggaggacttggtttgtgatgtggtagatcgaatattgaagtcacctgcagggagcatagtgcatgagctcaacccgaactttcagccccccaaacggcctttcaaacggatgaactattcagatgctatcgtttggctaaaagaacatgatgtaaagaaagaagatggaactttctatgaatttggagaaatatccagaaggtcctgagagatggtgacaggacacattatggacatcttgtgtgtgaattctgtggggatcagtcttttatggaggagtctggagatccggctaatgaatgggagtgtgttgccaaagtgggaatggggagcaaagggatttgattaaaaatgggggtaaggagaggtgccccctatggtagggtaacaaggtttctgggcatagggggagaggttaggttttcaaggatcaatgg

SEQ ID NO: 456938 - DNA, 1610 bp, Homo sapiens
gaagggtgcaaaagtgacactgtgccagggtctccagggccgcggagctccgggacaggcagcgccttccgagctgcacaaacgcgtggggcggggcgtctctggatccggaagttgcctctgccctcaccaaagatggcggccccggcgccgctcgcccacctctcgtaaccaatggaaccgcggcgctcggccgattctcgcagacgccctcagatctacgctctctgatgcaacgccggaatcgcggaaaccgccggtgcacgttggagtcataagacggcgtcggtgttgcagtctgtgtccttggaggtgaccagggccactgcaggcatggtgctagcagagctgtacgtctctgaccgagagggaagcgatgccacgggagatggaaccaaggagaaaccatttaaaacaggtctaaaggctttgatgacagtagggaaagaaccatttcctaccatttacgtagattcacaaaaagaaaatgagaggtggaatgttatttctaaatcacagttgaagaacattaaaaagatgtggcatagggaacaaatgaagagtgaatcccgggaaaagaaagaggcagaagatagtttacgaagagaaaagaacctggaagaagcaaagaagattaccattaaaaatgatccaagtctcccagagccaaaatgtgtgaagattggtgcgttagaaggatatagaggccaaagagtaaaggtgtttggctgggtccacaggctgcgcaggcaaggaaagaatttaatgtttctggtgttgcgagatggtacaggttatcttcagtgtgtcttggcggatgagttgtgtcagtgctacaatggagttctcttgtccacggagagcagtgttgcagtgtatggaatgctaaatcttaccccaaagggcaagcaggctccaggtggccatgagctgagttgtgacttctgggaactaattgggttggcccctgctggaggagctgacaacctgatcaatgaggagtctgacgttgatgtccagctcaacaacagacacatgatgatccgaggagaaaacatgtccaaaatcctaaaagcacgatccatggtcaccaggtgctttagagatcacttctttgatagggggtactatgaagttactcctccaaattagtgcaaacaccaggtcgacgctggggtgcccactcttaaagctggacacattggggcgaaagcgcgacaggaacaaaagccacaagggcctggggaacgaggacccaacaccgtgagaaagtctcgaaagaagcacacaccaccgggagagagacaacaaaagagacgcggagacaaccacccggggagcggagggcaccgaagcgcatgaagaacacccccaacgcaccacagacaaacaaccaggcacgacaacaacaaaaaccccacagcaagaaagaacagatgacaacccaaaacaacccacgaggataggacaagaaacacgagggaccagaaaaagaacgcaatacgaacgacacagaaacaacaacaaggaacgaagaggccacttgtgttgcgatcacccacgtctgtctcatagcactcaatccaagcacaccacgagacccgcgccgg

SEQ ID NO: 456939 - DNA, 2973 bp, Homo sapiens
gaagggtgcaaaagtgacactgtgccagggtctccagggccgcggagctccgggacaggcagcgccttccgagctgcacaaacgcgtggggcggggcgtctctggatccggaagttgcctctgccctcaccaaagatggcggccccggcgccgctcgcccacctctcgtaaccaatggaaccgcggcgctcggccgattctcgcagacgccctcagatctacgctctctgatgcaacgccggaatcgcggaaaccgccggtgcacgttggagtcataagacggcgtcggtgttgcagtctgtgtccttggaggtgaccagggccactgcaggcatggtgctagcagagctgtacgtctctgaccgagagggaagcgatgccacgggagatggaaccaaggagaaaccatttaaaacaggtctaaaggctttgatgacagtagggaaagaaccatttcctaccatttacgtagattcacaaaaagaaaatgagaggtggaatgttatttctaaatcacagttgaagaacattaaaaagatgtggcatagggaacaaatgaagagtgaatcccgggaaaagaaagaggcagaagatagtttacgaagagaaaagaacctggaagaagcaaagaagattaccattaaaaatgatccaagtctcccagagccaaaatgtgtgaagattggtgcgttagaaggatatagaggccaaagagtaaaggtgtttggctgggtccacaggctgcgcaggcaaggaaagaatttaatgtttctggtgttgcgagatggtacaggttatcttcagtgtgtcttggcggatgagttgtgtcagtgctacaatggagttctcttgtccacggagagcagtgttgcagtgtatggaatgctaaatcttaccccaaagggcaagcaggctccaggtggccatgagctgagttgtgacttctgggaactaattgggttggcccctgctggaggagctgacaacctgatcaatgaggagtctgacgttgatgtccagctcaacaacagacacatgatgatccgaggagaaaacatgtccaaaatcctaaaagcacgatccatggtcaccaggtgctttagagatcacttctttgatagggggtactatgaagttactcctccaacattagtgcaaacacaagtagaaggtggtgccacactcttcaagcttgactattttggggaagaggcatttttgactcaatcctctcagttgtacttggagacctgcctcccagccctgggagatgttttttgtattgctcagtcataccgggcagagcagtccagaacacgaaggcacctggctgagtacactcacgtggaagctgagtgtcctttcctgacttttgacgacctcctgaaccggttggaggacttggtttgtgatgtggtagatcgaatattgaagtcacctgcagggagcatagtgcatgagctcaacccgaactttcagccccccaaacggcctttcaaacggatgaactattcagatgctatcgtttggctaaaagaacatgatgtaaagaaagaagatggaactttctatgaatttggagaagatatcccagaagctcctgagagactgatgacagacaccattaatgaaccaatcttgctgtgtcgatttcctgtggagatcaagtccttctacatgcagcgatgtcctgaggattcccgtcttactgaatctgtcgacgtgttgatgcccaatgttggtgagattgtgggaggctcaatgcgtatctttgatagtgaagaaatactggcaggttataaaagggaagggattgaccccactccctattactggtatacggatcagagaaaatacggtacatgtccccatggaggatatggcttgggcttggaacgattcttaacgtggattctgaataggtatcacatccgagacgtgtgcttataccctcgatttgtccagcgttgcacgccataaccattttctccagaagcgtggaggaaagattatgaaaggaacaggctctttaaaaaagaaaacaaaaagccagaatcttcctttttttgtttcattggggtttctctttctgtttttctttctactaccataaaaactatctcaaatcacctgaacatcaagtgatattaaggttgtcatcttaagaaaaaatatccatttttttcttaagttcgggaaacaaagttcggggaaaatacctggcatgaaactgtagttagggatacatttcagcattttactcactttatccaagttattcattttattcaagttatatgtatgtataattcaacaattttagattatggtgtaagatactccagtaacttatctttctgtccttttaagtgtacctggaattctttgatttattttattgcatcaatgaattaaaacaaaaatcttgggggaagaaattggcaatatcgtataaaaatctgctcatattagaacacagtataattcagcagtaaacactagaatcaaatgaatagccttttgtatcagttattaatcttttctaactctgcttagctgctaataatcctgaggcatagaaattgaagaatttgtaaaaatagaattgccttaaaggatttgaagtaagaacataattttggggagagttttttagtgattcacagtatccctcttagcattaatttaaggtaaagaggcagattgattttccctctttcctggtaattcctaagtaattaagaataaataagttccaaaagaaattgtagctggaatcttaataacaattgtgagtggctgtttgagttgcccccaccatgtccttagatctaatctgtgctaccttattaactcacagcaggcttactgaatggcttcatttcagatttagttgatttctccaccaaatgcatgtcatgtattctcaataggctgtattcccagcagtcaataaatgaacacccgtaaaaa

SEQ ID NO: 456940 - DNA, 3193 bp, Homo sapiens
gaagggtgcaaaagtgacactgtgccagggtctccagggccgcggagctccgggacaggcagcgccttccgagctgcacaaacgcgtggggcggggcgtctctggatccggaagttgcctctgccctcaccaaagatggcggccccggcgccgctcgcccacctctcgtaaccaatggaaccgcggcgctcggccgattctcgcagacgccctcagatctacgctctctgatgcaacgccggaatcgcggaaaccgccggtgcacgttggagtcataagacggcgtcggtgttgcagtctgtgtccttggaggtgaccagggccactgcaggcatggtgctagcagagctgtacgtctctgaccgagagggaagcgatgccacgggagatggaaccaaggagaaaccatttaaaacaggtctaaaggctttgatgacagtagggaaagaaccatttcctaccatttacgtagattcacaaaaagaaaatgagaggtggaatgttatttctaaatcacagttgaagaacattaaaaagatgtggcatagggaacaaatgaagagtgaatcccgggaaaagaaagaggcagaagatagtttacgaagagaaaagaacctggaagaagcaaagaagattaccattaaaaatgatccaagtctcccagagccaaaatgtgtgaagattggtgcgttagaaggatatagaggccaaagagtaaaggtgtttggctgggtccacaggctgcgcaggcaaggaaagaatttaatgtttctggtgttgcgagatggtacaggttatcttcagtgtgtcttggcggatgagttgtgtcagtgctacaatggagttctcttgtccacggagagcagtgttgcagtgtatggaatgctaaatcttaccccaaagggcaagcaggctccaggtggccatgagctgagttgtgacttctgggaactaattgggttggcccctgctggaggagctgacaacctgatcaatgaggagtctgacgttgatgtccagctcaacaacagacacatgatgatccgaggagaaaacatgtccaaaatcctaaaagcacgatccatggtcaccaggtgctttagagatcacttctttgatagggggtactatgaagttactcctccaacattagtgcaaacacaagtagaaggtggtgccacactcttcaagcttgactattttggggaagaggcatttttgactcaatcctctcagttgtacttggagacctgcctcccagccctgggagatgttttttgtattgctcagtcataccgggcagagcagtccagaacacgaaggcacctggctgagtacactcacgtggaagctgagtgtcctttcctgacttttgacgacctcctgaaccggttggaggacttggtttgtgatgtggtagatcgaatattgaagtcacctgcagggagcatagtgcatgagctcaacccgaactttcagccccccaaacggcctttcaaacggatgaactattcagatgctatcgtttggctaaaagaacatgatgtaaagaaagaagatggaactttctatgaatttggagaagatatcccagaagctcctgagagactgatgacagacaccattaatgaaccaatcttgctgtgtcgatttcctgtggagatcaagtccttctacatgcagcgatgtcctgaggattcccgtcttactgaatctgtcgacgtgttgatgcccaatgttggtgagattgtgggaggctcaatgcgtatctttgatagtgaagaaatactggcaggttataaaagggaagggattgaccccactccctattactggtatacggatcagagaaaatacggtacatgtccccatggaggatatggcttgggcttggaacgattcttaacgtggattctgaataggtatcacatccgagacgtgtgcttataccctcgatttgtccagcgttgcacgccataaccattttctccagaagcgtggaggaaagattatgaaaggaacaggctctttaaaaaagaaaacaaaaagccagaatcttcctttttttgtttcattggggtttctctttctgtttttctttctactaccataaaaactatctcaaatcacctgaacatcaagtgatattaaggttgtcatcttaagaaaaaatatccatttttttcttaagttcgggaaacaaagttcggggaaaatacctggcatgaaactgtagttagggatacatttcagcattttactcactttatccaagttattcattttattcaagttatatgtatgtataattcaacaattttagattatggtgtaagatactccagtaacttatctttctgtccttttaagtgtacctggaattctttgatttattttattgcatcaatgaattaaaacaaaaatcttgggggaagaaattggcaatatcgtataaaaatctgctcatattagaacacagtataattcagcagtaaacactagaatcaaatgaatagccttttgtatcagttattaatcttttctaactctgcttagctgctaataatcctgaggcatagaaattgaagaatttgtaaaaatagaattgccttaaaggatttgaagtaagaacataattttggggagagttttttagtgattcacagtatccctcttagcattaatttaaggtaaagaggcagattgattttccctctttcctggtaattcctaagtaattaagaataaataagttccaaaagaaattgtagctggaatcttaataacaattgtgagtggctgtttgagttgcccccaccatgtccttagatctaatctgtgctaccttattaactcacagcaggcttactgaatggcttcatttcagatttagttgatttctccaccaaatgcatgtcatgtattctcaataggctgtattcccagcagtcaataaatgaacacccgtaaaaaaaaaaaacaaaaaaaaacaaaagtggggcgcgcgcccgaaaagttcaaaccacgtggggggggcacagaagagaaggcacacggccaagagaacgcaaaggggggtcccaaaaaaccgggagggggaaacagggtgcggacggtccaggcagaacaacaccgggggacaacacacgtgacacacagcacaagaacaagcagacacaagagaaaaaaggat

SEQ ID NO: 456941 - DNA, 3020 bp, Homo sapiens
gaagggtgcaaaagtgacactgtgccagggtctccagggccgcggagctccgggacaggcagcgccttccgagctgcacaaacgcgtggggcggggcgtctctggatccggaagttgcctctgccctcaccaaagatggcggccccggcgccgctcgcccacctctcgtaaccaatggaaccgcggcgctcggccgattctcgcagacgccctcagatctacgctctctgatgcaacgccggaatcgcggaaaccgccggtgcacgttggagtcataagacggcgtcggtgttgcagtctgtgtccttggaggtgaccagggccactgcaggcatggtgctagcagagctgtacgtctctgaccgagagggaagcgatgccacgggagatggaaccaaggagaaaccatttaaaacaggtctaaagtattgtacaatgttcaagaactgtcttttctctcctccctacccaaggctttgatgacagtagggaaagaaccatttcctaccatttacgtagattcacaaaaagaaaatgagaggtggaatgttatttctaaatcacagttgaagaacattaaaaagatgtggcatagggaacaaatgaagagtgaatcccgggaaaagaaagaggcagaagatagtttacgaagagaaaagaacctggaagaagcaaagaagattaccattaaaaatgatccaagtctcccagagccaaaatgtgtgaagattggtgcgttagaaggatatagaggccaaagagtaaaggtgtttggctgggtccacaggctgcgcaggcaaggaaagaatttaatgtttctggtgttgcgagatggtacaggttatcttcagtgtgtcttggcggatgagttgtgtcagtgctacaatggagttctcttgtccacggagagcagtgttgcagtgtatggaatgctaaatcttaccccaaagggcaagcaggctccaggtggccatgagctgagttgtgacttctgggaactaattgggttggcccctgctggaggagctgacaacctgatcaatgaggagtctgacgttgatgtccagctcaacaacagacacatgatgatccgaggagaaaacatgtccaaaatcctaaaagcacgatccatggtcaccaggtgctttagagatcacttctttgatagggggtactatgaagttactcctccaacattagtgcaaacacaagtagaaggtggtgccacactcttcaagcttgactattttggggaagaggcatttttgactcaatcctctcagttgtacttggagacctgcctcccagccctgggagatgttttttgtattgctcagtcataccgggcagagcagtccagaacacgaaggcacctggctgagtacactcacgtggaagctgagtgtcctttcctgacttttgacgacctcctgaaccggttggaggacttggtttgtgatgtggtagatcgaatattgaagtcacctgcagggagcatagtgcatgagctcaacccgaactttcagccccccaaacggcctttcaaacggatgaactattcagatgctatcgtttggctaaaagaacatgatgtaaagaaagaagatggaactttctatgaatttggagaagatatcccagaagctcctgagagactgatgacagacaccattaatgaaccaatcttgctgtgtcgatttcctgtggagatcaagtccttctacatgcagcgatgtcctgaggattcccgtcttactgaatctgtcgacgtgttgatgcccaatgttggtgagattgtgggaggctcaatgcgtatctttgatagtgaagaaatactggcaggttataaaagggaagggattgaccccactccctattactggtatacggatcagagaaaatacggtacatgtccccatggaggatatggcttgggcttggaacgattcttaacgtggattctgaataggtatcacatccgagacgtgtgcttataccctcgatttgtccagcgttgcacgccataaccattttctccagaagcgtggaggaaagattatgaaaggaacaggctctttaaaaaagaaaacaaaaagccagaatcttcctttttttgtttcattggggtttctctttctgtttttctttctactaccataaaaactatctcaaatcacctgaacatcaagtgatattaaggttgtcatcttaagaaaaaatatccatttttttcttaagttcgggaaacaaagttcggggaaaatacctggcatgaaactgtagttagggatacatttcagcattttactcactttatccaagttattcattttattcaagttatatgtatgtataattcaacaattttagattatggtgtaagatactccagtaacttatctttctgtccttttaagtgtacctggaattctttgatttattttattgcatcaatgaattaaaacaaaaatcttgggggaagaaattggcaatatcgtataaaaatctgctcatattagaacacagtataattcagcagtaaacactagaatcaaatgaatagccttttgtatcagttattaatcttttctaactctgcttagctgctaataatcctgaggcatagaaattgaagaatttgtaaaaatagaattgccttaaaggatttgaagtaagaacataattttggggagagttttttagtgattcacagtatccctcttagcattaatttaaggtaaagaggcagattgattttccctctttcctggtaattcctaagtaattaagaataaataagttccaaaagaaattgtagctggaatcttaataacaattgtgagtggctgtttgagttgcccccaccatgtccttagatctaatctgtgctaccttattaactcacagcaggcttactgaatggcttcatttcagatttagttgatttctccaccaaatgcatgtcatgtattctcaataggctgtattcccagcagtcaataaatgaacacccgtaaaaa

SEQ ID NO: 456942 - DNA, 2926 bp, Homo sapiens
gaagggtgcaaaagtgacactgtgccagggtctccagggccgcggagctccgggacaggcagcgccttccgagctgcacaaacgcgtggggcggggcgtctctggatccggaagttgcctctgccctcaccaaagatggcggccccggcgccgctcgcccacctctcgtaaccaatggaaccgcggcgctcggccgattctcgcagacgccctcagatctacgctctctgatgcaacgccggaatcgcggaaaccgccggtgcacgttggagtcataagacggcgtcggtgttgcagtctgtgtccttggaggtgaccagggccactgcaggcatggtgctagcagagctgtacgtctctgaccgagagggaagcgatgccacgggagatggaaccaaggagaaaccatttaaaacaggtctaaaggctttgatgacagtagggaaagaaccatttcctaccatttacgtagattcacaaaaagaaaatgagaggtggaatgttatttctaaatcacagttgaagaacattaaaaagatgtggcatagggaacaaatgaagagtgaatcccgggaaaagaaagaggcagaagatagtttacgaagagaaaagaacctggaagaagcaaagaagattaccattaaaaatgatccaagtctcccagagccaaaatgtgtttggctgggtccacaggctgcgcaggcaaggaaagaatttaatgtttctggtgttgcgagatggtacaggttatcttcagtgtgtcttggcggatgagttgtgtcagtgctacaatggagttctcttgtccacggagagcagtgttgcagtgtatggaatgctaaatcttaccccaaagggcaagcaggctccaggtggccatgagctgagttgtgacttctgggaactaattgggttggcccctgctggaggagctgacaacctgatcaatgaggagtctgacgttgatgtccagctcaacaacagacacatgatgatccgaggagaaaacatgtccaaaatcctaaaagcacgatccatggtcaccaggtgctttagagatcacttctttgatagggggtactatgaagttactcctccaacattagtgcaaacacaagtagaaggtggtgccacactcttcaagcttgactattttggggaagaggcatttttgactcaatcctctcagttgtacttggagacctgcctcccagccctgggagatgttttttgtattgctcagtcataccgggcagagcagtccagaacacgaaggcacctggctgagtacactcacgtggaagctgagtgtcctttcctgacttttgacgacctcctgaaccggttggaggacttggtttgtgatgtggtagatcgaatattgaagtcacctgcagggagcatagtgcatgagctcaacccgaactttcagccccccaaacggcctttcaaacggatgaactattcagatgctatcgtttggctaaaagaacatgatgtaaagaaagaagatggaactttctatgaatttggagaagatatcccagaagctcctgagagactgatgacagacaccattaatgaaccaatcttgctgtgtcgatttcctgtggagatcaagtccttctacatgcagcgatgtcctgaggattcccgtcttactgaatctgtcgacgtgttgatgcccaatgttggtgagattgtgggaggctcaatgcgtatctttgatagtgaagaaatactggcaggttataaaagggaagggattgaccccactccctattactggtatacggatcagagaaaatacggtacatgtccccatggaggatatggcttgggcttggaacgattcttaacgtggattctgaataggtatcacatccgagacgtgtgcttataccctcgatttgtccagcgttgcacgccataaccattttctccagaagcgtggaggaaagattatgaaaggaacaggctctttaaaaaagaaaacaaaaagccagaatcttcctttttttgtttcattggggtttctctttctgtttttctttctactaccataaaaactatctcaaatcacctgaacatcaagtgatattaaggttgtcatcttaagaaaaaatatccatttttttcttaagttcgggaaacaaagttcggggaaaatacctggcatgaaactgtagttagggatacatttcagcattttactcactttatccaagttattcattttattcaagttatatgtatgtataattcaacaattttagattatggtgtaagatactccagtaacttatctttctgtccttttaagtgtacctggaattctttgatttattttattgcatcaatgaattaaaacaaaaatcttgggggaagaaattggcaatatcgtataaaaatctgctcatattagaacacagtataattcagcagtaaacactagaatcaaatgaatagccttttgtatcagttattaatcttttctaactctgcttagctgctaataatcctgaggcatagaaattgaagaatttgtaaaaatagaattgccttaaaggatttgaagtaagaacataattttggggagagttttttagtgattcacagtatccctcttagcattaatttaaggtaaagaggcagattgattttccctctttcctggtaattcctaagtaattaagaataaataagttccaaaagaaattgtagctggaatcttaataacaattgtgagtggctgtttgagttgcccccaccatgtccttagatctaatctgtgctaccttattaactcacagcaggcttactgaatggcttcatttcagatttagttgatttctccaccaaatgcatgtcatgtattctcaataggctgtattcccagcagtcaataaatgaacacccgtaaaaa

SEQ ID NO: 456943 - DNA, 3544 bp, Homo sapiens
gaagggtgcaaaagtgacactgtgccagggtctccagggccgcggagctccgggacaggcagcgccttccgagctgcacaaacgcgtggggcggggcgtctctggatccggaagttgcctctgccctcaccaaagatggcggccccggcgccgctcgcccacctctcgtaaccaatggaaccgcggcgctcggccgattctcgcagacgccctcagatctacgctctctgatgcaacgccggaatcgcggaaaccgccggtgcacgttggagtcataagacggcgtcggtgttgcagtctgtgtccttggaggtgaccagggccactgcaggcatggtgctagcagagctgtacgtctctgaccgagagggaagcgatgccacgggagatggaaccaaggagaaaccatttaaaacaggtctaaaggctttgatgacagtagggaaagaaccatttcctaccatttacgtagattcacaaaaagaaaatgagaggtggaatgttatttctaaatcacagttgaagaacattaaaaagatgtggcatagggaacaaatgaagagtgaatcccgggaaaagaaagaggcagaagatagtttacgaagagaaaagaacctggaagaagcaaagaagattaccattaaaaatgatccaagtctcccagagccaaaatgtgtgaagattggtgcgttagaaggatatagaggccaaagagtaaaggtgtttggctgggtccacaggctgcgcaggcaaggaaagaatttaatgtttctggtgttgcgagatggtacaggttatcttcagtgtgtcttggcggatgagttgtgtcagtgctacaatggagttctcttgtccacggagagcagtgttgcagtgtatggaatgctaaatcttaccccaaagggcaagcaggctccaggtggccatgagctgagttgtgacttctgggaactaattgggttggcccctgctggaggagctgacaacctgatcaatgaggagtctgacgttgatgtccagctcaacaacagacacatgatgatccgaggagaaaacatgtccaaaatcctaaaagcacgatccatggtcaccaggtgctttagagatcacttctttgatagggggtactatgaagttactcctccaacattagtgcaaacacaagtagaaggtggtgccacactcttcaagcttgactattttggggaagaggcatttttgactcaatcctctcagttgtacttggagacctgcctcccagccctgggagatgttttttgtattgctcagtcataccgggcagagcagtccagaacacgaaggcacctggctgagtacactcacgtggaagctgagtgtcctttcctgacttttgacgacctcctgaaccggttggaggacttggtttgtgatgtggtagatcgaatattgaagtcacctgcagggagcatagtgcatgagctcaacccgaactttcagccccccaaacggcctttcaaacggatgaactattcagatgctatcgtttggctaaaagaacatgatgtaaagaaagaagatggaactttctatgaatttggagaagatatcccagaagctcctgagagactgatgacagacaccattaatgaaccaatcttgctgtgtcgatttcctgtggagatcaagtccttctacatgcagcgatgtcctgaggattcccgtcttactgaatctgtcgacgtgttgatgcccaatgttggtgagattgtgggaggctcaatgcgtatctttgatagtgaagaaatactggcaggttataaaagggaagggattgaccccactccctattactggtatacggatcaggtaaaaccaattttttaagtactcaacatttttttccactgtaatcgttctgtatatattgaaatttttaaaaggggagaattcagggtagtactttggtatttgaatgagctatattcagtttgcaggttataatgtggtgtgtgaatattgccagctttgttttggccaagttatatgttaatttcatttgaaaacctgtttaacggccggcttgttgattgcaactgagttttaaaaaattgatcctaccagtatctagtacccttcttcattttcctcttataaatagacattgacttattttaaaagtttttaaaaatctcttctttccagggtagtacttattccctggttgattttttcataccaaattatttctttatgcatggttcatgaaggcatagagattaagtgctgggattacaggcacgagccactgaatctggccatagttgaattcttaaccacagtgagctaactcctttcatggtggaaaattttaactgtcttagatgaaagttttaacttaagtatttactcctctttctttctttctttttttaaacagagaaaatacggtacatgtccccatggaggatatggcttgggcttggaacgattcttaacgtggattctgaataggtatcacatccgagacgtgtgcttataccctcgatttgtccagcgttgcacgccataaccattttctccagaagcgtggaggaaagattatgaaaggaacaggctctttaaaaaagaaaacaaaaagccagaatcttcctttttttgtttcattggggtttctctttctgtttttctttctactaccataaaaactatctcaaatcacctgaacatcaagtgatattaaggttgtcatcttaagaaaaaatatccatttttttcttaagttcgggaaacaaagttcggggaaaatacctggcatgaaactgtagttagggatacatttcagcattttactcactttatccaagttattcattttattcaagttatatgtatgtataattcaacaattttagattatggtgtaagatactccagtaacttatctttctgtccttttaagtgtacctggaattctttgatttattttattgcatcaatgaattaaaacaaaaatcttgggggaagaaattggcaatatcgtataaaaatctgctcatattagaacacagtataattcagcagtaaacactagaatcaaatgaatagccttttgtatcagttattaatcttttctaactctgcttagctgctaataatcctgaggcatagaaattgaagaatttgtaaaaatagaattgccttaaaggatttgaagtaagaacataattttggggagagttttttagtgattcacagtatccctcttagcattaatttaaggtaaagaggcagattgattttccctctttcctggtaattcctaagtaattaagaataaataagttccaaaagaaattgtagctggaatcttaataacaattgtgagtggctgtttgagttgcccccaccatgtccttagatctaatctgtgctaccttattaactcacagcaggcttactgaatggcttcatttcagatttagttgatttctccaccaaatgcatgtcatgtattctcaataggctgtattcccagcagtcaataaatgaacacccgtaaaaa

SEQ ID NO: 456944 - DNA, 3491 bp, Homo sapiens
gaagggtgcaaaagtgacactgtgccagggtctccagggccgcggagctccgggacaggcagcgccttccgagctgcacaaacgcgtggggcggggcgtctctggatccggaagttgcctctgccctcaccaaagatggcggccccggcgccgctcgcccacctctcgtaaccaatggaaccgcggcgctcggccgattctcgcagacgccctcagatctacgctctctgatgcaacgccggaatcgcggaaaccgccggtgcacgttggagtcataagacggcgtcggtgttgcagtctgtgtccttggaggtgaccagggccactgcaggcatggtgctagcagagctgtacgtctctgaccgagagggaagcgatgccacgggagatggaaccaaggagaaaccatttaaaacaggtctaaaggctttgatgacagtagggaaagaaccatttcctaccatttacgtagattcacaaaaagaaaatgagaggtggaatgttatttctaaatcacagttgaagaacattaaaaagatgtggcatagggaacaaatgaagagtgaatcccgggaaaagaaagaggcagaagatagtttacgaagagaaaagaacctggaagaagcaaagaagattaccattaaaaatgatccaagtctcccagagccaaaatgtgtgaagattggtgcgttagaaggatatagaggccaaagagtaaaggtgtttggctgggtccacaggctgcgcaggcaaggaaagaatttaatgtttctggtgttgcgagatggtacaggttatcttcagtgtgtcttggcggatgagttgtgtcagtgctacaatggagttctcttgtccacggagagcagtgttgcagtgtatggaatgctaaatcttaccccaaagggcaagcaggctccaggtggccatgagctgagttgtgacttctgggaactaattgggttggcccctgctggaggagctgacaacctgatcaatgaggagtctgacgttgatgtccagctcaacaacagacacatgatgatccgaggagaaaacatgtccaaaatcctaaaagcacgatccatggtcaccaggtgctttagagatcacttctttgatagggggtactatgaagttactcctccaacattagtgcaaacacaagtagaaggtggtgccacactcttcaagcttgactattttggggaagaggcatttttgactcaatcctctcagttgtacttggagacctgcctcccagccctgggagatgttttttgtattgctcagtcataccgggcagagcagtccagaacacgaaggcacctggctgagtacactcacgtggaagctgagtgtcctttcctgacttttgacgacctcctgaaccggttggaggacttggtttgtgatgtggtagatcgaatattgaagtcacctgcagggagcatagtgcatgagctcaacccgaactttcagccccccaaacggcctttcaaacggatgaactattcagatgctatcgtttggctaaaagaacatgatgtaaagaaagaagatggaactttctatgaatttggagaagatatcccagaagctcctgagagactgatgacagacaccattaatgaaccaatcttgctgtgtcgatttcctgtggagatcaagtccttctacatgcagcgatgtcctgaggattcccgtcttactgaatctgtcgacgtgttgatgcccaatgttggtgagattgtgggaggctcaatgcgtatctttgatagtgaagaaatactggcaggttataaaagggaagggattgaccccactccctattactggtatacggatcaggtaaaaccaattttttaagtactcaacatttttttccactgtaatcgttctgtatatattgaaatttttaaaaggggagaattcagggtagtactttggtatttgaatgagctatattcagtttgcaggttataatgtggtgtgtgaatattgccagctttgttttggccaagttatatgttaatttcatttgaaaacctgtttaacggccggcttgttgattgcaactgagttttaaaaaattgatcctaccagtatctagtacccttcttcattttcctcttataaatagacattgacttattttaaaagtttttcaaattatttctttatgcatggttcatgaaggcatagagattaagtgctgggattacaggcacgagccactgaatctggccatagttgaattcttaaccacagtgagctaactcctttcatggtggaaaattttaactgtcttagatgaaagttttaacttaagtatttactcctctttctttctttctttttttaaacagagaaaatacggtacatgtccccatggaggatatggcttgggcttggaacgattcttaacgtggattctgaataggtatcacatccgagacgtgtgcttataccctcgatttgtccagcgttgcacgccataaccattttctccagaagcgtggaggaaagattatgaaaggaacaggctctttaaaaaagaaaacaaaaagccagaatcttcctttttttgtttcattggggtttctctttctgtttttctttctactaccataaaaactatctcaaatcacctgaacatcaagtgatattaaggttgtcatcttaagaaaaaatatccatttttttcttaagttcgggaaacaaagttcggggaaaatacctggcatgaaactgtagttagggatacatttcagcattttactcactttatccaagttattcattttattcaagttatatgtatgtataattcaacaattttagattatggtgtaagatactccagtaacttatctttctgtccttttaagtgtacctggaattctttgatttattttattgcatcaatgaattaaaacaaaaatcttgggggaagaaattggcaatatcgtataaaaatctgctcatattagaacacagtataattcagcagtaaacactagaatcaaatgaatagccttttgtatcagttattaatcttttctaactctgcttagctgctaataatcctgaggcatagaaattgaagaatttgtaaaaatagaattgccttaaaggatttgaagtaagaacataattttggggagagttttttagtgattcacagtatccctcttagcattaatttaaggtaaagaggcagattgattttccctctttcctggtaattcctaagtaattaagaataaataagttccaaaagaaattgtagctggaatcttaataacaattgtgagtggctgtttgagttgcccccaccatgtccttagatctaatctgtgctaccttattaactcacagcaggcttactgaatggcttcatttcagatttagttgatttctccaccaaatgcatgtcatgtattctcaataggctgtattcccagcagtcaataaatgaacacccgtaaaaa

SEQ ID NO: 456945 - DNA, 2490 bp, Homo sapiens
gaagggtgcaaaagtgacactgtgccagggtctccagggccgcggagctccgggacaggcagcgccttccgagctgcacaaacgcgtggggcggggcgtctctggatccggaagttgcctctgccctcaccaaagatggcggccccggcgccgctcgcccacctctcgtaaccaatggaaccgcggcgctcggccgattctcgcagacgccctcagatctacgctctctgatgcaacgccggaatcgcggaaaccgccggtgcacgttggagtcataagacggcgtcggtgttgcagtctgtgtccttggaggtgaccagggccactgcaggcatggtgctagcagagctgtacgtctctgaccgagagggaagcgatgccacgggagatggaaccaaggagaaaccatttaaaacaggtctaaaggctttgatgacagtagggaaagaaccatttcctaccatttacgtagattcacaaaaagaaaatgagaggtggaatgttatttctaaatcacagttgaagaacattaaaaagatgtggcatagggaacaaatgaagagtgaatcccgggaaaagaaagaggcagaagatagtttacgaagagaaaagaacctggaagaagcaaagaagattaccattaaaaatgatccaagtctcccagagccaaaatgtgtgaagattggtgcgttagaaggatatagaggccaaagagtaaaggtgtttggctgggtccacaggctgcgcaggcaaggaaagaatttaatgtttctggtgttgcgagatggtacaggttatcttcagtgtgtcttggcggatgagttgtgtcagtgctacaatggagttctcttgtacactcacgtggaagctgagtgtcctttcctgacttttgacgacctcctgaaccggttggaggacttggtttgtgatgtggtagatcgaatattgaagtcacctgcagggagcatagtgcatgagctcaacccgaactttcagccccccaaacggcctttcaaacggatgaactattcagatgctatcgtttggctaaaagaacatgatgtaaagaaagaagatggaactttctatgaatttggagaagatatcccagaagctcctgagagactgatgacagacaccattaatgaaccaatcttgctgtgtcgatttcctgtggagatcaagtccttctacatgcagcgatgtcctgaggattcccgtcttactgaatctgtcgacgtgttgatgcccaatgttggtgagattgtgggaggctcaatgcgtatctttgatagtgaagaaatactggcaggttataaaagggaagggattgaccccactccctattactggtatacggatcagagaaaatacggtacatgtccccatggaggatatggcttgggcttggaacgattcttaacgtggattctgaataggtatcacatccgagacgtgtgcttataccctcgatttgtccagcgttgcacgccataaccattttctccagaagcgtggaggaaagattatgaaaggaacaggctctttaaaaaagaaaacaaaaagccagaatcttcctttttttgtttcattggggtttctctttctgtttttctttctactaccataaaaactatctcaaatcacctgaacatcaagtgatattaaggttgtcatcttaagaaaaaatatccatttttttcttaagttcgggaaacaaagttcggggaaaatacctggcatgaaactgtagttagggatacatttcagcattttactcactttatccaagttattcattttattcaagttatatgtatgtataattcaacaattttagattatggtgtaagatactccagtaacttatctttctgtccttttaagtgtacctggaattctttgatttattttattgcatcaatgaattaaaacaaaaatcttgggggaagaaattggcaatatcgtataaaaatctgctcatattagaacacagtataattcagcagtaaacactagaatcaaatgaatagccttttgtatcagttattaatcttttctaactctgcttagctgctaataatcctgaggcatagaaattgaagaatttgtaaaaatagaattgccttaaaggatttgaagtaagaacataattttggggagagttttttagtgattcacagtatccctcttagcattaatttaaggtaaagaggcagattgattttccctctttcctggtaattcctaagtaattaagaataaataagttccaaaagaaattgtagctggaatcttaataacaattgtgagtggctgtttgagttgcccccaccatgtccttagatctaatctgtgctaccttattaactcacagcaggcttactgaatggcttcatttcagatttagttgatttctccaccaaatgcatgtcatgtattctcaataggctgtattcccagcagtcaataaatgaacacccgtaaaaa

SEQ ID NO: 456946 - DNA, 2051 bp, Homo sapiens
gaagggtgcaaaagtgacactgtgccagggtctccagggccgcggagctccgggacaggcagcgccttccgagctgcacaaacgcgtggggcggggcgtctctggatccggaagttgcctctgccctcaccaaagatggcggccccggcgccgctcgcccacctctcgtaaccaatggaaccgcggcgctcggccgattctcgcagacgccctcagatctacgctctctgatgcaacgccggaatcgcggaaaccgccggtgcacgttggagtcataagacggcgtcggtgttgcagtctgtgtccttggaggtgaccagggccactgcaggcatggtgctagcagagctgtacgtctctgaccgagagggaagcgatgccacgggagatggaaccaaggagaaaccatttaaaacaggtctaaaggctttgatgacagtagggaaagaaccatttcctaccatttacgtagattcacaaaaagaaaatgagaggtggaatgttatttctaaatcacagttgaagaacattaaaaagatgtggcatagggaacaaatgaagagtgaatcccgggaaaagaaagaggcagaagatagtttacgaagagaaaagaacctggaagaagcaaagaagattaccattaaaaatgatccaagtctcccagagccaaaatgtgtgaagattggtgcgttagaaggatatagaggccaaagagtaaaggtgtttggctgggtccacaggctgcgcaggcaaggaaagaatttaatgtttctggtgttgcgagatggtacaggttatcttcagtgtgtcttggcggatgagttgtgtcagtgctacaatggagttctcttgtccacggagagcagtgttgcagtgtatggaatgctaaatcttaccccaaagggcaagcaggctccaggtggccatgagctgagttgtgacttctgggaactaattgggttggcccctgctggaggagctgacaacctgatcaatgaggagtctgacgttgatgtccagctcaacaacagacacatgatgatccgaggagaaaacatgtccaaaatcctaaaagcacgatccatggtcaccaggtgctttagagatcacttctttgatagggggtactatgaagttactcctccaacattagtgcaaacacaagtagaaggtggtgccacactcttcaagcttgactattttggggaagaggcatttttgactcaatcctctcagttgtacttggagacctgcctcccagccctgggagatgttttttgtattgctcagtcataccgggcagagcagtccagaacacgaaggcacctggctgagtacactcacgtggaagctgagtgtcctttcctgacttttgacgacctcctgaaccggttggaggacttggtttgtgatgtggtagatcgaatattgaagtcacctgcagggagcatagtgcatgagctcaacccgaactttcagccccccaaacggcctttcaaacggatgaactattcagatgctatcgtttggctaaaagaacatgatgtaaagaaagaagatggaactttctatgaatttggagaagatatcccagaagctcctgagagactgatgacagacaccattaatgaaccaatcttgctgagatggaggagaagtactatcgttttggcatcaagccagagtggatgaccgtccaccgcatcatcaaccacagtgtggataaaaaggggaattaccactatctagtaaaatggagggacttaccatatgaccagtccacgtggaaggaagatgaaatgaatatccctgaatacgaagaacataagcaaagctactggagacaccgagaactaattatgggggaagaccctgcccagccccgcaagtataagaagaagaagaaggagctacagggtgatgggcctcccagttctcccactaatgatcctaccgtgaaatatgagactcagcccggtttatcacagccactggagcacctgcacatgtatcagtggaagggctgactggctacgcttctcctgcattgg

SEQ ID NO: 456947 - DNA, 1671 bp, Homo sapiens
gaagggtgcaaaagtgacactgtgccagggtctccagggccgcggagctccgggacaggcagcgccttccgagctgcacaaacgcgtggggcggggcgtctctggatccggaagttgcctctgccctcaccaaagatggcggccccggcgccgctcgcccacctctcgtaaccaatggaaccgcggcgctcggccgattctcgcagacgccctcagatctacgctctctgatgcaacgccggaatcgcggaaaccgccggtgcacgttggagtcataagacggcgtcggtgttgcagtctgtgtccttggaggtgaccagggccactgcaggcatggtgctagcagagctgtacgtctctgaccgagagggaagcgatgccacgggagatggaaccaaggagaaaccatttaaaacaggtctaaaggctttgatgacagtagggaaagaaccatttcctaccatttacgtagattcacaaaaagaaaatgagaggtggaatgttatttctaaatcacagttgaagaacattaaaaagatgtggcatagggaacaaatgaagagtgaatcccgggaaaagaaagaggcagaagatagtttacgaagagaaaagaacctggaagaagcaaagaagattaccattaaaaatgatccaagtctcccagagccaaaatgtgtgaagattggtgcgttagaaggatatagaggccaaagagtaaaggtgtttggctgggtccacaggctgcgcaggcaaggaaagaatttaatgtttctggtgttgcgagatggtacaggttatcttcagtgtgtcttggcggatgagttgtgtcagtgctacaatggagttctcttgtccacggagagcagtgttgcagtgtatggaatgctaaatcttaccccaaagggcaagcaggctccaggtggccatgagctgagttgtgacttctgggaactaattgggttggcccctgctggaggagctgacaacctgatcaatgaggagtctgacgttgatgtccagctcaacaacagacacatgatgatccgaggagaaaacatgtccaaaatcctaaaagcacgatccatggtcaccaggtgctttagagatcacttctttgatagggggtactatgaagttactcctccaacattagtgcaaacacaagtagaaggtggtgccacactcttcaagcttgactattttggggaagaggcatttttgactcaatcctctcagttgtacttggagacctgcctcccagccctgggagatgttttttgtattgctcagtcataccgggcagagcagtccagaacacgaaggcacctggctgagtacactcacgtggaagctgagtgtcctttcctgacttttgacgacctcctgaaccggttggaggacttggtttgtgatgtggtagatcgaatattgaagtcacctgcagggagcatagtgcatgagctcaacccgaactttcagccccccaaacggcctttcaaacggatgaactattcagatgctatcgtttggctaaaagagtatctctaacattagtttcatgccaggtattttccccgaactttgtttcccgaacttaagaaaaaaatggatattttttcttaagatgacaaccttaatatcacttgatattcaggtgatttgagatagttt

SEQ ID NO: 456948 - DNA, 982 bp, Homo sapiens
gaagggtgcaaaagtgacactgtgccagggtctccagggccgcggagctccgggacaggcagcgccttccgagctgcacaaacgcgtggggcggggcgtctctggatccggaagttgcctctgccctcaccaaagatggcggccccggcgccgctcgcccacctctcgtaaccaatggaaccgcggcgctcggccgattctcgcagacgccctcagatctacgctctctgatgcaacgccggaatcgcggaaaccgccggtgcacgttggagtcataagacggcgtcggtgttgcagtctgtgtccttggaggtgaccagggccactgcaggcatggtgctagcagagctgtacgtctctgaccgagagggaagcgatgccacgggagatggaaccaaggagaaaccatttaaaacaggtctaaaggctttgatgacagtagggaaagaaccatttcctaccatttacgtagattcacaaaaagaaaatgagaggtggaatgttatttctaaatcacagttgaagaacattaaaaagatgtggcatagggaacaaatgaagagtgaatcccgggaaaagaaagaggcagaagatagtttacgaagagaaaagaacctggaagaagcaaagaagattaccattaaaaatgatccaagtctcccagagccaaaatgtatctttccctggaagatgcaccagcccattggatagcttagatgcagctgttggagggtggatctagcctgtgaggacccagtaacctggacccaatacatgacaacaaggattgaatgagtggtcgtttactgctgagtaattgctggtttcctggctacctgggccctgggtcacatggatgagagggctggaaaaaatgattatcagcacagagtccagaatcctgtgactctggcacagatatttgagtgtatgtgtagaaatgacgggtacggctcaatcgtatctggcatgctttactgtg

SEQ ID NO: 456949 - DNA, 1723 bp, Homo sapiens
actttggccggcccctagcgatctgaacccaaactaaatttcccagcaagcagcgcgccggcctgggaaaaggagcaagatggctgactccaaagagggtgttttgccgctgacggctgcttccactgccccaatttcattcggcttcactcgcacgtccgcacggaggcggctggccgactcgggagacggcgcggggccatctccggaggagaaggatttcttgaaaaccgtggaagggagggagctgcagagtgtgaagccccaggaggcccccaaggaactcgtcatccctttgatccagaatggccatcgcaggcagccaccagcccggccccctgggccatccacagatactggggccttggcggatggggtggtgtcccaggctgtgaaggagctcattgcggaatccaagaagtctctggaagagagagagaatgcgggtgtcgaccccacgctcgctatccccatgatccagaaaggatgcacccccagcggggaaggggcagacagcgaaccccgggcagagacagtgccagaggaggctaattatgaggcggtccccgtggaggcctatgggctggccatgctgcggggcatgggctggaaacctggcgagggcatcggccgcaccttcaatcaagtagtgaagccccgtgtcaactcactgaggcccaaggggttagggctgggtgccaacctgaccgaggcccaggccttgacccccactggcccctcccgcatgccaagaccagatgaggagcaagagaaagataaggaagatcagcctcaagggctggtgcctggaggagctgtggtggttctttctggccctcaccgaggcctctatgggaaggtggaaggccttgatcctgacaatgttcgggccatggttcgtctggctgtggggagccgggtggtgactgttagtgagtactacctgcggcctgtctcccagcaggagtttgacaagaacaccttggatctcaggcaacagaacggaactgcctcatcacggaagaccctctggaatcaagaactctacatccagcaggacaactcagagaggaagcggaaacaccttccagaccgacaggatgggcctgcagccaagagtgagaaagcagcccccagaagtcagcactggttgcacagggacctgcgtgtgcggtttgtggacaacatgtacaaaggaggccaatattacaacaccaagatgataattgaagatgtcctaagcccagatacctgtgtatgtcggacagatgaaggccgagtcctggaaggcctgagggaagacatgctggagaccctggttcccaaggcagagggtgaccgtgtgatggtggtgctgggcccacagactggaagggtgggacatttgctgagccgggacagagcacggagccgggctttggtgcaactgccaagagaaaatcaggtggtggagcttcactacgatgccatctgccagtacatgggccctagtgacacagatgatgactgacccatgggactcctcccatcccccaggctggtaccagttctgtaccatatgagaaagttgccttcagaaggtgggaagatcattgttccatcctctacttctggtgcagtcctgggacaaggacaagggaaagggatgggtgaaccagtagggaagctagaaacaaacccaatatttaccaaaatttagggtataataaaaaccatttcaagt

SEQ ID NO: 456950 - DNA, 484 bp, Homo sapiens
tttgttgaggatgtatcccgcaggaaccgctccccttcatccaactcaggatcgttccagtattctttgagaagggctaaagctccccagggaatggcactggggctctgtctctgcctgtaacacaacataacctggccatttcagacaccctccatctcctccccgtgccacaatgctaaagcagatatctcatcagcttcagatttcctggaattcatctttctcctaagcctacgcttgaaaatggggcccaaagttcttgaatatggccctttgtccagaacacctagctccagccaaagcgcctggtctcccttgacaggccactgggactttttctgctttaccttgaaaggagccctgctgatccccattttgaggacagggctccttacattcagggaagtgtggacaatataaggaggccttcccaatatgccctttgttcactgtgcacaaacaaagccttgtatctgaagac

SEQ ID NO: 456951 - DNA, 3275 bp, Homo sapiens
gcttattgttcttaactgtgtttctctacggtatgttacagatgagccatacgtttcttgtatcaatgtagacatgacttcagatacctctgaggacctacccagcagtctaggaccctgggccaagtgctgggactatggtactaaatccagtagatgggctgtgtagcaactctcccaggaacacactagggtacttagggaggtgcttgtggagcatgttgaagcttgagatctgagcaggaggcagtgatgtccctggtctattcagggaaagatttcagtgtgaaatggtaaatcctgtcagatggctgactccaaagagggtgttttgccgctgacggctgcttccactgccccaatttcattcggcttcactcgcacgtccgcacggaggcggctggccgactcgggagacggcgcggggccatctccggaggagaaggatttcttgaaaaccgtggaagggagggagctgcagagtgtgaagccccaggaggcccccaaggaactcgtcatccctttgatccagaatggccatcgcaggcagccaccagcccggccccctgggccatccacagatactggggccttggcggatggggtggtgtcccaggctgtgaaggagctcattgcggaatccaagaagtctctggaagagagagagaatgcgggtgtcgaccccacgctcgctatccccatgatccagaaaggatgcacccccagcggggaaggggcagacagcgaaccccgggcagagacagtgccagaggaggctaattatgaggcggtccccgtggaggcctatgggctggccatgctgcggggcatgggctggaaacctggcgagggcatcggccgcaccttcaatcaagtagtgaagccccgtgtcaactcactgaggcccaaggggttagggctgggtgccaacctgaccgaggcccaggccttgacccccactggcccctcccgcatgccaagaccagatgaggagcaagagaaagataaggaagatcagcctcaagggctggtgcctggaggagctgtggtggttctttctggccctcaccgaggcctctatgggaaggtggaaggccttgatcctgacaatgttcgggccatggttcgtctggctgtggggagccgggtggtgactgttagtgagtactacctgcggcctgtctcccagcaggagtttgacaagaacaccttggatctcaggcaacagaacggaactgcctcatcacggaagaccctctggaatcaagaactctacatccagcaggacaactcagagaggaagcggaaacaccttccagaccgacaggatgggcctgcagccaagagtgagaaagcagcccccagaagtcagcactggttgcacagggacctgcgtgtgcggtttgtggacaacatgtacaaaggaggccaatattacaacaccaagatgataattgaagatgtcctaagcccagatacctgtgtatgtcggacagatgaaggccgagtcctggaaggcctgagggaagacatgctggagaccctggttcccaaggcagagggtgaccgtgtgatggtggtgctgggcccacagactggaagggtgggacatttgctgagccgggacagagcacggagccgggctttggtgcaactgccaagagaaaatcaggtggtggagcttcactacgatgccatctgccagtacatgggccctagtgacacagatgatgactgacccatgggactcctcccatcccccaggctggtaccagttctgtaccatatgagaaagttgccttcagaaggtgggaagatcattgttccatcctctacttctggtgcagtcctgggacaaggacaagggaaagggatgggtgaaccagtagggaagctagaaacaaacccaatatttaccaaaatttagggtataataaaaaccatttcaagtacttaatagaaagatgaaatcataagtggtatgatgagctgcgagttaaggtgggaactgagttgactgaggtgggaaccatttcacttttaagccttgcttttctgctcagggtacaggacaagttaaaggactcatttgattgtgagctcactcttggaatatagatactataagcttgggcacagtggtgcatgcctgtaatcctagcactttaggaggctgaggtggatggatcgcttgagcccaggagttcaagatcagcctggccaacaaggtgaaaccctgtctctactaaaagtataaaaatacaaaaaattaccgaggtatggtggtgcacgcctataatcctagctactcaggaggctgaggcaagagaatcgcttgaacccaggaggcagaggttgctgtgagcccagattgcgccactgcactccagcccaggggacagagttagactctgtctcaaaaaaaaaaaaaaaaatctttagatgctgtggaatctgaaatactgtatctctgaacaactttctgagcaagaactctagcaactagcagcagagtatgctttcactctcagtttagagcaggaccccagagaatatgctgagcctggggtcttcctctgttgcccagactggagtgcagtggtgcaatcatagctcacagcagcattgatctcctgggctcaagcgatcttcccgtctcagcctcccaaagtgctgggattataggcactggaatgagccaccgtgcctggtctctggcttgtattttgttaatcgtagggaggatgttcccaacttctcatgtccagtagtccatttcctatgctttatgcacttcactctgtcaaggaggcctcctcctttctccaatcataataaaccagccttggtagcacctttgagaagggctaaagctccccagggaatggcactggggctctgtctctgcctgtaacacaacataacctggccatttcagacaccctccatctcctccccgtgccacaatgctaaagcagatatctcatcagcttcagatttcctggaattcatctttctcctaagcctacgcttgaaaatggggcccaaagttcttgaatatggccctttgtccagaacacctagctccagccaaagcgcctggtctcccttgacaggccactgggactttttctgctttaccttgaaaggagccctgctgatccccattttgaggacagggctccttacattcagggaagtgtggacaatataaggaggccttcccaatatgccctttgttcactgtgcacaaacaaagccttgtatctgaagac

SEQ ID NO: 456952 - DNA, 2307 bp, Homo sapiens
actttggccggcccctagcgatctgaacccaaactaaatttcccagcaagcagcgcgccggcctgggaaaaggagcaagatggctgactccaaagagggtgttttgccgctgacggctgcttccactgccccaatttcattcggcttcactcgcacgtccgcacggaggcggctggccgactcgggagacggcgcggggccatctccggaggagaaggatttcttgaaaaccgtggaagggagggagctgcagagtgtgaagccccaggaggcccccaaggaactcgtcatccctttgatccagaatggccatcgcaggcagccaccagcccggccccctgggccatccacagatactggggccttggcggatggggtggtgtcccaggctgtgaaggagctcattgcggaatccaagaagtctctggaagagagagagaatgcgggtgtcgaccccacgctcgctatccccatgatccagaaaggatgcacccccagcggggaaggggcagacagcgaaccccgggcagagacagtgccagaggaggctaattatgaggcggtccccgtggaggcctatgggctggccatgctgcggggcatgggctggaaacctggcgagggcatcggccgcaccttcaatcaagtagtgaagccccgtgtcaactcactgaggcccaaggggttagggctgggtgccaacctgaccgaggcccaggccttgacccccactggcccctcccgcatgccaagacacagatgatgactgacccatgggactcctcccatcccccaggctggtaccagttctgtaccatatgagaaagttgccttcagaaggtgggaagatcattgttccatcctctacttctggtgcagtcctgggacaaggacaagggaaagggatgggtgaaccagtagggaagctagaaacaaacccaatatttaccaaaatttagggtataataaaaaccatttcaagtacttaatagaaagatgaaatcataagtggtatgatgagctgcgagttaaggtgggaactgagttgactgaggtgggaaccatttcacttttaagccttgcttttctgctcagggtacaggacaagttaaaggactcatttgattgtgagctcactcttggaatatagatactataagcttgggcacagtggtgcatgcctgtaatcctagcactttaggaggctgaggtggatggatcgcttgagcccaggagttcaagatcagcctggccaacaaggtgaaaccctgtctctactaaaagtataaaaatacaaaaaattaccgaggtatggtggtgcacgcctataatcctagctactcaggaggctgaggcaagagaatcgcttgaacccaggaggcagaggttgctgtgagcccagattgcgccactgcactccagcccaggggacagagttagactctgtctcaaaaaaaaaaaaaaaaatctttagatgctgtggaatctgaaatactgtatctctgaacaactttctgagcaagaactctagcaactagcagcagagtatgctttcactctcagtttagagcaggaccccagagaatatgctgagcctggggtcttcctctgttgcccagactggagtgcagtggtgcaatcatagctcacagcagcattgatctcctgggctcaagcgatcttcccgtctcagcctcccaaagtgctgggattataggcactggaatgagccaccgtgcctggtctctggcttgtattttgttaatcgtagggaggatgttcccaacttctcatgtccagtagtccatttcctatgctttatgcacttcactctgtcaaggaggcctcctcctttctccaatcataataaaccagccttggtagcacctttgagaagggctaaagctccccagggaatggcactggggctctgtctctgcctgtaacacaacataacctggccatttcagacaccctccatctcctccccgtgccacaatgctaaagcagatatctcatcagcttcagatttcctggaattcatctttctcctaagcctacgcttgaaaatggggcccaaagttcttgaatatggccctttgtccagaacacctagctccagccaaagcgcctggtctcccttgacaggccactgggactttttctgctttaccttgaaaggagccctgctgatccccattttgaggacagggctccttacattcagggaagtgtggacaatataaggaggccttcccaatatgccctttgttcactgtgcacaaacaaagccttgtatctgaagac

SEQ ID NO: 456953 - DNA, 723 bp, Homo sapiens
ggtgtgaccaagaaggaaggaattctaggcagacagaacagcacaggcgaaggcgtttcggtaggacggggcagtttggcaaatgggtacagacagagctctctgggaatctctagtccacactaggtgagcattgttgttgtgggctaggttggctgcgggagggttcctgaaggaagctgaaatggttgagaggtgggggagaggcattctactagcaaatgcatgaggggtgagaggggcactttggcaggtgggaggtggctctaggctgagacatggccttggaaggaaagggcagtgagacactgaggctctgtcctggttctcctcataacctcttgaacaggccagatgagcaaaacttccttccccagggcaacagaacggaactgcctcatcacggaagaccctctggaatcaagaactctacatccagcaggacaactcagagaggaagcggaaacaccttccagaccggtgggactctgagcatgcgggaggggtcaagaaggcagggctgtgggtaggctcgagcagccagggaaggcttccaaggcaaggcgggctcatagaaggaacggggaactgcattgtgggtgggtttcatagcataggcaaagggagggcaactggaaagtgcatctgatgaagagctaagcctggtgctggcaccttctccacagacaggatgggcctgcagccaagagtgagaaagcagcc

SEQ ID NO: 456954 - DNA, 3047 bp, Homo sapiens
actttggccggcccctagcgatctgaacccaaactaaatttcccagcaagcagcgcgccggcctgggaaaaggagcaagatggctgactccaaagagggtgttttgccgctgacggctgcttccactgccccaatttcattcggcttcactcgcacgtccgcacggaggcggctggccgactcgggagacggcgcggggccatctccggaggagaaggatttcttgaaaaccgtggaagggagggagctgcagagtgtgaagccccaggaggcccccaaggaactcgtcatccctttgatccagaatggccatcgcaggcagccaccagcccggccccctgggccatccacagatactggggccttggcggatggggtggtgtcccaggctgtgaaggagctcattgcggaatccaagaagtctctggaagagagagagaatgcgggtgtcgaccccacgctcgctatccccatgatccagaaaggatgcacccccagcggggaaggggcagacagcgaaccccgggcagagacagtgccagaggaggctaattatgaggcggtccccgtggaggcctatgggctggccatgctgcggggcatgggctggaaacctggcgagggcatcggccgcaccttcaatcaagtagtgaagccccgtgtcaactcactgaggcccaaggggttagggctgggtgccaacctgaccgaggcccaggccttgacccccactggcccctcccgcatgccaagaccagatgaggagcaagagaaagataaggaagatcagcctcaagggctggtgcctggaggagctgtggtggttctttctggccctcaccgaggcctctatgggaaggtggaaggccttgatcctgacaatgttcgggccatggttcgtctggctgtggggagccgggtggtgactgttagtgagtactacctgcggcctgtctcccagcaggagtttgacaagaacaccttggatctcaggcaacagaacggaactgcctcatcacggaagaccctctggaatcaagaactctacatccagcaggacaactcagagaggaagcggaaacaccttccagaccgacaggatgggcctgcagccaagagtgagaaagcagcccccagaagtcagcactggttgcacagggacctgcgtgtgcggtttgtggacaacatgtacaaaggaggccaatattacaacaccaagatgataattgaagatgtcctaagcccagatacctgtgtatgtcggacagatgaaggccgagtcctggaaggcctgagggaagacatgctggagaccctggttcccaaggcagagggtgaccgtgtgatggtggtgctgggcccacagactggaagggtgggacatttgctgagccgggacagagcacggagccgggctttggtgcaactgccaagagaaaatcaggtggtggagcttcactacgatgccatctgccagtacatgggccctagtgacacagatgatgactgacccatgggactcctcccatcccccaggctggtaccagttctgtaccatatgagaaagttgccttcagaaggtgggaagatcattgttccatcctctacttctggtgcagtcctgggacaaggacaagggaaagggatgggtgaaccagtagggaagctagaaacaaacccaatatttaccaaaatttagggtataataaaaaccatttcaagtacttaatagaaagatgaaatcataagtggtatgatgagctgcgagttaaggtgggaactgagttgactgaggtgggaaccatttcacttttaagccttgcttttctgctcagggtacaggacaagttaaaggactcatttgattgtgagctcactcttggaatatagatactataagcttgggcacagtggtgcatgcctgtaatcctagcactttaggaggctgaggtggatggatcgcttgagcccaggagttcaagatcagcctggccaacaaggtgaaaccctgtctctactaaaagtataaaaatacaaaaaattaccgaggtatggtggtgcacgcctataatcctagctactcaggaggctgaggcaagagaatcgcttgaacccaggaggcagaggttgctgtgagcccagattgcgccactgcactccagcccaggggacagagttagactctgtctcaaaaaaaaaaaaaaaaatctttagatgctgtggaatctgaaatactgtatctctgaacaactttctgagcaagaactctagcaactagcagcagagtatgctttcactctcagtttagagcaggaccccagagaatatgctgagcctggggtcttcctctgttgcccagactggagtgcagtggtgcaatcatagctcacagcagcattgatctcctgggctcaagcgatcttcccgtctcagcctcccaaagtgctgggattataggcactggaatgagccaccgtgcctggtctctggcttgtattttgttaatcgtagggaggatgttcccaacttctcatgtccagtagtccatttcctatgctttatgcacttcactctgtcaaggaggcctcctcctttctccaatcataataaaccagccttggtagcacctttgagaagggctaaagctccccagggaatggcactggggctctgtctctgcctgtaacacaacataacctggccatttcagacaccctccatctcctccccgtgccacaatgctaaagcagatatctcatcagcttcagatttcctggaattcatctttctcctaagcctacgcttgaaaatggggcccaaagttcttgaatatggccctttgtccagaacacctagctccagccaaagcgcctggtctcccttgacaggccactgggactttttctgctttaccttgaaaggagccctgctgatccccattttgaggacagggctccttacattcagggaagtgtggacaatataaggaggccttcccaatatgccctttgttcactgtgcacaaacaaagccttgtatctgaagac

SEQ ID NO: 456955 - DNA, 2052 bp, Homo sapiens
actttggccggcccctagcgatctgaacccaaactaaatttcccagcaagcagcgcgccggcctgggaaaaggagcaagatggctgactccaaagagggtgttttgccgctgacggctgcttccactgccccaatttcattcggcttcactcgcacgtccgcacggaggcggctggccgactcgggagacggcgcggggccatctccggaggagaaggatttcttgaaaaccgtggaagggagggagctgcagagtgtgaagccccaggaggcccccaaggaactcgtcatccctttgatccagaatggccatcgcaggcagccaccagcccggccccctgggccatccacagatactggggccttggcggatggggtggtgtcccaggctgtgaaggagctcattgcggaatccaagaagtctctggaagagagagagaatgcgggtgtcgaccccacgctcgctatccccatgatccagaaaggatgcacccccagcggggaaggggcagacagcgaaccccgggcagagacagtgccagaggaggctaattatgaggcggtccccgtggaggcctatgggctggccatgctgcggggcatgggctggaaacctggcgagggcatcggccgcaccttcaatcaagtagtgaagccccgtgtcaactcactgaggcccaaggggttagggctgggtgccaacctgaccgaggcccaggccttgacccccactggcccctcccgcatgccaagaccagatgaggagcaagagaaagataaggaagatcagcctcaagggctggtgcctggaggagctgtggtggttctttctggccctcaccgaggcctctatgggaaggtggaaggccttgatcctgacaatgttcgggccatggttcgtctggctgtggggagccgggtggtgactgttagtgagtactacctgcggcctgtctcccagcaggagtttgacaagaacaccttggatctcaggcaacagaacggaactgcctcatcacggaagaccctctggaatcaagaactctacatccagcaggacaactcagagaggaagcggaaacaccttccagaccgacaggatgggcctgcagccaagagtgagaaagcagcccccagaagtcagcactggttgcacagggacctgcgtgtgcggtttgtggacaacatgtacaaaggaggccaatatttaccaaaatttagggtataataaaaaccatttcaagtacttaatagaaagatgaaatcataagtggtatgatgagctgcgagttaaggtgggaactgagttgactgaggtgggaaccatttcacttttaagccttgcttttctgctcagggtacaggacaagttaaaggactcatttgattgtgagctcactcttggaatatagatactataagcttgggcacagtggtgcatgcctgtaatctgggattataggcactggaatgagccaccgtgcctggtctctggcttgtattttgttaatcgtagggaggatgttcccaacttctcatgtccagtagtccatttcctatgctttatgcacttcactctgtcaaggaggcctcctcctttctccaatcataataaaccagccttggtagcacctttgagaagggctaaagctccccagggaatggcactggggctctgtctctgcctgtaacacaacataacctggccatttcagacaccctccatctcctccccgtgccacaatgctaaagcagatatctcatcagcttcagatttcctggaattcatctttctcctaagcctacgcttgaaaatggggcccaaagttcttgaatatggccctttgtccagaacacctagctccagccaaagcgcctggtctcccttgacaggccactgggactttttctgctttaccttgaaaggagccctgctgatccccattttgaggacagggctccttacattcagggaagtgtggacaatataaggaggccttcccaatatgccctttgttcactgtgcacaaacaaagccttgtatctgaagac

SEQ ID NO: 456956 - DNA, 1783 bp, Homo sapiens
cggtacccgacatttccacgagtcagcctgagggaagacatgctggagaccctggttcccaaggcagagggtgaccgtgtgatggtggtgctgggcccacagactggaagggtgggacatttgctgagccgggacagagcacggagccgggctttggtgcaactgccaagagaaaatcaggtggtggagcttcactacgatgccatctgccagtacatgggccctagtgacacagatgatgactgacccatgggactcctcccatcccccaggctggtaccagttctgtaccatatgagaaagttgccttcagaaggtgggaagatcattgttccatcctctacttctggtgcagtcctgggacaaggacaagggaaagggatgggtgaaccagtagggaagctagaaacaaacccaatatttaccaaaatttagggtataataaaaaccatttcaagtacttaatagaaagatgaaatcataagtggtatgatgagctgcgagttaaggtgggaactgagttgactgaggtgggaaccatttcacttttaagccttgcttttctgctcagggtacaggacaagttaaaggactcatttgattgtgagctcactcttggaatatagatactataagcttgggcacagtggtgcatgcctgtaatcctagcactttaggaggctgaggtggatggatcgcttgagcccaggagttcaagatcagcctggccaacaaggtgaaaccctgtctctactaaaagtataaaaatacaaaaaattaccgaggtatggtggtgcacgcctataatcctagctactcaggaggctgaggcaagagaatcgcttgaacccaggaggcagaggttgctgtgagcccagattgcgccactgcactccagcccaggggacagagttagactctgtctcaaaaaaaaaaaaaaaaatctttagatgctgtggaatctgaaatactgtatctctgaacaactttctgagcaagaactctagcaactagcagcagagtatgctttcactctcagtttagagcaggaccccagagaatatgctgagcctggggtcttcctctgttgcccagactggagtgcagtggtgcaatcatagctcacagcagcattgatctcctgggctcaagcgatcttcccgtctcagcctcccaaagtgctgggattataggcactggaatgagccaccgtgcctggtctctggcttgtattttgttaatcgtagggaggatgttcccaacttctcatgtccagtagtccatttcctatgctttatgcacttcactctgtcaaggaggcctcctcctttctccaatcataataaaccagccttggtagcacctttgagaagggctaaagctccccagggaatggcactggggctctgtctctgcctgtaacacaacataacctggccatttcagacaccctccatctcctccccgtgccacaatgctaaagcagatatctcatcagcttcagatttcctggaattcatctttctcctaagcctacgcttgaaaatggggcccaaagttcttgaatatggccctttgtccagaacacctagctccagccaaagcgcctggtctcccttgacaggccactgggactttttctgctttaccttgaaaggagccctgctgatccccattttgaggacagggctccttacattcagggaagtgtggacaatataaggaggccttcccaatatgccctttgttcactgtgcacaaacaaagccttgtatctgaagac

SEQ ID NO: 456957 - DNA, 398 bp, Homo sapiens
tgtgatgtctttgtctggttttggtattgggataatgctgctctcatagaatgagttccctcctcttctattttctggaagtttgtgaaggatccatgttcttttgagccaactcttgatggctgggttagttcagtttcaactttaggctgtggcaacagcaggggctgaggcctgcaagtgggtgcttgctcgattcaggtaactggagccatagggtctggctggcgtaagagcacagaaggtagagggcaggagtggctgaatcaggaagggccaggttggcatgaggaggccctagaggtttagcactgagcagtgatgggaatggtgtgcgtgttgattctgtgctgggtggagggggctggaggcagaggaagcctgaggagaggaagtgg

SEQ ID NO: 456958 - DNA, 192 bp, Homo sapiens
tgtgatacacataagtgaaatgcagaactcttaattatagaccttagtgaattttcacaaagtgaacacaccagtgtaaccatcacccagatcaagatacaggttaaatatcccttatccaaaatgcttgggaccagaagtgtttcagatttcagacctttggatttggagtatttgcatatacataatgag

SEQ ID NO: 456959 - DNA, 679 bp, Homo sapiens
ggacgcgtgggtcgacccacgcgtcgactaaaccttttcctaagctatctctcatggttcctatgtttttttatcataattaaaagcaaaaccatctggatcacctaacagtcagaggtcagtatctcagcgtgtgaattatagaggaaatacagagagaacctcttccacttttacttttcgtccaaataaaatgcatggtgtaccagaagttgaagatcgggttgaggattggggctagctcgatgacactaaggccccaacatcgcgggacctgctgtggcgcggattcttaggaacgctgttctagccggccccctctccaggggtcgccgtggccggcattatttcctagttcttcttgtaaccctgaggtgccagcgcggggagtgaggaggggtcagggggctaaggatgcaacctctgacgttctgcgccttcctaggagagtcttacatgtgttgagatttcacaagcaatgcgagttgtaaaataccagctctacaagaagctaggctctgtgacggcatagttttcagtagctttatcacaatattcacaatggagaattatatgacatggtagcagaaataggcccttttatgtgttgcttctattttacctcaaattgtagatatagggtaatcaataaaatccatccatgcctttcacacactaa

SEQ ID NO: 456960 - DNA, 258 bp, Homo sapiens
aaattgaggtccgggtggatattgaggtctgatggggggaaggagtaaacaatagcaatgcgagttgtaaaataccagctctacaagaagctaggctctgtgacggcatagttttcagtagctttatcacaatattcacaatggagaattatatgacatggtagcagaaataggcccttttatgtgttgcttctattttacctcaaattgtagatatagggtaatcaataaaatccatccatgcctttcacacactaa

SEQ ID NO: 456961 - DNA, 472 bp, Homo sapiens
ggtgatccactagattcagagctgctggcatgctagcttggtacaggacgtcgttatacaacaggtgacaattccagatgatgataatgaaagactctcgaaagttgaaaaagctagacagctaagagaacaagtgaatgacctctttagtcggaaatttggtgaagctattggtatgggttttcctgtgaaagttccctacaggaaaatcacaattaaccctggctgtgtggtggttgatggcatgcccccgggggtgtccttcaaagcccccagctacctggaaatcagctccatgagaaggatcttagactctgccgagtttatcaaattcacggtcattagaccatttccaggacttgtgattaataaccagctggttgatcagagtgagtcagaaggccccgtgatacagaatcagctgaaccaagccagttgaaagttccgttgaagccctcggggagtcctctag

SEQ ID NO: 456962 - DNA, 726 bp, Homo sapiens
tcacatctgcatcagatttattttttaaaggaatggattttgtgtggattatggcatggaaagtggctgagaaattctgtagcagggtaacaaaattatcttggtccaggagtcctgtagtggagaagataaaagtcaatgcttaactcataggttaacctcagcatgcttttgatttggtcaagcaatcaaagtactggtgaagaattgaagattggaagtgacacattttttgctcagggaagtaatggagaaagaaaaatcttcctggaggtagatcttcagtttggattagtctgaacatgatgaaacctgtagaaaccttcatttctcaagacaaagctcaaattcaaggttgtgaggaatgcagtcaccacttttgttaggggcagttgtgacagtgagtgactgcaaaaactgagaatgcgaagcctctattgtaaaaagaatgtgcaagtgccatagaagtcactgcaaggattgggtgctggagcagtgccggacctgccatcgtcaccagagtgcagcagattcaccagaaggagaatctccactcttgtcgtcactaacagcacttgactttgtcccattcataaaagatcttggaaggaattaaaggtgcttggtggttcctcattccaacaacaccttacttggcctgcccgtggaacatgcgttagtctttggacaggacaactcgagtcacagaccacaagagaaaagaat

SEQ ID NO: 456963 - DNA, 412 bp, Homo sapiens
ttaacttttgctcaattttcagagaaatggaatgctcgcatcactgatctacgtaaacaagttgaagaattgtttgaaaggaaatatgctcaagcctcttctttcctcacttcctgttctctgtcctcattattccaccagtctattgtcatatttttccccttcccagcctgcccagccaggatatgcggcaggaggttcatttttgaaagtataagaagggccgccgggaatgagtgtctcacggggacagagtgtgcgtttgggaagatgagacggttgtggagatgaatggtggggatggttacacaacaacgtgaatatgcttaaagccacgttcacggaacacgttcaaatgactaaaatggtaactttctggtatggatattttgccacaataaaaaaaaatgct

SEQ ID NO: 456964 - DNA, 4214 bp, Homo sapiens
atagttcttggcaatttgaaagttatttgagaaggggaaatttataatgacaattcaaatgaagcaaactaaaaaataatgaagaaagacagaggaaaaagcagtattcacttgaacacatcccaaacaaagaaaatttcaaatgtaacaaggaaaaagcctgctaaagctcacaatacagaaataactattgatactcaaaatagctttaaagccctgctcaccttttgaatgttgggaattgaccaggaggtgactgtaactgtaagatggttcttccagtaatgaccattttctttttcaagatgatgattattctccaccgtctaagagaccaaaggccaatgagctaccgcagccaccagtcccggaacccgccaatgctgggaagcggaaagtgagggagttcaacttcgagaaatggaatgctcgcatcactgatctacgtaaacaagttgaagaattgtttgaaaggaaatatgctcaagccataaaagccaaaggtccggtgacgatcccgtaccctcttttccagtctcatgttgaagatctttatgtagaaggacttcctgaaggaattccttttagaaggccatctacttacggaattcctcgcctggagaggatattacttgcaaaggaaaggattcgttttgtgattaagaaacatgagcttctgaattcaacacgtgaagatttacagcttgataagccagcttcaggagtaaaggaagaatggtatgccagaatcactaaattaagaaagatggtggatcagcttttctgcaaaaaatttgcggaagccttggggagcactgaagccaaggctgtaccgtaccaaaaatttgaggcacacccgaatgatctgtacgtggaaggactgccagaaaacattcctttccgaagtccctcatggtatggaatcccaaggctggaaaaaatcattcaagtgggcaatcgaattaaatttgttattaaaagaccagaacttctgactcacagtaccactgaagttactcagccaagaacgaatacaccagtcaaagaagattggaatgtcagaattaccaagctacggaagcaagtggaagagatttttaatttgaaatttgctcaagctcttggactcaccgaggcagtaaaagtaccatatcctgtgtttgaatcaaacccggagttcttgtatgtggaaggcttgccagaggggattcccttccgaagccctacctggtttggaattccacgacttgaaaggatcgtccgcgggagtaataaaatcaagttcgttgttaaaaaacctgaactagttatttcctacttgcctcctgggatggctagtaaaataaacactaaagctttgcagtcccccaaaagaccacgaagtcctgggagtaattcaaaggttcctgaaattgaggtcaccgtggaaggccctaataacaacaatcctcaaacctcagctgttcgaaccccgacccagactaacggttctaacgttcccttcaagccacgagggagagagttttcctttgaggcctggaatgccaaaatcacggacctaaaacagaaagttgaaaatctcttcaatgagaaatgtggggaagctcttggccttaaacaagctgtgaaggtgccgttcgcgttatttgagtctttcccggaagacttttatgtggaaggcttacctgagggtgtgccattccgaagaccatcgacttttggcattccgaggctggagaagatactcagaaacaaagccaaaattaagttcatcattaaaaagcccgaaatgtttgagacggcgattaaggagagcacctcctctaagagccctcccagaaaaataaattcatcacccaatgttaatactactgcatcaggtgttgaagaccttaacatcattcaggtgacaattccagatgatgataatgaaagactctcgaaagttgaaaaagctagacagctaagagaacaagtgaatgacctctttagtcggaaatttggtgaagctattggtatgggttttcctgtgaaagttccctacaggaaaatcacaattaaccctggctgtgtggtggttgatggcatgcccccgggggtgtccttcaaagcccccagctacctggaaatcagctccatgagaaggatcttagactctgccgagtttatcaaattcacggtcattagaccatttccaggacttgtgattaataaccagctggttgatcagagtgagtcagaaggccccgtgatacaagaatcagctgaaccaagccagttggaagttccagccacagaagaaataaaagagactgatggaagctctcagatcaagcaagaaccagaccccacgtggtagacctcttccctcctagggtaaatcagcttctgtgtcagggatgctgtgtggtgtccatctgaaccccctgcatacgcgtagctaatgtgatctccccactttcacataagatggtggccctgccttcagggaatgtgggagccaggtgggagccttcccggatatttaagctagaagattctacagggagattctccttggatcaatatatgtctctcagtcaaagatgtaaaagcacttttgccttaaaaagaatgttctgtttctaaatagagtcaacgttgtcctcctcattggaattcactatgagtcagaatcattagactgactttttttttttccatagtaatagtattttgcagagtctcacagagctgcagatcttttgttcatcttgcagagttaacaagtctgatcctgttagtccagatttcttaaatttggccaagttataataggagcagtagcttgagacccgaagtcaggaaactttgacaatggatttttttttttaatccagagacttgtactggaatttgccttaccctgtcagctcatggacttaaggtttcatcccgctttatgagtgcttctgaatccaagtcattgttacctgaatttgcaaattaagttgtgatattcgtgactgttaaattcctgtaattagattaacctctttgcttgcttgtttgttttctctcctattttagcttaaagtatcagtggttgagaagagcttttcggacctgttactaccccaagctgtgtaatatacttgtataacagaaataccttctatacaaacctttttttctacttttagatagaaatgtctactttttcagcagttctgtgaattaaagagcagagtgactgtgggtctggaatggctggtgtacttgggaatgtactatcaggattttacagcaatgctgggaaatgacagggaaaatgacaggaatgaatctcaccagattttttatgtacgcagcagagccttgagttacggtgtttattttccaatcaagtgaagatatctcctacttctcctactggaacatctcagcttctgcagtgaagaaaaattcctgtgatagttcagttctttagtttttctatttgaaaaaaaaaaatcatttaaatgatcctttgttcacggctctccttaatgactgagtgaacagttcctatctgtatatttgactaaaccttttcctaagctatctctcatggttcctatgtttttttatcataattaaaagcaaaaccatctggatcacctaacagtcagaggtcagtatctcagcgtgtgaattatagaggaaatacagagagaacctcttccacttttacttttcgtccaaataaaatgcatggtgtaccagaagttgaagatcgggttgaggattggggctagctcgatgacactaaggccccaacatcgcgggacctgctgtggcgcggattcttaggaacgctgttctagccggccccctctccaggggtcgccgtggccggcattatttcctagttcttcttgtaaccctgaggtgccagcgcggggagtgaggaggggtcagggggctaaggatgcaacctctgacgttctgcgccttcctaggagagtcttacatgtgttgagatttcacaagcaatgcgagttgtaaaataccagctctacaagaagctaggctctgtgacggcatagttttcagtagctttatcacaatattcacaatggagaattatatgacatggtagcagaaataggcccttttatgtgttgcttctattttacctcaaattgtagatatagggtaatcaataaaatccatccatgcctttcacacactaa

SEQ ID NO: 456965 - DNA, 3517 bp, Homo sapiens
ttgctgcctgctgagccagcttcaggagtaaaggaagaatggtatgccagaatcactaaattaagaaagatggtggatcagcttttctgcaaaaaatttgcggaagccttggggagcactgaagccaaggctgtaccgtaccaaaaatttgaggcacacccgaatgatctgtacgtggaaggactgccagaaaacattcctttccgaagtccctcatggtatggaatcccaaggctggaaaaaatcattcaagtgggcaatcgaattaaatttgttattaaaagaccagaacttctgactcacagtaccactgaagttactcagccaagaacgaatacaccagtcaaagaagattggaatgtcagaattaccaagctacggaagcaagtggaagagatttttaatttgaaatttgctcaagctcttggactcaccgaggcagtaaaagtaccatatcctgtgtttgaatcaaacccggagttcttgtatgtggaaggcttgccagaggggattcccttccgaagccctacctggtttggaattccacgacttgaaaggatcgtccgcgggagtaataaaatcaagttcgttgttaaaaaacctgaactagttatttcctacttgcctcctgggatggctagtaaaataaacactaaagctttgcagtcccccaaaagaccacgaagtcctgggagtaattcaaaggttcctgaaattgaggtcaccgtggaaggccctaataacaacaatcctcaaacctcagctgttcgaaccccgacccagactaacggttctaacgttcccttcaagccacgagggagagagttttcctttgaggcctggaatgccaaaatcacggacctaaaacagaaagttgaaaatctcttcaatgagaaatgtggggaagctcttggccttaaacaagctgtgaaggtgccgttcgcgttatttgagtctttcccggaagacttttatgtggaaggcttacctgagggtgtgccattccgaagaccatcgacttttggcattccgaggctggagaagatactcagaaacaaagccaaaattaagttcatcattaaaaagcccgaaatgtttgagacggcgattaaggagagcacctcctctaagagccctcccagaaaaataaattcatcacccaatgttaatactactgcatcaggtgttgaagaccttaacatcattcaggtgacaattccagatgatgataatgaaagactctcgaaagttgaaaaagctagacagctaagagaacaagtgaatgacctctttagtcggaaatttggtgaagctattggtatgggttttcctgtgaaagttccctacaggaaaatcacaattaaccctggctgtgtggtggttgatggcatgcccccgggggtgtccttcaaagcccccagctacctggaaatcagctccatgagaaggatcttagactctgccgagtttatcaaattcacggtcattagaccatttccaggacttgtgattaataaccagctggttgatcagagtgagtcagaaggccccgtgatacaagaatcagctgaaccaagccagttggaagttccagccacagaagaaataaaagagactgatggaagctctcagatcaagcaagaaccagaccccacgtggtagacctcttccctcctagggtaaatcagcttctgtgtcagggatgctgtgtggtgtccatctgaaccccctgcatacgcgtagctaatgtgatctccccactttcacataagatggtggccctgccttcagggaatgtgggagccaggtgggagccttcccggatatttaagctagaagattctacagggagattctccttggatcaatatatgtctctcagtcaaagatgtaaaagcacttttgccttaaaaagaatgttctgtttctaaatagagtcaacgttgtcctcctcattggaattcactatgagtcagaatcattagactgactttttttttttccatagtaatagtattttgcagagtctcacagagctgcagatcttttgttcatcttgcagagttaacaagtctgatcctgttagtccagatttcttaaatttggccaagttataataggagcagtagcttgagacccgaagtcaggaaactttgacaatggatttttttttttaatccagagacttgtactggaatttgccttaccctgtcagctcatggacttaaggtttcatcccgctttatgagtgcttctgaatccaagtcattgttacctgaatttgcaaattaagttgtgatattcgtgactgttaaattcctgtaattagattaacctctttgcttgcttgtttgttttctctcctattttagcttaaagtatcagtggttgagaagagcttttcggacctgttactaccccaagctgtgtaatatacttgtataacagaaataccttctatacaaacctttttttctacttttagatagaaatgtctactttttcagcagttctgtgaattaaagagcagagtgactgtgggtctggaatggctggtgtacttgggaatgtactatcaggattttacagcaatgctgggaaatgacagggaaaatgacaggaatgaatctcaccagattttttatgtacgcagcagagccttgagttacggtgtttattttccaatcaagtgaagatatctcctacttctcctactggaacatctcagcttctgcagtgaagaaaaattcctgtgatagttcagttctttagtttttctatttgaaaaaaaaaaatcatttaaatgatcctttgttcacggctctccttaatgactgagtgaacagttcctatctgtatatttgactaaaccttttcctaagctatctctcatggttcctatgtttttttatcataattaaaagcaaaaccatctggatcacctaacagtcagaggtcagtatctcagcgtgtgaattatagaggaaatacagagagaacctcttccacttttacttttcgtccaaataaaatgcatggtgtaccagaagttgaagatcgggttgaggattggggctagctcgatgacactaaggccccaacatcgcgggacctgctgtggcgcggattcttaggaacgctgttctagccggccccctctccaggggtcgccgtggccggcattatttcctagttcttcttgtaaccctgaggtgccagcgcggggagtgaggaggggtcagggggctaaggatgcaacctctgacgttctgcgccttcctaggagagtcttacatgtgttgagatttcacaagcaatgcgagttgtaaaataccagctctacaagaagctaggctctgtgacggcatagttttcagtagctttatcacaatattcacaatggagaattatatgacatggtagcagaaataggcccttttatgtgttgcttctattttacctcaaattgtagatatagggtaatcaataaaatccatccatgcctttcacacactaa

SEQ ID NO: 456966 - DNA, 5693 bp, Homo sapiens
atagttcttggcaatttgaaagttatttgagaaggggaaatttataatgacaattcaaatgaagcaaactaaaaaataatgaagaaagacagaggaaaaagcagtattcacttgaacacatcccaaacaaagaaaatttcaaatgtaacaaggaaaaagcctgctaaagctcacaatacagaaataactattgatactcaaaatagctttaaagccctgctcaccttttgaatgttgggaattgaccaggaggtgactgtaactgtaagatggttcttccagtaatgaccattttctttttcaagatgatgattattctccaccgtctaagagaccaaaggccaatgagctaccgcagccaccagtcccggaacccgccaatgctgggaagcggaaagtgagggagttcaacttcgagaaatggaatgctcgcatcactgatctacgtaaacaagttgaagaattgtttgaaaggaaatatgctcaagccataaaagccaaaggtccggtgacgatcccgtaccctcttttccagtctcatgttgaagatctttatgtagaaggacttcctgaaggaattccttttagaaggccatctacttacggaattcctcgcctggagaggatattacttgcaaaggaaaggattcgttttgtgattaagaaacatgagcttctgaattcaacacgtgaagatttacagcttgataagccagcttcaggagtaaaggaagaatggtatgccagaatcactaaattaagaaagatggtggatcagcttttctgcaaaaaatttgcggaagccttggggagcactgaagccaaggctgtaccgtaccaaaaatttgaggcacacccgaatgatctgtacgtggaaggactgccagaaaacattcctttccgaagtccctcatggtatggaatcccaaggctggaaaaaatcattcaagtgggcaatcgaattaaatttgttattaaaagaccagaacttctgactcacagtaccactgaagttactcagccaagaacgaatacaccagtcaaagaagattggaatgtcagaattaccaagctacggaagcaagtggaagagatttttaatttgaaatttgctcaagctcttggactcaccgaggcagtaaaagtaccatatcctgtgtttgaatcaaacccggagttcttgtatgtggaaggcttgccagaggggattcccttccgaagccctacctggtttggaattccacgacttgaaaggatcgtccgcgggagtaataaaatcaagttcgttgttaaaaaacctgaactagttatttcctacttgcctcctgggatggctagtaaaataaacactaaagctttgcagtcccccaaaagaccacgaagtcctgggagtaattcaaaggttcctgaaattgaggtcaccgtggaaggccctaataacaacaatcctcaaacctcagctgttcgaaccccgacccagactaacggttctaacgttcccttcaagccacgagggagagagttttcctttgaggcctggaatgccaaaatcacggacctaaaacagaaagttgaaaatctcttcaatgagaaatgtggggaagctcttggccttaaacaagctgtgaaggtgccgttcgcgttatttgagtctttcccggaagacttttatgtggaaggcttacctgagggtgtgccattccgaagaccatcgacttttggcattccgaggctggagaagatactcagaaacaaagccaaaattaagttcatcattaaaaagcccgaaatgtttgagacggcgattaaggagagcacctcctctaagagccctcccagaaaaataaattcatcacccaatgttaatactactgcatcaggtgttgaagaccttaacatcattcaggtgacaattccagatgatgataatgaaagactctcgaaagttgaaaaagctagacagctaagagaacaagtgaatgacctctttagtcggaaatttggtgaagctattggtatgggttttcctgtgaaagttccctacaggaaaatcacaattaaccctggctgtgtggtggttgatggcatgcccccgggggtgtccttcaaagcccccagctacctggaaatcagctccatgagaaggatcttagactctgccgagtttatcaaattcacggtcattaggtaagtgagagtttcctgcttagtcacaggagcgaatctggagctcatgaggctgactcttctaaaatgcagccacaggtagtcatcgaatccggcttcctatgctgtgcaatcaacaaatcaaaataacttgtgtcatcattagaatgtcagatgtgcttctacgaactaagctgactcttttaattctttggcaaagggttggcaaactaggactgtttgccaaattcaggctgcctcctatttttagagtcttcctgaaacacagctacacccgtattatccatggctgctttcctgtcacagtgagtaagtagctgggactgagaaggcatggcctccaaagtctaaaatatttactctctagcactttgtagaaaaaccttagctaggcacaatgtctaacgcctgtaatcccagcattttgggaggccaaggcaggcagatcacctgaggtcaggagttccagaccagcctggccaacatggtgaaatcccatctctacaaaaataaaacagttagctgggcatgatggcgggtgcctgtaatcccagctactcgggaggctgaggcaggatagtcgcttgaacccaggaggtggaggttgcaatgagccaagatcatgccactgcactccagcctggacgacagagtgagactccatcacaagaaaaaaagaactttgtcaacctctgtcttagggcgccttgtcacaggcttcgggtcagacggattcaaccttgcatcagccatttgttagccaggtcactctgttctttgtctgtaaatgagattgatcgttgttcccactgagagtgtcagctccttcccgtagagcaggcatgatgattgtactcacctctgacaccattgtgagtgccacattccttcccacgtccttgtcactgtaagagatgcccacctgagcaccaaccccaggttatcttcccctttgtcttccagccccccagaaacagctacgactcaacctacccaatcatttcatcatcagattgccactgtctctagttcaggtctcttgggactggcactcagaaatctcataataaatcctcttgaggcttctcatacactcgtcttcttccaatcttctttccctcaaaatctcatattttggttccacttcacccaccgtcattctccatatcactcccaggagttaggcaaaaagccccttccgttcttccgtatgttaaacttagaatcactctgttccctgctctgcgtttctattttttgtttttcctccatttactagtagcttaacactttctaacagtgttcttattattgatacgtatctatctcttccataagcttataaggtcacggataatacttctcattgtagtacgtaaatgacgtgggctagatatgagttgaataaacagttatacctgtaaattcttacagagtgaaaataaattgttatactttacaatttgtttctctctttagaccatttccaggacttgtgattaataaccagctggttgatcagagtgagtcagaaggccccgtgatacaagaatcagctgaaccaagccagttggaagttccagccacagaagaaataaaagagactgatggaagctctcagatcaagcaagaaccagaccccacgtggtagacctcttccctcctagggtaaatcagcttctgtgtcagggatgctgtgtggtgtccatctgaaccccctgcatacgcgtagctaatgtgatctccccactttcacataagatggtggccctgccttcagggaatgtgggagccaggtgggagccttcccggatatttaagctagaagattctacagggagattctccttggatcaatatatgtctctcagtcaaagatgtaaaagcacttttgccttaaaaagaatgttctgtttctaaatagagtcaacgttgtcctcctcattggaattcactatgagtcagaatcattagactgactttttttttttccatagtaatagtattttgcagagtctcacagagctgcagatcttttgttcatcttgcagagttaacaagtctgatcctgttagtccagatttcttaaatttggccaagttataataggagcagtagcttgagacccgaagtcaggaaactttgacaatggatttttttttttaatccagagacttgtactggaatttgccttaccctgtcagctcatggacttaaggtttcatcccgctttatgagtgcttctgaatccaagtcattgttacctgaatttgcaaattaagttgtgatattcgtgactgttaaattcctgtaattagattaacctctttgcttgcttgtttgttttctctcctattttagcttaaagtatcagtggttgagaagagcttttcggacctgttactaccccaagctgtgtaatatacttgtataacagaaataccttctatacaaacctttttttctacttttagatagaaatgtctactttttcagcagttctgtgaattaaagagcagagtgactgtgggtctggaatggctggtgtacttgggaatgtactatcaggattttacagcaatgctgggaaatgacagggaaaatgacaggaatgaatctcaccagattttttatgtacgcagcagagccttgagttacggtgtttattttccaatcaagtgaagatatctcctacttctcctactggaacatctcagcttctgcagtgaagaaaaattcctgtgatagttcagttctttagtttttctatttgaaaaaaaaaaatcatttaaatgatcctttgttcacggctctccttaatgactgagtgaacagttcctatctgtatatttgactaaaccttttcctaagctatctctcatggttcctatgtttttttatcataattaaaagcaaaaccatctggatcacctaacagtcagaggtcagtatctcagcgtgtgaattatagaggaaatacagagagaacctcttccacttttacttttcgtccaaataaaatgcatggtgtaccagaagttgaagatcgggttgaggattggggctagctcgatgacactaaggccccaacatcgcgggacctgctgtggcgcggattcttaggaacgctgttctagccggccccctctccaggggtcgccgtggccggcattatttcctagttcttcttgtaaccctgaggtgccagcgcggggagtgaggaggggtcagggggctaaggatgcaacctctgacgttctgcgccttcctaggagagtcttacatgtgttgagatttcacaagcaatgcgagttgtaaaataccagctctacaagaagctaggctctgtgacggcatagttttcagtagctttatcacaatattcacaatggagaattatatgacatggtagcagaaataggcccttttatgtgttgcttctattttacctcaaattgtagatatagggtaatcaataaaatccatccatgcctttcacacactaa

SEQ ID NO: 456967 - DNA, 3770 bp, Homo sapiens
ttcttcaagacctagtaatagttctctggggtttcatcatttgtttcagcttagatttgttgacagcggtttcctggagtgctgtcttgagaacgattctgaggaggctcagcaagaaagagtgtttcagttgattgggtgtgtctgtcatggagaaggaagtaaggagtgggcagtgctagcaaaattcccggggcacttctgtccattatctcaatacctggggttgacatttcctgtctcagatcaggagtcctgactaccctgcctctgaccactcgaactgagtgctgcttagctgtatcgtagacaccgcctgtttgtgaacagacaccctgcttcttgatgataacacaaaggccagcagggtccactgctgtgtggaatggccttcggtcatttctgcccagagcatagaggtcattttcactaataacataactctccttttgattgaaagtgttaaaatgttcctcctaaaagcacttattttttaggctcgttcttcagatttgccccatatcctaagcaaaatgccttcaatatgaagtggatattgcttgaccgtagggagcttgtccatactgtactcgagaatgtagacacaaagaaagaatgtctgtgtcaaatgttatcctccgcaacttaacgttctcttgcactttcagctcaagctcttggactcaccgaggcagtaaaagtaccatatcctgtgtttgaatcaaacccggagttcttgtatgtggaaggcttgccagaggggattcccttccgaagccctacctggtttggaattccacgacttgaaaggatcgtccgcgggagtaataaaatcaagttcgttgttaaaaaacctgaactagttatttcctacttgcctcctgggatggctagtaaaataaacactaaagctttgcagtcccccaaaagaccacgaagtcctgggagtaattcaaaggttcctgaaattgaggtcaccgtggaaggccctaataacaacaatcctcaaacctcagctgttcgaaccccgacccagactaacggttctaacgttcccttcaagccacgagggagagagttttcctttgaggcctggaatgccaaaatcacggacctaaaacagaaagttgaaaatctcttcaatgagaaatgtggggaagctcttggccttaaacaagctgtgaaggtgccgttcgcgttatttgagtctttcccggaagacttttatgtggaaggcttacctgagggtgtgccattccgaagaccatcgacttttggcattccgaggctggagaagatactcagaaacaaagccaaaattaagttcatcattaaaaagcccgaaatgtttgagacggcgattaaggagagcacctcctctaagagccctcccagaaaaataaattcatcacccaatgttaatactactgcatcaggtgttgaagaccttaacatcattcaggtgacaattccagatgatgataatgaaagactctcgaaagttgaaaaagctagacagctaagagaacaagtgaatgacctctttagtcggaaatttggtgaagctattggtatgggttttcctgtgaaagttccctacaggaaaatcacaattaaccctggctgtgtggtggttgatggcatgcccccgggggtgtccttcaaagcccccagctacctggaaatcagctccatgagaaggatcttagactctgccgagtttatcaaattcacggtcattagaccatttccaggacttgtgattaataaccagctggttgatcagagtgagtcagaaggccccgtgatacaagaatcagctgaaccaagccagttggaagttccagccacagaagaaataaaagagactgatggaagctctcagatcaagcaagaaccagaccccacgtggtagacctcttccctcctagggtaaatcagcttctgtgtcagggatgctgtgtggtgtccatctgaaccccctgcatacgcgtagctaatgtgatctccccactttcacataagatggtggccctgccttcagggaatgtgggagccaggtgggagccttcccggatatttaagctagaagattctacagggagattctccttggatcaatatatgtctctcagtcaaagatgtaaaagcacttttgccttaaaaagaatgttctgtttctaaatagagtcaacgttgtcctcctcattggaattcactatgagtcagaatcattagactgactttttttttttccatagtaatagtattttgcagagtctcacagagctgcagatcttttgttcatcttgcagagttaacaagtctgatcctgttagtccagatttcttaaatttggccaagttataataggagcagtagcttgagacccgaagtcaggaaactttgacaatggatttttttttttaatccagagacttgtactggaatttgccttaccctgtcagctcatggacttaaggtttcatcccgctttatgagtgcttctgaatccaagtcattgttacctgaatttgcaaattaagttgtgatattcgtgactgttaaattcctgtaattagattaacctctttgcttgcttgtttgttttctctcctattttagcttaaagtatcagtggttgagaagagcttttcggacctgttactaccccaagctgtgtaatatacttgtataacagaaataccttctatacaaacctttttttctacttttagatagaaatgtctactttttcagcagttctgtgaattaaagagcagagtgactgtgggtctggaatggctggtgtacttgggaatgtactatcaggattttacagcaatgctgggaaatgacagggaaaatgacaggaatgaatctcaccagattttttatgtacgcagcagagccttgagttacggtgtttattttccaatcaagtgaagatatctcctacttctcctactggaacatctcagcttctgcagtgaagaaaaattcctgtgatagttcagttctttagtttttctatttgaaaaaaaaaaatcatttaaatgatcctttgttcacggctctccttaatgactgagtgaacagttcctatctgtatatttgactaaaccttttcctaagctatctctcatggttcctatgtttttttatcataattaaaagcaaaaccatctggatcacctaacagtcagaggtcagtatctcagcgtgtgaattatagaggaaatacagagagaacctcttccacttttacttttcgtccaaataaaatgcatggtgtaccagaagttgaagatcgggttgaggattggggctagctcgatgacactaaggccccaacatcgcgggacctgctgtggcgcggattcttaggaacgctgttctagccggccccctctccaggggtcgccgtggccggcattatttcctagttcttcttgtaaccctgaggtgccagcgcggggagtgaggaggggtcagggggctaaggatgcaacctctgacgttctgcgccttcctaggagagtcttacatgtgttgagatttcacaagcaatgcgagttgtaaaataccagctctacaagaagctaggctctgtgacggcatagttttcagtagctttatcacaatattcacaatggagaattatatgacatggtagcagaaataggcccttttatgtgttgcttctattttacctcaaattgtagatatagggtaatcaataaaatccatccatgcctttcacacactaa

SEQ ID NO: 456968 - DNA, 2776 bp, Homo sapiens
cgtggggaacctggcgctaaaccattcgtagacgacacccagactaacggttctaacgttcccttcaagccacgagggagagagttttcctttgaggcctggaatgccaaaatcacggacctaaaacagaaagttgaaaatctcttcaatgagaaatgtggggaagctcttggccttaaacaagctgtgaaggtgccgttcgcgttatttgagtctttcccggaagacttttatgtggaaggcttacctgagggtgtgccattccgaagaccatcgacttttggcattccgaggctggagaagatactcagaaacaaagccaaaattaagttcatcattaaaaagcccgaaatgtttgagacggcgattaaggagagcacctcctctaagagccctcccagaaaaataaattcatcacccaatgttaatactactgcatcaggtgttgaagaccttaacatcattcaggtgacaattccagatgatgataatgaaagactctcgaaagttgaaaaagctagacagctaagagaacaagtgaatgacctctttagtcggaaatttggtgaagctattggtatgggttttcctgtgaaagttccctacaggaaaatcacaattaaccctggctgtgtggtggttgatggcatgcccccgggggtgtccttcaaagcccccagctacctggaaatcagctccatgagaaggatcttagactctgccgagtttatcaaattcacggtcattagaccatttccaggacttgtgattaataaccagctggttgatcagagtgagtcagaaggccccgtgatacaagaatcagctgaaccaagccagttggaagttccagccacagaagaaataaaagagactgatggaagctctcagatcaagcaagaaccagaccccacgtggtagacctcttccctcctagggtaaatcagcttctgtgtcagggatgctgtgtggtgtccatctgaaccccctgcatacgcgtagctaatgtgatctccccactttcacataagatggtggccctgccttcagggaatgtgggagccaggtgggagccttcccggatatttaagctagaagattctacagggagattctccttggatcaatatatgtctctcagtcaaagatgtaaaagcacttttgccttaaaaagaatgttctgtttctaaatagagtcaacgttgtcctcctcattggaattcactatgagtcagaatcattagactgactttttttttttccatagtaatagtattttgcagagtctcacagagctgcagatcttttgttcatcttgcagagttaacaagtctgatcctgttagtccagatttcttaaatttggccaagttataataggagcagtagcttgagacccgaagtcaggaaactttgacaatggatttttttttttaatccagagacttgtactggaatttgccttaccctgtcagctcatggacttaaggtttcatcccgctttatgagtgcttctgaatccaagtcattgttacctgaatttgcaaattaagttgtgatattcgtgactgttaaattcctgtaattagattaacctctttgcttgcttgtttgttttctctcctattttagcttaaagtatcagtggttgagaagagcttttcggacctgttactaccccaagctgtgtaatatacttgtataacagaaataccttctatacaaacctttttttctacttttagatagaaatgtctactttttcagcagttctgtgaattaaagagcagagtgactgtgggtctggaatggctggtgtacttgggaatgtactatcaggattttacagcaatgctgggaaatgacagggaaaatgacaggaatgaatctcaccagattttttatgtacgcagcagagccttgagttacggtgtttattttccaatcaagtgaagatatctcctacttctcctactggaacatctcagcttctgcagtgaagaaaaattcctgtgatagttcagttctttagtttttctatttgaaaaaaaaaaatcatttaaatgatcctttgttcacggctctccttaatgactgagtgaacagttcctatctgtatatttgactaaaccttttcctaagctatctctcatggttcctatgtttttttatcataattaaaagcaaaaccatctggatcacctaacagtcagaggtcagtatctcagcgtgtgaattatagaggaaatacagagagaacctcttccacttttacttttcgtccaaataaaatgcatggtgtaccagaagttgaagatcgggttgaggattggggctagctcgatgacactaaggccccaacatcgcgggacctgctgtggcgcggattcttaggaacgctgttctagccggccccctctccaggggtcgccgtggccggcattatttcctagttcttcttgtaaccctgaggtgccagcgcggggagtgaggaggggtcagggggctaaggatgcaacctctgacgttctgcgccttcctaggagagtcttacatgtgttgagatttcacaagcaatgcgagttgtaaaataccagctctacaagaagctaggctctgtgacggcatagttttcagtagctttatcacaatattcacaatggagaattatatgacatggtagcagaaataggcccttttatgtgttgcttctattttacctcaaattgtagatatagggtaatcaataaaatccatccatgcctttcacacactaa

SEQ ID NO: 456969 - DNA, 2768 bp, Homo sapiens
aggataaaacaacgccaaagcgaacgacacccagactaacggttctaacgttcccttcaagccacgagggagagagttttcctttgaggcctggaatgccaaaatcacggacctaaaacagaaagttgaaaatctcttcaatgagaaatgtggggaagctcttggccttaaacaagctgtgaaggtgccgttcgcgttatttgagtctttcccggaagacttttatgtggaaggcttacctgagggtgtgccattccgaagaccatcgacttttggcattccgaggctggagaagatactcagaaacaaagccaaaattaagttcatcattaaaaagcccgaaatgtttgagacggcgattaaggagagcacctcctctaagagccctcccagaaaaataaattcatcacccaatgttaatactactgcatcaggtgttgaagaccttaacatcattcaggtgacaattccagatgatgataatgaaagactctcgaaagttgaaaaagctagacagctaagagaacaagtgaatgacctctttagtcggaaatttggtgaagctattggtatgggttttcctgtgaaagttccctacaggaaaatcacaattaaccctggctgtgtggtggttgatggcatgcccccgggggtgtccttcaaagcccccagctacctggaaatcagctccatgagaaggatcttagactctgccgagtttatcaaattcacggtcattagaccatttccaggacttgtgattaataaccagctggttgatcagagtgagtcagaaggccccgtgatacaagaatcagctgaaccaagccagttggaagttccagccacagaagaaataaaagagactgatggaagctctcagatcaagcaagaaccagaccccacgtggtagacctcttccctcctagggtaaatcagcttctgtgtcagggatgctgtgtggtgtccatctgaaccccctgcatacgcgtagctaatgtgatctccccactttcacataagatggtggccctgccttcagggaatgtgggagccaggtgggagccttcccggatatttaagctagaagattctacagggagattctccttggatcaatatatgtctctcagtcaaagatgtaaaagcacttttgccttaaaaagaatgttctgtttctaaatagagtcaacgttgtcctcctcattggaattcactatgagtcagaatcattagactgactttttttttttccatagtaatagtattttgcagagtctcacagagctgcagatcttttgttcatcttgcagagttaacaagtctgatcctgttagtccagatttcttaaatttggccaagttataataggagcagtagcttgagacccgaagtcaggaaactttgacaatggatttttttttttaatccagagacttgtactggaatttgccttaccctgtcagctcatggacttaaggtttcatcccgctttatgagtgcttctgaatccaagtcattgttacctgaatttgcaaattaagttgtgatattcgtgactgttaaattcctgtaattagattaacctctttgcttgcttgtttgttttctctcctattttagcttaaagtatcagtggttgagaagagcttttcggacctgttactaccccaagctgtgtaatatacttgtataacagaaataccttctatacaaacctttttttctacttttagatagaaatgtctactttttcagcagttctgtgaattaaagagcagagtgactgtgggtctggaatggctggtgtacttgggaatgtactatcaggattttacagcaatgctgggaaatgacagggaaaatgacaggaatgaatctcaccagattttttatgtacgcagcagagccttgagttacggtgtttattttccaatcaagtgaagatatctcctacttctcctactggaacatctcagcttctgcagtgaagaaaaattcctgtgatagttcagttctttagtttttctatttgaaaaaaaaaaatcatttaaatgatcctttgttcacggctctccttaatgactgagtgaacagttcctatctgtatatttgactaaaccttttcctaagctatctctcatggttcctatgtttttttatcataattaaaagcaaaaccatctggatcacctaacagtcagaggtcagtatctcagcgtgtgaattatagaggaaatacagagagaacctcttccacttttacttttcgtccaaataaaatgcatggtgtaccagaagttgaagatcgggttgaggattggggctagctcgatgacactaaggccccaacatcgcgggacctgctgtggcgcggattcttaggaacgctgttctagccggccccctctccaggggtcgccgtggccggcattatttcctagttcttcttgtaaccctgaggtgccagcgcggggagtgaggaggggtcagggggctaaggatgcaacctctgacgttctgcgccttcctaggagagtcttacatgtgttgagatttcacaagcaatgcgagttgtaaaataccagctctacaagaagctaggctctgtgacggcatagttttcagtagctttatcacaatattcacaatggagaattatatgacatggtagcagaaataggcccttttatgtgttgcttctattttacctcaaattgtagatatagggtaatcaataaaatccatccatgcctttcacacactaa

SEQ ID NO: 456970 - DNA, 3244 bp, Homo sapiens
atagttcttggcaatttgaaagttatttgagaaggggaaatttataatgacaattcaaatgaagcaaactaaaaaataatgaagaaagacagaggaaaaagcagtattcacttgaacacatcccaaacaaagaaaatttcaaatgtaacaaggaaaaagcctgctaaagctcacaatacagaaataactattgatactcaaaatagctttaaagccctgctcaccttttgaatgttgggaattgaccaggaggtgactgtaactgtaagatggttcttccagtaatgaccattttctttttcaagatgatgattattctccaccgtctaagagaccaaaggccaatgagctaccgcagccaccagtcccggaacccgccaatgctgggaagcggaaagtgagggagttcaacttcgagaaatggaatgctcgcatcactgatctacgtaaacaagttgaagaattgtttgaaaggaaatatgctcaagccataaaagccaaaggtccggtgacgatcccgtaccctcttttccagtctcatgttgaagatctttatgtagaaggacttcctgaaggaattccttttagaaggccatctacttacggaattcctcgcctggagaggatattacttgcaaaggaaaggattcgttttgtgattaagaaacatgagcttctgaattcaacacgtgaagatttacagcttgataagccagcttcaggagtaaaggaagaatggtatgccagaatcactaaattaagaaagatggtggatcagcttttctgcaaaaaatttgcggaagccttggggagcactgaagccaaggctgtaccgtaccaaaaatttgaggcacacccgaatgatctgtacgtggaaggactgccagaaaacattcctttccgaagtccctcatggtatggaatcccaaggctggaaaaaatcattcaagtgggcaatcgaattaaatttgttattaaaagaccagaacttctgactcacagtaccactgaagttactcagccaagaacgaatacaccagtcaaagaagattggaatgtcagaattaccaagctacggaagcaagtggaagagatttttaatttgaaatttgctcaagctcttggactcaccgaggcagtaaaagtaccatatcctgtgtttgaatcaaacccggagttcttgtatgtggaaggcttgccagaggggattcccttccgaagccctacctggtttggaattccacgacttgaaaggatcgtccgcgggagtaataaaatcaagttcgttgttaaaaaacctgaactagttatttcctacttgcctcctgggatggctagtaaaataaacactaaagctttgcagtcccccaaaagaccacgaagtcctgggagtaattcaaaggttcctgaaattgaggtcaccgtggaaggccctaataacaacaatcctcaaacctcagctgttcgaaccccgacccagactaacggttctaacgttcccttcaagccacgagggagagagttttcctttgaggcctggaatgccaaaatcacggacctaaaacagaaagttgaaaatctcttcaatgagaaatgtggggaagctcttggccttaaacaagctgtgaaggtgccgttcgcgttatttgagtctttcccggaagacttttatgtggaaggcttacctgagggtgtgccattccgaagaccatcgacttttggcattccgaggctggagaagatactcagaaacaaagccaaaattaagttcatcattaaaaagcccgaaatgtttgagacggcgattaaggagagcacctcctctaagagccctcccagaaaaataaattcatcacccaatgttaatactactgcatcaggtgttgaagaccttaacatcattcaggtgacaattccagatgatgataatgaaagactctcgaaagttgaaaaagctagacagctaagagaacaagtgaatgacctctttagtcggaaatttggtgaagctattggtatgggttttcctgtgaaagttccctacaggaaaatcacaattaaccctggctgtgtggtggttgatggcatgcccccgggggtgtccttcaaagcccccagctacctggaaatcagctccatgagaaggatcttagactctgccgagtttatcaaattcacggtcattagaccatttccaggacttgtgattaataaccagctggttgatcagagtgagtcagaaggccccgtgatacaagaatcagctgaaccaagccagttggaagttccagccacagaagaaataaaagagactgatggaagctctcagatcaagcaagaaccagaccccacgtggtagacctcttccctcctagggcagcagagccttgagttacggtgtttattttccaatcaagtgaagatatctcctacttctcctactggaacatctcagcttctgcagtgaagaaaaattcctgtgatagttcagttctttagtttttctatttgaaaaaaaaaaatcatttaaatgatcctttgttcacggctctccttaatgactgagtgaacagttcctatctgtatatttgactaaaccttttcctaagctatctctcatggttcctatgtttttttatcataattaaaagcaaaaccatctggatcacctaacagtcagaggtcagtatctcagcgtgtgaattatagaggaaatacagagagaacctcttccacttttacttttcgtccaaataaaatgcatggtgtaccagaagttgaagatcgggttgaggattggggctagctcgatgacactaaggccccaacatcgcgggacctgctgtggcgcggattcttaggaacgctgttctagccggccccctctccaggggtcgccgtggccggcattatttcctagttcttcttgtaaccctgaggtgccagcgcggggagtgaggaggggtcagggggctaaggatgcaacctctgacgttctgcgccttcctaggagagtcttacatgtgttgagatttcacaagcaatgcgagttgtaaaataccagctctacaagaagctaggctctgtgacggcatagttttcagtagctttatcacaatattcacaatggagaattatatgacatggtagcagaaataggcccttttatgtgttgcttctattttacctcaaattgtagatatagggtaatcaataaaatccatccatgcctttcacacactaa

SEQ ID NO: 456971 - DNA, 4314 bp, Homo sapiens
atagttcttggcaatttgaaagttatttgagaaggggaaatttataatgacaattcaaatgaagcaaactaaaaaataatgaagaaagacagaggaaaaagcagtattcacttgaacacatcccaaacaaagaaaatttcaaatgtaacaaggaaaaagcctgctaaagctcacaatacagaaataactattgatactcaaaatagctttaaagccctgctcaccttttgaatgttgggaattgaccaggaggtgactgtaactgtaagatggttcttccagtaatgaccattttctttttcaagatgatgattattctccaccgtctaagagaccaaaggccaatgagctaccgcagccaccagtcccggaacccgccaatgctgggaagcggaaagtgagggagttcaacttcgagaaatggaatgctcgcatcactgatctacgtaaacaagttgaagaattgtttgaaaggaaatatgctcaagccataaaagccaaaggtccggtgacgatcccgtaccctcttttccagtctcatgttgaagatctttatgtagaaggacttcctgaaggaattccttttagaaggccatctacttacggaattcctcgcctggagaggatattacttgcaaaggaaaggattcgttttgtgattaagaaacatgagcttctgaattcaacacgtgaagatttacagcttgataagccagcttcaggagtaaaggaagaatggtatgccagaatcactaaattaagaaagatggtggatcagcttttctgcaaaaaatttgcggaagccttggggagcactgaagccaaggctgtaccgtaccaaaaatttgaggcacacccgaatgatctgtacgtggaaggactgccagaaaacattcctttccgaagtccctcatggtatggaatcccaaggctggaaaaaatcattcaagtgggcaatcgaattaaatttgttattaaaagaccagaacttctgactcacagtaccactgaagttactcagccaagaacgaatacaccagtcaaagaagattggaatgtcagaattaccaagctacggaagcaagtggaagagatttttaatttgaaatttggtaagtaaaagccagtatttatgtctttaataacatatcaacaaagggccatgtctgaatgaagtatagaagttcgggaccagccgggtgcagtggctcacgcctgtaatcgcagcactttgggaggccaaggcgggcggatcgggaggtcaggagatcgagaccatcctggctaacacgatgaaaccccgtctctactaaaaatacaggaaaattagccgggcgtggtggcgggcgcctgtaatcccagctactcgggaggctgaggcaggatagtcgcttgaacccaggaggtggaggttgcaatgagccaagatcatgccactgcactccagcctggacgacagagtgagactccatcacaagaaaaaaagaactttgtcaacctctgtcttagggcgccttgtcacaggcttcgggtcagacggattcaaccttgcatcagccatttgttagccaggtcactctgttctttgtctgtaaatgagattgatcgttgttcccactgagagtgtcagctccttcccgtagagcaggcatgatgattgtactcacctctgacaccattgtgagtgccacattccttcccacgtccttgtcactgtaagagatgcccacctgagcaccaaccccaggttatcttcccctttgtcttccagccccccagaaacagctacgactcaacctacccaatcatttcatcatcagattgccactgtctctagttcaggtctcttgggactggcactcagaaatctcataataaatcctcttgaggcttctcatacactcgtcttcttccaatcttctttccctcaaaatctcatattttggttccacttcacccaccgtcattctccatatcactcccaggagttaggcaaaaagccccttccgttcttccgtatgttaaacttagaatcactctgttccctgctctgcgtttctattttttgtttttcctccatttactagtagcttaacactttctaacagtgttcttattattgatacgtatctatctcttccataagcttataaggtcacggataatacttctcattgtagtacgtaaatgacgtgggctagatatgagttgaataaacagttatacctgtaaattcttacagagtgaaaataaattgttatactttacaatttgtttctctctttagaccatttccaggacttgtgattaataaccagctggttgatcagagtgagtcagaaggccccgtgatacaagaatcagctgaaccaagccagttggaagttccagccacagaagaaataaaagagactgatggaagctctcagatcaagcaagaaccagaccccacgtggtagacctcttccctcctagggtaaatcagcttctgtgtcagggatgctgtgtggtgtccatctgaaccccctgcatacgcgtagctaatgtgatctccccactttcacataagatggtggccctgccttcagggaatgtgggagccaggtgggagccttcccggatatttaagctagaagattctacagggagattctccttggatcaatatatgtctctcagtcaaagatgtaaaagcacttttgccttaaaaagaatgttctgtttctaaatagagtcaacgttgtcctcctcattggaattcactatgagtcagaatcattagactgactttttttttttccatagtaatagtattttgcagagtctcacagagctgcagatcttttgttcatcttgcagagttaacaagtctgatcctgttagtccagatttcttaaatttggccaagttataataggagcagtagcttgagacccgaagtcaggaaactttgacaatggatttttttttttaatccagagacttgtactggaatttgccttaccctgtcagctcatggacttaaggtttcatcccgctttatgagtgcttctgaatccaagtcattgttacctgaatttgcaaattaagttgtgatattcgtgactgttaaattcctgtaattagattaacctctttgcttgcttgtttgttttctctcctattttagcttaaagtatcagtggttgagaagagcttttcggacctgttactaccccaagctgtgtaatatacttgtataacagaaataccttctatacaaacctttttttctacttttagatagaaatgtctactttttcagcagttctgtgaattaaagagcagagtgactgtgggtctggaatggctggtgtacttgggaatgtactatcaggattttacagcaatgctgggaaatgacagggaaaatgacaggaatgaatctcaccagattttttatgtacgcagcagagccttgagttacggtgtttattttccaatcaagtgaagatatctcctacttctcctactggaacatctcagcttctgcagtgaagaaaaattcctgtgatagttcagttctttagtttttctatttgaaaaaaaaaaatcatttaaatgatcctttgttcacggctctccttaatgactgagtgaacagttcctatctgtatatttgactaaaccttttcctaagctatctctcatggttcctatgtttttttatcataattaaaagcaaaaccatctggatcacctaacagtcagaggtcagtatctcagcgtgtgaattatagaggaaatacagagagaacctcttccacttttacttttcgtccaaataaaatgcatggtgtaccagaagttgaagatcgggttgaggattggggctagctcgatgacactaaggccccaacatcgcgggacctgctgtggcgcggattcttaggaacgctgttctagccggccccctctccaggggtcgccgtggccggcattatttcctagttcttcttgtaaccctgaggtgccagcgcggggagtgaggaggggtcagggggctaaggatgcaacctctgacgttctgcgccttcctaggagagtcttacatgtgttgagatttcacaagcaatgcgagttgtaaaataccagctctacaagaagctaggctctgtgacggcatagttttcagtagctttatcacaatattcacaatggagaattatatgacatggtagcagaaataggcccttttatgtgttgcttctattttacctcaaattgtagatatagggtaatcaataaaatccatccatgcctttcacacactaa

SEQ ID NO: 456972 - DNA, 2287 bp, Homo sapiens
gttttgctctctttcttctgggtgaattggatttgcaggttatgctgttgagtgatgacgcatagctgcttttgctccatttcccccagatgacttggtaaattctccgtgaatgactctgctacataacctagataacctaacgtgtgtcctttaaatgcatgtaagccagaagatgtatgttactttgaaaacataagtaacaaaattttgaatgtattgctaaagagatgtctctctgaagctcttttgatgtttggtgtcttgtccttcttattaaaccatatcttagtaaatagtttggtacgaatggatttatcactgagcaggtctgcaaaataattaatcggtaccgttttgtttctgttgatagaaataaaagagactgatggaagctctcagatcaagcaagaaccagaccccacgtggtagacctcttccctcctagggtaaatcagcttctgtgtcagggatgctgtgtggtgtccatctgaaccccctgcatacgcgtagctaatgtgatctccccactttcacataagatggtggccctgccttcagggaatgtgggagccaggtgggagccttcccggatatttaagctagaagattctacagggagattctccttggatcaatatatgtctctcagtcaaagatgtaaaagcacttttgccttaaaaagaatgttctgtttctaaatagagtcaacgttgtcctcctcattggaattcactatgagtcagaatcattagactgactttttttttttccatagtaatagtattttgcagagtctcacagagctgcagatcttttgttcatcttgcagagttaacaagtctgatcctgttagtccagatttcttaaatttggccaagttataataggagcagtagcttgagacccgaagtcaggaaactttgacaatggatttttttttttaatccagagacttgtactggaatttgccttaccctgtcagctcatggacttaaggtttcatcccgctttatgagtgcttctgaatccaagtcattgttacctgaatttgcaaattaagttgtgatattcgtgactgttaaattcctgtaattagattaacctctttgcttgcttgtttgttttctctcctattttagcttaaagtatcagtggttgagaagagcttttcggacctgttactaccccaagctgtgtaatatacttgtataacagaaataccttctatacaaacctttttttctacttttagatagaaatgtctactttttcagcagttctgtgaattaaagagcagagtgactgtgggtctggaatggctggtgtacttgggaatgtactatcaggattttacagcaatgctgggaaatgacagggaaaatgacaggaatgaatctcaccagattttttatgtacgcagcagagccttgagttacggtgtttattttccaatcaagtgaagatatctcctacttctcctactggaacatctcagcttctgcagtgaagaaaaattcctgtgatagttcagttctttagtttttctatttgaaaaaaaaaaatcatttaaatgatcctttgttcacggctctccttaatgactgagtgaacagttcctatctgtatatttgactaaaccttttcctaagctatctctcatggttcctatgtttttttatcataattaaaagcaaaaccatctggatcacctaacagtcagaggtcagtatctcagcgtgtgaattatagaggaaatacagagagaacctcttccacttttacttttcgtccaaataaaatgcatggtgtaccagaagttgaagatcgggttgaggattggggctagctcgatgacactaaggccccaacatcgcgggacctgctgtggcgcggattcttaggaacgctgttctagccggccccctctccaggggtcgccgtggccggcattatttcctagttcttcttgtaaccctgaggtgccagcgcggggagtgaggaggggtcagggggctaaggatgcaacctctgacgttctgcgccttcctaggagagtcttacatgtgttgagatttcacaagcaatgcgagttgtaaaataccagctctacaagaagctaggctctgtgacggcatagttttcagtagctttatcacaatattcacaatggagaattatatgacatggtagcagaaataggcccttttatgtgttgcttctattttacctcaaattgtagatatagggtaatcaataaaatccatccatgcctttcacacactaa

SEQ ID NO: 456973 - DNA, 2062 bp, Homo sapiens
gtagcgagcagtatacacagcttcacggtcattagaccatttccaggacttgtgattaataaccagctggttgatcagagtgagtcagaaggccccgtgatacaagaatcagctgaaccaagccagttggaagttccagccacagaagaaataaaagagactgatggaagctctcagatcaagcaagaaccagaccccacgtggtagacctcttccctcctagggtaaatcagcttctgtgtcagggatgctgtgtggtgtccatctgaaccccctgcatacgcgtagctaatgtgatctccccactttcacataagatggtggccctgccttcagggaatgtgggagccaggtgggagccttcccggatatttaagctagaagattctacagggagattctccttggatcaatatatgtctctcagtcaaagatgtaaaagcacttttgccttaaaaagaatgttctgtttctaaatagagtcaacgttgtcctcctcattggaattcactatgagtcagaatcattagactgactttttttttttccatagtaatagtattttgcagagtctcacagagctgcagatcttttgttcatcttgcagagttaacaagtctgatcctgttagtccagatttcttaaatttggccaagttataataggagcagtagcttgagacccgaagtcaggaaactttgacaatggatttttttttttaatccagagacttgtactggaatttgccttaccctgtcagctcatggacttaaggtttcatcccgctttatgagtgcttctgaatccaagtcattgttacctgaatttgcaaattaagttgtgatattcgtgactgttaaattcctgtaattagattaacctctttgcttgcttgtttgttttctctcctattttagcttaaagtatcagtggttgagaagagcttttcggacctgttactaccccaagctgtgtaatatacttgtataacagaaataccttctatacaaacctttttttctacttttagatagaaatgtctactttttcagcagttctgtgaattaaagagcagagtgactgtgggtctggaatggctggtgtacttgggaatgtactatcaggattttacagcaatgctgggaaatgacagggaaaatgacaggaatgaatctcaccagattttttatgtacgcagcagagccttgagttacggtgtttattttccaatcaagtgaagatatctcctacttctcctactggaacatctcagcttctgcagtgaagaaaaattcctgtgatagttcagttctttagtttttctatttgaaaaaaaaaaatcatttaaatgatcctttgttcacggctctccttaatgactgagtgaacagttcctatctgtatatttgactaaaccttttcctaagctatctctcatggttcctatgtttttttatcataattaaaagcaaaaccatctggatcacctaacagtcagaggtcagtatctcagcgtgtgaattatagaggaaatacagagagaacctcttccacttttacttttcgtccaaataaaatgcatggtgtaccagaagttgaagatcgggttgaggattggggctagctcgatgacactaaggccccaacatcgcgggacctgctgtggcgcggattcttaggaacgctgttctagccggccccctctccaggggtcgccgtggccggcattatttcctagttcttcttgtaaccctgaggtgccagcgcggggagtgaggaggggtcagggggctaaggatgcaacctctgacgttctgcgccttcctaggagagtcttacatgtgttgagatttcacaagcaatgcgagttgtaaaataccagctctacaagaagctaggctctgtgacggcatagttttcagtagctttatcacaatattcacaatggagaattatatgacatggtagcagaaataggcccttttatgtgttgcttctattttacctcaaattgtagatatagggtaatcaataaaatccatccatgcctttcacacactaa

SEQ ID NO: 456974 - DNA, 4582 bp, Homo sapiens
atagttcttggcaatttgaaagttatttgagaaggggaaatttataatgacaattcaaatgaagcaaactaaaaaataatgaagaaagacagaggaaaaagcagtattcacttgaacacatcccaaacaaagaaaatttcaaatgtaacaaggaaaaagcctgctaaagctcacaatacagaaataactattgatactcaaaatagctttaaagccctgctcaccttttgaatgttgggaattgaccaggaggtgactgtaactgtaagatggttcttccagtaatgaccattttctttttcaagatgatgattattctccaccgtctaagagaccaaaggccaatgagctaccgcagccaccagtcccggaacccgccaatgctgggaagcggaaagtgagggagttcaacttcgagaaatggaatgctcgcatcactgatctacgtaaacaagttgaagaattgtttgaaaggaaatatgctcaagccataaaagccaaaggtccggtgacgatcccgtaccctcttttccagtctcatgttgaagatctttatgtagaaggacttcctgaaggaattccttttagaaggccatctacttacggaattcctcgcctggagaggatattacttgcaaaggaaaggattcgttttgtgattaagaaacatgagcttctgaattcaacacgtgaagatttacagcttgataagccagcttcaggagtaaaggaagaatggtatgccagaatcactaaattaagaaagatggtggatcagcttttctgcaaaaaatttgcggaagccttggggagcactgaagccaaggctgtaccgtaccaaaaatttgaggcacacccgaatgatctgtacgtggaaggactgccagaaaacattcctttccgaagtccctcatggtatggaatcccaaggctggaaaaaatcattcaagtgggcaatcgaattaaatttgttattaaaagaccagaacttctgactcacagtaccactgaagttactcagccaagaacgaatacaccagtcaaagaagattggaatgtcagaattaccaagctacggaagcaagtggaagagatttttaatttgaaatttgctcaagctcttggactcaccgaggcagtaaaagtaccatatcctgtgtttgaatcaaacccggagttcttgtatgtggaaggcttgccagaggggattcccttccgaagccctacctggtttggaattccacgacttgaaaggatcgtccgcgggagtaataaaatcaagttcgttgttaaaaaacctgaactagttatttcctacttgcctcctgggatggctagtaaaataaacactaaagctttgcagtcccccaaaagaccacgaagtcctgggagtaattcaaaggttcctgaaattgaggtcaccgtggaaggccctaataacaacaatcctcaaacctcagctgttcgaaccccgacccagactaacggttctaacgttcccttcaagccacgagggagagagttttcctttgaggcctggaatgccaaaatcacggacctaaaacagaaagttgaaaatctcttcaatgagaaatgtggggaagctcttggccttaaacaagctgtgaaggtgccgttcgcgttatttgagtctttcccggaagacttttatgtggaaggcttacctgagggtgtgccattccgaagaccatcgacttttggcattccgaggctggagaagatactcagaaacaaagccaaaattaagttcatcattaaaaagcccgaaatgtttgagacggcgattaaggagagcacctcctctaagagccctcccagaaaaataaattcatcacccaatgttaatactactgcatcaggtgttgaagaccttaacatcattcaggtgacaattccagatgatgataatgaaagactctcgaaagttgaaaaagctagacagctaagagaacaagtgaatgacctctttagtcggaaatttggtgaagctattggtatgggttttcctgtgaaagttccctacaggaaaatcacaattaaccctggctgtgtggtggttgatggcatgcccccgggggtgtccttcaaagcccccagctacctggaaatcagctccatgagaaggatcttagactctgccgagtttatcaaattcacggtcattagaccatttccaggacttgtgattaataaccagctggttgatcagagtgagtcagaaggccccgtgatacaagaatcagctgaaccaagccagttggaagttccagccacagaagaaataaaagagactgatggaagctctcagatcaagcaagaaccagaccccacgtggtagacctcttccctcctagggtaaatcagcttctgtgtcagggatgctgtgtggtgtccatctgaaccccctgcatacgcgtagctaatgtgatctccccactttcacataagatggtggccctgccttcagggaatgtgggagccaggtgggagccttcccggatatttaagctagaagattctacagggagattctccttggatcaatatatgtctctcagtcaaagatgtaaaagcacttttgccttaaaaagaatgttctgtttctaaatagagtcaacgttgtcctcctcattggaattcactatgagtcagaatcattagactgactttttttttttccatagtaatagtattttgcagagtctcacagagctgcagatcttttgttcatcttgcagagttaacaagtctgatcctgttagtccagatttcttaaatttggccaagttataataggagcagtagcttgagacccgaagtcaggaaactttgacaatggatttttttttttaatccagagacttgtactggaatttgccttaccctgtcagctcatggacttaaggtttcatcccgctttatgagtgcttctgaatccaagtcattgttacctgaatttgcaaattaagttgtgatattcgtgactgttaaattcctgtaattagattaacctctttgcttgcttgtttgttttctctcctattttagcttaaagtatcagtggttgagaagagcttttcggacctgttactaccccaagctgtgtaatatacttgtataacagaaataccttctatacaaacctttttttctacttttagatagaaatgtctactttttcagcagttctgtgaattaaagagcagagtgactgtgggtctggaatggctggtgtacttgggaatgtactatcaggattttacagcaatgctgggaaatgacagggaaaatgacaggaatgaatctcaccagattttttatgtacgcagcagagccttgagttacggtgtttattttccaatcaagtgaagatatctcctacttctcctactggaacatctcagcttctgcagtgaagaaaaattcctgtgatagttcagttctttagtttttctatttgaaaaaaaaaaatcatttaaatgatcctttgttcacggctctccttaatgactgagtgaacagttcctatctgtatatttgactaaaccttttcctaagctatctctcatggttcctatgtttttttatcataattaaaagcaaaaccatctggatcacctaacagtcagaggtcagtatctcagcgtgtgaattatagaggaaatacagagagaacctcttccacttttacttttcgtccaaataaaatgcatggtgtaccagaagttgaagatcgggttgaggattggggctagctcgatgacactaaggccccaacatcgcgggacctgctgtggcgcggattcttaggaacgctgttctagccggccccctctccaggggtcgccgtggccggcattatttcctagttcttcttgtaaccctgaggtgccagcgcggggagtgaggaggggtcagggggctaaggatgcaacctctgacgttctgcgccttcctaggagagtcttacatgtgttgagatttcacaagcaatgcgagttgtaaaataccagctctacaagaagctaggctctgtgacggcatagttttcagtagctttatcacaatattcacaatggagaattatatgacatggtagcagaaataggcccttttatgtgttgcttctattttacctcaaattgtagatatagggtaatcaataaaatccatccatgcctttcacacactaaaaaaaaaaaaaaaaaaaaaaaaaaaaaaaaaaaaaaaaaaaaaaaaaaaaaaaaaaaaaaaaaaaaaaaaaaaaaaaaaaaaaaaaaaaaaaaaaagacggggggggcgcgcgctcgaaataataaccgccagcgcggggaggagcacacccatccgaacggccagccccccccttttatttgtaagaaggggggggcgcaccatgaagagggaagtcaaatataattagaaacgagagcgggggcggttcgtataacacacacaagtcggacagaggagacaaatccgccgacgggggcattacgaggagcgagaacacacacacgagggggggggggaaaaaaaaagggaaacacacacaccaaaa

SEQ ID NO: 456975 - DNA, 1353 bp, Homo sapiens
ggaacaacacatccttacattatttaaaccaatctgcttcattttcagagctggttgatcagagtgagtcagaaggccccgtgatacaagaatcagctgaaccaagccagttggaagttccagccacagaagaaataaaagagactgatggaagctctcagatcaagcaagaaccagaccccacgtggtagacctcttccctcctaggcttaaagtatcagtggttgagaagagcttttcggacctgttactaccccaagctgtgtaatatacttgtataacagaaataccttctatacaaacctttttttctacttttagatagaaatgtctactttttcagcagttctgtgaattaaagagcagagtgactgtgggtctggaatggctggtgtacttgggaatgtactatcaggattttacagcaatgctgggaaatgacagggaaaatgacaggaatgaatctcaccagattttttatgtacgcagcagagccttgagttacggtgtttattttccaatcaagtgaagatatctcctacttctcctactggaacatctcagcttctgcagtgaagaaaaattcctgtgatagttcagttctttagtttttctatttgaaaaaaaaaaatcatttaaatgatcctttgttcacggctctccttaatgactgagtgaacagttcctatctgtatatttgactaaaccttttcctaagctatctctcatggttcctatgtttttttatcataattaaaagcaaaaccatctggatcacctaacagtcagaggtcagtatctcagcgtgtgaattatagaggaaatacagagagaacctcttccacttttacttttcgtccaaataaaatgcatggtgtaccagaagttgaagatcgggttgaggattggggctagctcgatgacactaaggccccaacatcgcgggacctgctgtggcgcggattcttaggaacgctgttctagccggccccctctccaggggtcgccgtggccggcattatttcctagttcttcttgtaaccctgaggtgccagcgcggggagtgaggaggggtcagggggctaaggatgcaacctctgacgttctgcgccttcctaggagagtcttacatgtgttgagatttcacaagcaatgcgagttgtaaaataccagctctacaagaagctaggctctgtgacggcatagttttcagtagctttatcacaatattcacaatggagaattatatgacatggtagcagaaataggcccttttatgtgttgcttctattttacctcaaattgtagatatagggtaatcaataaaatccatccatgcctttcacacactaa

SEQ ID NO: 456976 - DNA, 1315 bp, Homo sapiens
gaaaacagccaggaggatgatcacagagtgactgacggccgtttgacacaagaatcagccgatccacgccagtaggaagtcccgggcacatatgaaataaaagagactgatggaagctctcagatcaagcaagaaccagaccccacgtggtagacctcttccctcctaggcttaaagtatcagtggttgagaagagcttttcggacctgttactaccccaagctgtgtaatatacttgtataacagaaataccttctatacaaacctttttttctacttttagatagaaatgtctactttttcagcagttctgtgaattaaagagcagagtgactgtgggtctggaatggctggtgtacttgggaatgtactatcaggattttacagcaatgctgggaaatgacagggaaaatgacaggaatgaatctcaccagattttttatgtacgcagcagagccttgagttacggtgtttattttccaatcaagtgaagatatctcctacttctcctactggaacatctcagcttctgcagtgaagaaaaattcctgtgatagttcagttctttagtttttctatttgaaaaaaaaaaatcatttaaatgatcctttgttcacggctctccttaatgactgagtgaacagttcctatctgtatatttgactaaaccttttcctaagctatctctcatggttcctatgtttttttatcataattaaaagcaaaaccatctggatcacctaacagtcagaggtcagtatctcagcgtgtgaattatagaggaaatacagagagaacctcttccacttttacttttcgtccaaataaaatgcatggtgtaccagaagttgaagatcgggttgaggattggggctagctcgatgacactaaggccccaacatcgcgggacctgctgtggcgcggattcttaggaacgctgttctagccggccccctctccaggggtcgccgtggccggcattatttcctagttcttcttgtaaccctgaggtgccagcgcggggagtgaggaggggtcagggggctaaggatgcaacctctgacgttctgcgccttcctaggagagtcttacatgtgttgagatttcacaagcaatgcgagttgtaaaataccagctctacaagaagctaggctctgtgacggcatagttttcagtagctttatcacaatattcacaatggagaattatatgacatggtagcagaaataggcccttttatgtgttgcttctattttacctcaaattgtagatatagggtaatcaataaaatccatccatgcctttcacacactaa

SEQ ID NO: 456977 - DNA, 1554 bp, Homo sapiens
gcctcttctaccacatagggctcagggctgataaagccccctccctacctttctcaggccagacacaaggtcagccatgagaaaacagaaaaacaagcagaggagagtctgtagagataagttgggagggttcaggaggagaatttgggatttgcttgttccgctgcagcggatcaagcaagaaccagaccccacgtggtagacctcttccctcctaggagacttgtactggaatttgccttaccctgtcagctcatggacttaaggtttcatcccgctttatgagtgcttctgaatccaagtcattgttacctgaatttgcaaattaagttgtgatattcgtgactgttaaattcctgtaattagattaacctctttgcttgcttgtttgttttctctcctattttagcttaaagtatcagtggttgagaagagcttttcggacctgttactaccccaagctgtgtaatatacttgtataacagaaataccttctatacaaacctttttttctacttttagatagaaatgtctactttttcagcagttctgtgaattaaagagcagagtgactgtgggtctggaatggctggtgtacttgggaatgtactatcaggattttacagcaatgctgggaaatgacagggaaaatgacaggaatgaatctcaccagattttttatgtacgcagcagagccttgagttacggtgtttattttccaatcaagtgaagatatctcctacttctcctactggaacatctcagcttctgcagtgaagaaaaattcctgtgatagttcagttctttagtttttctatttgaaaaaaaaaaatcatttaaatgatcctttgttcacggctctccttaatgactgagtgaacagttcctatctgtatatttgactaaaccttttcctaagctatctctcatggttcctatgtttttttatcataattaaaagcaaaaccatctggatcacctaacagtcagaggtcagtatctcagcgtgtgaattatagaggaaatacagagagaacctcttccacttttacttttcgtccaaataaaatgcatggtgtaccagaagttgaagatcgggttgaggattggggctagctcgatgacactaaggccccaacatcgcgggacctgctgtggcgcggattcttaggaacgctgttctagccggccccctctccaggggtcgccgtggccggcattatttcctagttcttcttgtaaccctgaggtgccagcgcggggagtgaggaggggtcagggggctaaggatgcaacctctgacgttctgcgccttcctaggagagtcttacatgtgttgagatttcacaagcaatgcgagttgtaaaataccagctctacaagaagctaggctctgtgacggcatagttttcagtagctttatcacaatattcacaatggagaattatatgacatggtagcagaaataggcccttttatgtgttgcttctattttacctcaaattgtagatatagggtaatcaataaaatccatccatgcctttcacacactaa

SEQ ID NO: 456978 - DNA, 3445 bp, Homo sapiens
atagttcttggcaatttgaaagttatttgagaaggggaaatttataatgacaattcaaatgaagcaaactaaaaaataatgaagaaagacagaggaaaaagcagtattcacttgaacacatcccaaacaaagaaaatttcaaatgtaacaaggaaaaagcctgctaaagctcacaatacagaaataactattgatactcaaaatagctttaaagccctgctcaccttttgaatgttgggaattgaccaggaggtgactgtaactgtaagatggttcttccagtaatgaccattttctttttcaagatgatgattattctccaccgtctaagagaccaaaggccaatgagctaccgcagccaccagtcccggaacccgccaatgctgggaagcggaaagtgagggagttcaacttcgagaaatggaatgctcgcatcactgatctacgtaaacaagttgaagaattgtttgaaaggaaatatgctcaagccataaaagccaaaggtccggtgacgatcccgtaccctcttttccagtctcatgttgaagatctttatgtagaaggacttcctgaaggaattccttttagaaggccatctacttacggaattcctcgcctggagaggatattacttgcaaaggaaaggattcgttttgtgattaagaaacatgagcttctgaattcaacacgtgaagatttacagcttgataagccagcttcaggagtaaaggaagaatggtatgccagaatcactaaattaagaaagatggtggatcagcttttctgcaaaaaatttgcggaagccttggggagcactgaagccaaggctgtaccgtaccaaaaatttgaggcacacccgaatgatctgtacgtggaaggactgccagaaaacattcctttccgaagtccctcatggtatggaatcccaaggctggaaaaaatcattcaagtgggcaatcgaattaaatttgttattaaaagaccagaacttctgactcacagtaccactgaagttactcagccaagaacgaatacaccagtcaaagaagattggaatgtcagaattaccaagctacggaagcaagtggaagagatttttaatttgaaatttgctcaagctcttggactcaccgaggcagtaaaagtaccatatcctgtgtttgaatcaaacccggagttcttgtatgtggaaggcttgccagaggggattcccttccgaagccctacctggtttggaattccacgacttgaaaggatcgtccgcgggagtaataaaatcaagttcgttgttaaaaaacctgaactagttatttcctacttgcctcctgggatggctagtaaaataaacactaaagctttgcagtcccccaaaagaccacgaagtcctgggagtaattcaaaggttcctgaaattgaggtcaccgtggaaggccctaataacaacaatcctcaaacctcagctgttcgaaccccgacccagactaacggttctaacgttcccttcaagccacgagggagagagttttcctttgaggcctggaatgccaaaatcacggacctaaaacagaaagttgaaaatctcttcaatgagaaatgtggggaagctcttggccttaaacaagctgtgaaggtgccgttcgcgttatttgagtctttcccggaagacttttatgtggaaggcttacctgagggtgtgccattccgaagaccatcgacttttggcattccgaggctggagaagatactcagaaacaaagccaaaattaagttcatcattaaaaagcccgaaatgtttgagacggcgattaaggagagcacctcctctaagagccctcccagaaaaataaattcatcacccaatgttaatactactgcatcaggtgttgaagaccttaacatcattcaggtgacaattccagatgatgataatgaaagactctcgaaagttgaaaaagctagacagctaagagaacaagtgaatgacctctttagtcggaaatttggtgaagctattggtatgggttttcctgtgaaagttccctacaggaaaatcacaattaaccctggctgtgtggtggttgatggcatgcccccgggggtgtccttcaaagcccccagctacctggaaatcagctccatgagaaggatcttagactctgccgagtttatcaaattcacggtcattagaccatttccaggacttgtgattaataaccagctggttgatcagagtgagtcagaaggccccgtgatacaagaatcagctgaaccaagccagttggaagttccagccacagaagaaataaaagagactgatggaagctctcagatcaagcaagaaccagaccccacgtggtagacctcttccctcctagggtaaatcagcttctgtgtcagggatgctgtgtggtgtccatctgaaccccctgcatacgcgtagctaatgtgatctccccactttcacataagatggtggccctgccttcagggaatgtgggagccaggtgggagccttcccggatatttaagctagaagattctacagggagattctccttggatcaatatatgtctctcagtcaaagatgtaaaagcacttttgccttaaaaagaatgttctgtttctaaatagagtcaacgttgtcctcctcattggaattcactatgagtcagaatcattagactgactttttttttttccatagtaatagtattttgcagagtctcacagagctgcagatcttttgttcatcttgcagagttaacaagtctgatcctgttagtccagatttcttaaatttggccaagttataataggagcagtagcttgagacccgaagtcaggaaactttgacaatggatttttttttttaatccagagacttgtactggaatttgccttaccctgtcagctcatggacttaaggtttcatcccgctttatgagtgcttctgaatccaagtcattgttacctgaatttgcaaattaagttgtgatattcgtgactgttaaattcctgtaattagattaacctctttgcttgcttgtttgttttctctcctattttagcttaaagtatcagtggttgagaagagcttttcggacctgttactaccccaagctgtgtaatatacttgtataacagaaataccttctatacaaacctttttttctacttttagatagaaatgtctactttttcagcagttctgtgaattaaagagcagagtgactgtgggtctggaatggctggtgtacttgggaatgtactatcaggattttacagcaatgctgggaaatgacagggaaaatgacaggaatgaatctcaccagattttttatgtactattgtcctttagcagaaccccttgaggttacggggggttgtttttttccccaatccaaggggaaagaaaatttttgccctaactttgttcctccaacg

SEQ ID NO: 456979 - DNA, 4832 bp, Homo sapiens
atagttcttggcaatttgaaagttatttgagaaggggaaatttataatgacaattcaaatgaagcaaactaaaaaataatgaagaaagacagaggaaaaagcagtattcacttgaacacatcccaaacaaagaaaatttcaaatgtaacaaggaaaaagcctgctaaagctcacaatacagaaataactattgatactcaaaatagctttaaagccctgctcaccttttgaatgttgggaattgaccaggaggtgactgtaactgtaagatggttcttccagtaatgaccattttctttttcaagatgatgattattctccaccgtctaagagaccaaaggccaatgagctaccgcagccaccagtcccggaacccgccaatgctgggaagcggaaagtgagggagttcaacttcgagaaatggaatgctcgcatcactgatctacgtaaacaagttgaagaattgtttgaaaggaaatatgctcaagccataaaagccaaaggtccggtgacgatcccgtaccctcttttccagtctcatgttgaagatctttatgtagaaggacttcctgaaggaattccttttagaaggccatctacttacggaattcctcgcctggagaggatattacttgcaaaggaaaggattcgttttgtgattaagaaacatgagcttctgaattcaacacgtgaagatttacagcttgataagccagcttcaggagtaaaggaagaatggtatgccagaatcactaaattaagaaagatggtggatcagcttttctgcaaaaaatttgcggaagccttggggagcactgaagccaaggctgtaccgtaccaaaaatttgaggcacacccgaatgatctgtacgtggaaggactgccagaaaacattcctttccgaagtccctcatggtatggaatcccaaggctggaaaaaatcattcaagtgggcaatcgaattaaatttgttattaaaagaccagaacttctgactcacagtaccactgaagttactcagccaagaacgaatacaccagtcaaagaagattggaatgtcagaattaccaagctacggaagcaagtggaagagatttttaatttgaaatttgctcaagctcttggactcaccgaggcagtaaaagtaccatatcctgtgtttgaatcaaacccggagttcttgtatgtggaaggcttgccagaggggattcccttccgaagccctacctggtttggaattccacgacttgaaaggatcgtccgcgggagtaataaaatcaagttcgttgttaaaaaacctgaactagttatttcctacttgcctcctgggatggctagtaaaataaacactaaagctttgcagtcccccaaaagaccacgaagtcctgggagtaattcaaaggttcctgaaattgaggtcaccgtggaaggccctaataacaacaatcctcaaacctcagctgttcgaaccccgacccagactaacggttctaacgttcccttcaagccacgagggagagagttttcctttgaggcctggaatgccaaaatcacggacctaaaacagaaagttgaaaatctcttcaatgagaaatgtggggaagctcttggccttaaacaagctgtgaaggtgccgttcgcgttatttgagtctttcccggaagacttttatgtggaaggcttacctgagggtgtgccattccgaagaccatcgacttttggcattccgaggctggagaagatactcagaaacaaagccaaaattaagttcatcattaaaaagcccgaaatgtttgagacggcgattaaggagagcacctcctctaagagccctcccagaaaaataaattcatcacccaatgttaatactactgcatcaggtgttgaagaccttaacatcattcaggtgacaattccagatgatgataatgaaagactctcgaaagttgaaaaagctagacagctaagagaacaagtgaatgacctctttagtcggaaatttggtgaagctattggtatgggttttcctgtgaaagttccctacaggaaaatcacaattaaccctggctgtgtggtggttgatggcatgcccccgggggtgtccttcaaagcccccagctacctggaaatcagctccatgagaaggatcttagactctgccgagtttatcaaattcacggtcattaggtaagtgagagtttcctgcttagtcacaggagcgaatctggagctcatgaggctgactcttctaaaatgcagccacaggtagtcatcgaatccggcttcctatgctgtgcaatcaacaaatcaaaataacttgtgtcatcattagaatgtcagatgtgcttctacgaactaagctgactcttttaattctttggcaaagggttggcaaactaggactgtttgccaaattcaggctgcctcctatttttagagtcttcctgaaacacagctacacccgtattatccatggctgctttcctgtcacagtgagtaagtagctgggactgagaaggcatggcctccaaagtctaaaatatttactctctagcactttgtagaaaaaccttagctaggcacaatgtctaacgcctgtaatcccagcattttgggaggccaaggcaggcagatcacctgaggtcaggagttccagaccagcctggccaacatggtgaaatcccatctctacaaaaataaaacagttagctgggcatgatggcgggtgcctgtaatcccagctactcgggaggctgaggcaggatagtcgcttgaacccaggaggtggaggttgcaatgagccaagatcatgccactgcactccagcctggacgacagagtgagactccatcacaagaaaaaaagaactttgtcaacctctgtcttagggcgccttgtcacaggcttcgggtcagacggattcaaccttgcatcagccatttgttagccaggtcactctgttctttgtctgtaaatgagattgatcgttgttcccactgagagtgtcagctccttcccgtagagcaggcatgatgattgtactcacctctgacaccattgtgagtgccacattccttcccacgtccttgtcactgtaagagatgcccacctgagcaccaaccccaggttatcttcccctttgtcttccagccccccagaaacagctacgactcaacctacccaatcatttcatcatcagattgccactgtctctagttcaggtctcttgggactggcactcagaaatctcataataaatcctcttgaggcttctcatacactcgtcttcttccaatcttctttccctcaaaatctcatattttggttccacttcacccaccgtcattctccatatcactcccaggagttaggcaaaaagccccttccgttcttccgtatgttaaacttagaatcactctgttccctgctctgcgtttctattttttgtttttcctccatttactagtagcttaacactttctaacagtgttcttattattgatacgtatctatctcttccataagcttataaggtcacggataatacttctcattgtagtacgtaaatgacgtgggctagatatgagttgaataaacagttatacctgtaaattcttacagagtgaaaataaattgttatactttacaatttgtttctctctttagaccatttccaggacttgtgattaataaccgtgagtattttgtgaagtgttttgtttttgttttttcctggggtctgacgtgtgtgcgtgtgagtgtgtatacatgcttaacgtatatcacgttacttcacctatgtcagtaaccaggccaaatacttgttttagccctcagtaaaaacaccaggcacttcctagttgtaaaattattcaagcttcttaacttcctatcctcgatgcacttaatcataaaatggtaataatagcaccgattttgggggagtcgttccagtagatggaaagcatctggaacaggtgtcagcaagctcctgccgacgtgtatgcataaagttttattgaaaccaccatcgtgtccatttgtttatggcagaactgagagatggcagcagcaagtgtgtgcctgcaaaacctaaaatatttactaattggctctgcaagaaaagagtttgcatccccctaacctagaacagtgtctagcctctagtatgtgtttagcctacagtatgtgctcagcgaatacaatctatatttattactgcttttatgactgttataattactgtgcttggatttcgttacaaagtaagtcacaatgtgcctgcttctgttagtatttcagcacagtgcctggcacacatggggctctcaaatattgctgagcgagtgaacaaatgtcctttcaattccttaacgttgatgtcattttcaatagtattttgagccaaacttaattttgcgagtgtgttttgttttcttaactttattattaaaaatgtataaaagtgaggccaggcgtggtggctcacgcctgtaatcccagcagtttgggaggctgaggcaggcggatcagttgaggttgggagttggagaccagcccgtccaacatggtgaaagcctgtctctactaaaaatacaaaaatcagctgggtgtggtggcgcgtgcctgtaatcccagctactcaggaggctgaggcaggagagttgcttgaatcctagaggtggaggttgcagtgagctgagatcgtgccattgcactccagcctgggcaacaagagcaaaactctgtcccaataaataaataaataaaatgttctcttttgttcctgttcttgtgcggtagtgtggtatagagttttatggtaattactg

SEQ ID NO: 456980 - DNA, 4184 bp, Homo sapiens
atagttcttggcaatttgaaagttatttgagaaggggaaatttataatgacaattcaaatgaagcaaactaaaaaataatgaagaaagacagaggaaaaagcagtattcacttgaacacatcccaaacaaagaaaatttcaaatgtaacaaggaaaaagcctgctaaagctcacaatacagaaataactattgatactcaaaatagctttaaagccctgctcaccttttgaatgttgggaattgaccaggaggtgactgtaactgtaagatggttcttccagtaatgaccattttctttttcaagatgatgattattctccaccgtctaagagaccaaaggccaatgagctaccgcagccaccagtcccggaacccgccaatgctgggaagcggaaagtgagggagttcaacttcgagaaatggaatgctcgcatcactgatctacgtaaacaagttgaagaattgtttgaaaggaaatatgctcaagccataaaagccaaaggtccggtgacgatcccgtaccctcttttccagtctcatgttgaagatctttatgtagaaggacttcctgaaggaattccttttagaaggccatctacttacggaattcctcgcctggagaggatattacttgcaaaggaaaggattcgttttgtgattaagaaacatgagcttctgaattcaacacgtgaagatttacagcttgataagccagcttcaggagtaaaggaagaatggtatgccagaatcactaaattaagaaagatggtggatcagcttttctgcaaaaaatttgcggaagccttggggagcactgaagccaaggctgtaccgtaccaaaaatttgaggcacacccgaatgatctgtacgtggaaggactgccagaaaacattcctttccgaagtccctcatggtatggaatcccaaggctggaaaaaatcattcaagtgggcaatcgaattaaatttgttattaaaagaccagaacttctgactcacagtaccactgaagttactcagccaagaacgaatacaccagtcaaagaagattggaatgtcagaattaccaagctacggaagcaagtggaagagatttttaatttgaaatttgctcaagctcttggactcaccgaggcagtaaaagtaccatatcctgtgtttgaatcaaacccggagttcttgtatgtggaaggcttgccagaggggattcccttccgaagccctacctggtttggaattccacgacttgaaaggatcgtccgcgggagtaataaaatcaagttcgttgttaaaaaacctgaactagttatttcctacttgcctcctgggatggctagtaaaataaacactaaagctttgcagtcccccaaaagaccacgaagtcctgggagtaattcaaaggttcctgaaattgaggtcaccgtggaaggccctaataacaacaatcctcaaacctcagctgttcgaaccccgacccagactaacggttctaacgttcccttcaagccacgagggagagagttttcctttgaggcctggaatgccaaaatcacggacctaaaacagaaagttgaaaatctcttcaatgagaaatgtggggaagctcttggccttaaacaagctgtgaaggtgccgttcgcgttatttgagtctttcccggaagacttttatgtggaaggcttacctgagggtgtgccattccgaagaccatcgacttttggcattccgaggctggagaagatactcagaaacaaagccaaaattaagttcatcattaaaaagcccgaaatgtttgagacggcgattaaggagagcacctcctctaagagccctcccagaaaaataaattcatcacccaatgttaatactactgcatcaggtgttgaagaccttaacatcattcaggtgacaattccagatgatgataatgaaagactctcgaaagttgaaaaagctagacagctaagagaacaagtgaatgacctctttagtcggaaatttggtgaagctattggtatgggttttcctgtgaaagttccctacaggaaaatcacaattaaccctggctgtgtggtggttgatggcatgcccccgggggtgtccttcaaagcccccagctacctggaaatcagctccatgagaaggatcttagactctgccgagtttatcaaattcacggtcattaggtaagtgagagtttcctgcttagtcacaggagcgaatctggagctcatgaggctgactcttctaaaatgcagccacaggtagtcatcgaatccggcttcctatgctgtgcaatcaacaaatcaaaataacttgtgtcatcattagaatgtcagatgtgcttctacgaactaagctgactcttttaattctttggcaaagggttggcaaactaggactgtttgccaaattcaggctgcctcctatttttagagtcttcctgaaacacagctacacccgtattatccatggctgctttcctgtcacagtgagtaagtagctgggactgagaaggcatggcctccaaagtctaaaatatttactctctagcactttgtagaaaaaccttagctaggcacaatgtctaacgcctgtaatcccagcattttgggaggccaaggcaggcagatcacctgaggtcaggagttccagaccagcctggccaacatggtgaaatcccatctctacaaaaataaaacagttagctgggcatgatggcgggtgcctgtaatcccagctactcgggaggctgaggcaggatagtcgcttgaacccaggaggtggaggttgcaatgagccaagatcatgccactgcactccagcctggacgacagagtgagactccatcacaagaaaaaaagaactttgtcaacctctgtcttagggcgccttgtcacaggcttcgggtcagacggattcaaccttgcatcagccatttgttagccaggtcactctgttctttgtctgtaaatgagattgatcgttgttcccactgagagtgtcagctccttcccgtagagcaggcatgatgattgtactcacctctgacaccattgtgagtgccacattccttcccacgtccttgtcactgtaagagatgcccacctgagcaccaaccccaggttatcttcccctttgtcttccagccccccagaaacagctacgactcaacctacccaatcatttcatcatcagattgccactgtctctagttcaggtctcttgggactggcactcagaaatctcataataaatcctcttgaggcttctcatacactcgtcttcttccaatcttctttccctcaaaatctcatattttggttccacttcacccaccgtcattctccatatcactcccaggagttaggcaaaaagccccttccgttcttccgtatgttaaacttagaatcactctgttccctgctctgcgtttctattttttgtttttcctccatttactagtagcttaacactttctaacagtgttcttattattgatacgtatctatctcttccataagcttataaggtcacggataatacttctcattgtagtacgtaaatgacgtgggctagatatgagttgaataaacagttatacctgtaaattcttacagagtgaaaataaattgttatactttacaatttgtttctctctttagaccatttccaggacttgtgattaataaccagctggttgatcagagtgagtcagaaggccccgtgatacaaggtgagcgaggcaggggagggcccggagctactcctgcctgcacagtggcacacatggcgtgcctgcgtgtggcttcggctctcagtcacctgccctgaggggactcagttacacagcacacacatgcttctctgtggttttcactcctgggtttgacagctgatcaaaacataaattcaagctgtgggtcctgattgagaactgggggctgcagaccatttgcaccccctatcccagctcaggcctaacatcaggaaccccaggattaatgggtaggatgaaatggcagagcaagagggccgtcactttaacctgactctgccatccatttctaatgtctgccataagtcagtgagcaaaatgttcttcagtagaaatgtacagattgtgctcttaaaaaattccttaaaaaacaagtggaatggcctggtgctgtgtgagtcattg

SEQ ID NO: 456981 - DNA, 2665 bp, Homo sapiens
atagttcttggcaatttgaaagttatttgagaaggggaaatttataatgacaattcaaatgaagcaaactaaaaaataatgaagaaagacagaggaaaaagcagtattcacttgaacacatcccaaacaaagaaaatttcaaatgtaacaaggaaaaagcctgctaaagctcacaatacagaaataactattgatactcaaaatagctttaaagccctgctcaccttttgaatgttgggaattgaccaggaggtgactgtaactgtaagatggttcttccagtaatgaccattttctttttcaagatgatgattattctccaccgtctaagagaccaaaggccaatgagctaccgcagccaccagtcccggaacccgccaatgctgggaagcggaaagtgagggagttcaacttcgagaaatggaatgctcgcatcactgatctacgtaaacaagttgaagaattgtttgaaaggaaatatgctcaagccataaaagccaaaggtccggtgacgatcccgtaccctcttttccagtctcatgttgaagatctttatgtagaaggacttcctgaaggaattccttttagaaggccatctacttacggaattcctcgcctggagaggatattacttgcaaaggaaaggattcgttttgtgattaagaaacatgagcttctgaattcaacacgtgaagatttacagcttgataagccagcttcaggagtaaaggaagaatggtatgccagaatcactaaattaagaaagatggtggatcagcttttctgcaaaaaatttgcggaagccttggggagcactgaagccaaggctgtaccgtaccaaaaatttgaggcacacccgaatgatctgtacgtggaaggactgccagaaaacattcctttccgaagtccctcatggtatggaatcccaaggctggaaaaaatcattcaagtgggcaatcgaattaaatttgttattaaaagaccagaacttctgactcacagtaccactgaagttactcagccaagaacgaatacaccagtcaaagaagattggaatgtcagaattaccaagctacggaagcaagtggaagagatttttaatttgaaatttgctcaagctcttggactcaccgaggcagtaaaagtaccatatcctgtgtttgaatcaaacccggagttcttgtatgtggaaggcttgccagaggggattcccttccgaagccctacctggtttggaattccacgacttgaaaggatcgtccgcgggagtaataaaatcaagttcgttgttaaaaaacctgaactagttatttcctacttgcctcctgggatggctagtaaaataaacactaaagctttgcagtcccccaaaagaccacgaagtcctgggagtaattcaaaggttcctgaaattgaggtcaccgtggaaggccctaataacaacaatcctcaaacctcagctgttcgaaccccgacccagactaacggttctaacgttcccttcaagccacgagggagagagttttcctttgaggcctggaatgccaaaatcacggacctaaaacagaaagttgaaaatctcttcaatgagaaatgtggggaagctcttggccttaaacaagctgtgaaggtgccgttcgcgttatttgagtctttcccggaagacttttatgtggaaggcttacctgagggtgtgccattccgaagaccatcgacttttggcattccgaggctggagaagatactcagaaacaaagccaaaattaagttcatcattaaaaagcccgaaatgtttgagacggcgattaaggagagcacctcctctaagagccctcccagaaaaataaattcatcacccaatgttaatactactgcatcaggtgttgaagaccttaacatcattcaggtgacaattccagatgatgataatgaaagactctcgaaagttgaaaaagctagacagctaagagaacaagtgaatgacctctttagtcggaaatttggtgaagctattggtatgggttttcctgtgaaagttccctacaggaaaatcacaattaaccctggctgtgtggtggttgatggcatgcccccgggggtgtccttcaaagcccccagctacctggaaatcagctccatgagaaggatcttagactctgccgagtttatcaaattcacggtcattaggtaagtgagagtttcctgcttagtcacaggagcgaatctggagctcatgaggctgactcttctaaaatgcagccacaggtagtcatcgaatccggcttcctatgctgtgcaatcaacaaatcaaaataacttgtgtcatcattagaatgtcagatgtgcttctacgaactaagctgactcttttaattctttggcaaagggttggcaaactaggactgtttgccaaattcaggctgcctcctatttttagagtcttcctgaaacacagctacacccgtattatccatggctgctttcctgtcacagtgagtaagtagctgggactgagaaggcatggcctccaaagtctaaaatatttactctctagcactttgtagaaaaaccttgcctcccaaagtgctgggattacaggtgtgagccactgtgcccacctagaatgtttacagatgcccttcgctgacaaccgcatcacccgttc

SEQ ID NO: 456982 - DNA, 2029 bp, Homo sapiens
  misc_feature (2015)..(2015): n is a, c, g, or t
atagttcttggcaatttgaaagttatttgagaaggggaaatttataatgacaattcaaatgaagcaaactaaaaaataatgaagaaagacagaggaaaaagcagtattcacttgaacacatcccaaacaaagaaaatttcaaatgtaacaaggaaaaagcctgctaaagctcacaatacagaaataactattgatactcaaaatagctttaaagccctgctcaccttttgaatgttgggaattgaccaggaggtgactgtaactgtaagatggttcttccagtaatgaccattttctttttcaagatgatgattattctccaccgtctaagagaccaaaggccaatgagctaccgcagccaccagtcccggaacccgccaatgctgggaagcggaaagtgagggagttcaacttcgagaaatggaatgctcgcatcactgatctacgtaaacaagttgaagaattgtttgaaaggaaatatgctcaagccataaaagccaaaggtccggtgacgatcccgtaccctcttttccagtctcatgttgaagatctttatgtagaaggacttcctgaaggaattccttttagaaggccatctacttacggaattcctcgcctggagaggatattacttgcaaaggaaaggattcgttttgtgattaagaaacatgagcttctgaattcaacacgtgaagatttacagcttgataagccagcttcaggagtaaaggaagaatggtatgccagaatcactaaattaagaaagatggtggatcagcttttctgcaaaaaatttgcggaagccttggggagcactgaagccaaggctgtaccgtaccaaaaatttgaggcacacccgaatgatctgtacgtggaaggactgccagaaaacattcctttccgaagtccctcatggtatggaatcccaaggctggaaaaaatcattcaagtgggcaatcgaattaaatttgttattaaaagaccagaacttctgactcacagtaccactgaagttactcagccaagaacgaatacaccagtcaaagaagattggaatgtcagaattaccaagctacggaagcaagtggaagagatttttaatttgaaatttgctcaagctcttggactcaccgaggcagtaaaagtaccatatcctgtgtttgaatcaaacccggagttcttgtatgtggaaggcttgccagaggggattcccttccgaagccctacctggtttggaattccacgacttgaaaggatcgtccgcgggagtaataaaatcaagttcgttgttaaaaaacctgaactagttatttcctacttgcctcctgggatggctagtaaaataaacactaaagctttgcagtcccccaaaagaccacgaagtcctgggagtaattcaaaggttcctgaaattgaggtcaccgtggaaggccctaataacaacaatcctcaaacctcagctgttcgaaccccgacccagactaacggttctaacgttcccttcaagccacgagggagagagttttcctttgaggcctggaatgccaaaatcacggacctaaaacagaaagttgaaaatctcttcaatgagaaatgtggggaagctcttggccttaaacaagctgtgaaggtgccgttcgcgttatttgagtctttcccggaagacttttatgtggaaggcttacctgagggtgtgccattccgaagaccatcgacttttggcattccgaggctggagaagatactcagaaacaaagccaaaattaagttcatcattaaaaagcccgaaatgtttgagacggcgattaaggagagcacctcctctaagagccctcccagaaaaataaattcatcacccaatgttaatactactgcatcaggtgttgaagaccttaacatcattcaggtgacaattccagatgatgataatgaaagactctcgaaagttgaaaaagctagacagctaagagaacaagtgaatgacctctttagtcggaaatttgcatgggatcctntagagtcacctcat

SEQ ID NO: 456983 - DNA, 2415 bp, Homo sapiens
atagttcttggcaatttgaaagttatttgagaaggggaaatttataatgacaattcaaatgaagcaaactaaaaaataatgaagaaagacagaggaaaaagcagtattcacttgaacacatcccaaacaaagaaaatttcaaatgtaacaaggaaaaagcctgctaaagctcacaatacagaaataactattgatactcaaaatagctttaaagccctgctcaccttttgaatgttgggaattgaccaggaggtgactgtaactgtaagatggttcttccagtaatgaccattttctttttcaagatgatgattattctccaccgtctaagagaccaaaggccaatgagctaccgcagccaccagtcccggaacccgccaatgctgggaagcggaaagtgagggagttcaacttcgagaaatggaatgctcgcatcactgatctacgtaaacaagttgaagaattgtttgaaaggaaatatgctcaagccataaaagccaaaggtccggtgacgatcccgtaccctcttttccagtctcatgttgaagatctttatgtagaaggacttcctgaaggaattccttttagaaggccatctacttacggaattcctcgcctggagaggatattacttgcaaaggaaaggattcgttttgtgattaagaaacatgagcttctgaattcaacacgtgaagatttacagcttgataagccagcttcaggagtaaaggaagaatggtatgccagaatcactaaattaagaaagatggtggatcagcttttctgcaaaaaatttgcggaagccttggggagcactgaagccaaggctgtaccgtaccaaaaatttgaggcacacccgaatgatctgtacgtggaaggactgccagaaaacattcctttccgaagtccctcatggtatggaatcccaaggctggaaaaaatcattcaagtgggcaatcgaattaaatttgttattaaaagaccagaacttctgactcacagtaccactgaagttactcagccaagaacgaatacaccagtcaaagaagattggaatgtcagaattaccaagctacggaagcaagtggaagagatttttaatttgaaatttgctcaagctcttggactcaccgaggcagtaaaagtaccatatcctgtgtttgaatcaaacccggagttcttgtatgtggaaggcttgccagaggggattcccttccgaagccctacctggtttggaattccacgacttgaaaggatcgtccgcgggagtaataaaatcaagttcgttgttaaaaaacctgaactagttatttcctacttgcctcctgggatggctagtaaaataaacactaaagctttgcagtcccccaaaagaccacgaagtcctgggagtaattcaaaggttcctgaaattgaggtcaccgtggaaggccctaataacaacaatcctcaaacctcagctgttcgaaccccgacccagactaacggttctaacgttcccttcaagccacgagggagagagttttcctttgaggcctggaatgccaaaatcacggacctaaaacagaaagttgaaaatctcttcaatgagaaatgtggtaagtctatttgaaaccttcttactgccacgcagggtgccttcatgggagtaggagggagcagagtgggatactgagcgttggagtatccctgtcattggcaacgtgtgggtttttcgggattgaatggcgtcatttcgcccatgttctgtttcgtgtacgcggctgttttgcaggggaagctcttggccttaaacaagctgtgaaggtgccgttcgcgttatttgagtctttcccggaagacttttatgtggaaggcttacctgagggtgtgccattccgaagaccatcgacttttggcattccgaggctggagaagatactcagaaacaaagccaaaattaagttcatcattaaaaagtaaggaaactggatgaagtgggattagcatgagttgattgtgtttgacactgggagatgggtatgtgggtttgtgtttgtggcagggctgaattagctctggagtcagaaaaactgctttttaagctgcactcttgtatatgtttaaaacttctggccaggtgcgatctcagctcacaatcactagtgaattcccagcactttgggaggccaaagcaggtggattacctgaggtcagaagttcaagaccaacctggccaacatgatgaaacccatctctactaaaagtacaaaaattagctgggcgtggtggcacgtgcctgtaatcccagctacttgggagactgaggcaggagaatcacttgaacccagcaggcagaggttgcaatgagccaagatcgtgccactgcactccagcctgggcagcaagagcaaaactccatctcaaaaacaaaaa

SEQ ID NO: 456984 - DNA, 1613 bp, Homo sapiens
atagttcttggcaatttgaaagttatttgagaaggggaaatttataatgacaattcaaatgaagcaaactaaaaaataatgaagaaagacagaggaaaaagcagtattcacttgaacacatcccaaacaaagaaaatttcaaatgtaacaaggaaaaagcctgctaaagctcacaatacagaaataactattgatactcaaaatagctttaaagccctgctcaccttttgaatgttgggaattgaccaggaggtgactgtaactgtaagatggttcttccagtaatgaccattttctttttcaagatgatgattattctccaccgtctaagagaccaaaggccaatgagctaccgcagccaccagtcccggaacccgccaatgctgggaagcggaaagtgagggagttcaacttcgagaaatggaatgctcgcatcactgatctacgtaaacaagttgaagaattgtttgaaaggaaatatgctcaagccataaaagccaaaggtccggtgacgatcccgtaccctcttttccagtctcatgttgaagatctttatgtagaaggacttcctgaaggaattccttttagaaggccatctacttacggaattcctcgcctggagaggatattacttgcaaaggaaaggattcgttttgtgattaagaaacatgagcttctgaattcaacacgtgaagatttacagcttgataagccagcttcaggagtaaaggaagaatggtatgccagaatcactaaattaagaaagatggtggatcagcttttctgcaaaaaatttgcggaagccttggggagcactgaagccaaggctgtaccgtaccaaaaatttgaggcacacccgaatgatctgtacgtggaaggactgccagaaaacattcctttccgaagtccctcatggtatggaatcccaaggctggaaaaaatcattcaagtgggcaatcgaattaaatttgttattaaaagaccagaacttctgactcacagtaccactgaagttactcagccaagaacgaatacaccaggttaacctcagcatgcttttgatttggtcaagcaatcaaagtactggtgaagaattgaagattggaagtgacacattttttgctcagggaagtaatggagaaagaaaaatcttcctggaggtagatcttcagtttggattagtctgaacatgatgaaacctgtagaaaccttcatttctcaagacaaagctcaaattcaaggttgtgaggaatgcagtcaccacttttgttaggggcagttgtgacagtgagtgactgcaaaaactgagaatgcgaagcctctattgtaaaaagaatgtgcaagtgccatagaagtcactgcaaggattgggtgctggagcagtgccggacctgccatcgtcaccagagtgcagcagattcaccagaaggagaatctccactcttgtcgtcactaacagcacttgactttgtcccattcataaaagatcttggaaggaattaaaggtgcttggtggttcctcattccaacaacaccttacttggcctgcccgtggaacatgcgttagtctttggacaggacaactcgagtcacagaccacaagagaaaagaat

SEQ ID NO: 456985 - DNA, 1023 bp, Homo sapiens
atagttcttggcaatttgaaagttatttgagaaggggaaatttataatgacaattcaaatgaagcaaactaaaaaataatgaagaaagacagaggaaaaagcagtattcacttgaacacatcccaaacaaagaaaatttcaaatgtaacaaggaaaaagcctgctaaagctcacaatacagaaataactattgatactcaaaatagctttaaagccctgctcaccttttgaatgttgggaattgaccaggaggtgactgtaactgtaagatggttcttccagtaatgaccattttctttttcaagatgatgattattctccaccgtctaagagaccaaaggccaatgagctaccgcagccaccagtcccggaacccgccaatgctgggaagcggaaagtgagggagttcaacttcgagaaatggaatgctcgcatcactgatctacgtaaacaagttgaagaattgtttgaaaggaaatatgctcaagccataaaagccaaaggtccggtgacgatcccgtaccctcttttccagtctcatgttgaagatctttatgtagaaggacttcctgaaggaattccttttagaaggccatctacttacggaattcctcgcctggagaggatattacttgcaaaggaaaggattcgttttgtgattaagaaacatgagcttctgaattcaacacgtgaagatttacagcttgataagccagcttcaggagtaaaggaagaatggtatgccagaatcactaaattaagaaagatggtggatcagcttttctgcaaaaaatttgcggaagccttggggagcactgaagccaaggctgtaccgtaccaaaaatttgaggcacacccgaatgatctgtacgtggaaggactgccagaaaacattcctttccgaagtccctcatggtatggaatcccaaggctggaaaaaatcattcaagtgggcaatcgaattaaatttgttattaaaagaccagaacttctgactcaggtggtgtgggtaccgagctgagt

SEQ ID NO: 456986 - DNA, 1582 bp, Homo sapiens
atagttcttggcaatttgaaagttatttgagaaggggaaatttataatgacaattcaaatgaagcaaactaaaaaataatgaagaaagacagaggaaaaagcagtattcacttgaacacatcccaaacaaagaaaatttcaaatgtaacaaggaaaaagcctgctaaagctcacaatacagaaataactattgatactcaaaatagctttaaagccctgctcaccttttgaatgttgggaattgaccaggaggtgactgtaactgtaagatggttcttccagtaatgaccattttctttttcaagatgatgattattctccaccgtctaagagaccaaaggccaatgagctaccgcagccaccagtcccggaacccgccaatgctgggaagcggaaagtgagggagttcaacttcgagaaatggaatgctcgcatcactgatctacgtaaacaagttgaagaattgtttgaaaggaaatatgctcaagccataaaagccaaaggtccggtgacgatcccgtaccctcttttccagtctcatgttgaagatctttatgtagaaggacttcctgaaggaattccttttagaaggccatctacttacggaattcctcgcctggagaggatattacttgcaaaggaaaggattcgttttgtgattaagaaacatgagcttctgaattcaacacgtgaagatttacagcttgataagccagcttcaggagtaaaggaagaatggtatgccagaatcactaaattaagaaagatggtggatcagcttttctgcaaaaaatttgcggaagccttggggagcactgaagccaaggctgtaccgtaccaaaaatttgaggcacacccgaatgatctgtacgtggaaggactgccagaaaacattcctttccgaagtccctcatggtatggaatcccaaggctggaaaaaatcattcaagtgggcaatcgaattaaatttgttattaaaaggtaagatgataatctgtagaaatagtttcagtgtcttccctgagaagaggttaatttgatgaagaagggccttttgtttaccttatgacttatttctattgacaatgaaggcattaatatttagattcacttagtgaacaaatattagtataagcatcagatgtgcaaaattgggtctaacaagaacactgtccttggggccttcatacaaagaaaaatgcactgaaggccgggcgcggcagctcacgcctgtaatcgcagcactttgggaggccaaggcaggtggatcacttgaggtcaggagttcaagactagcctggccaacatgatgaagccccatctctagtaaaaatacaaaaattagctggaagcggtggtgcgagcctgtagtcccagctactcgggaggctgaggttggagaatcacttgaaccctagaggcggaggttgcagtgagccgagatcgtgccactgcactccagcctgggcaacagagcgagactccatctcaaaataattacccgcggctcacctccacaccttgtcgccgccttgccccaagcgactttagacttgaccaagttatgctcccggccccttct

SEQ ID NO: 456987 - DNA, 231 bp, Homo sapiens
caaaagtgcactcttctatatctaccagcaatgcgagttgtaaaataccagctctacaagaagctaggctctgtgacggcatagttttcagtagctttatcacaatattcacaatggagaattatatgacatggtagcagaaataggcccttttatgtgttgcttctattttacctcaaattgtagatatagggtaatcaataaaatccatccatgcctttcacacactaa

SEQ ID NO: 456988 - DNA, 425 bp, Homo sapiens
aatgcccataccctgtagtgtgtaaatgcccataccctgtagtgtgaagttttctgttgttagaaataagtgttaggaatcaagtatgaaatttgtgtgtgtactaggtgtatacagattggtgcagttaatcatgctcacgactactaaggtgaacaaatgtttcaagttgggttcctgggtgtgccctaaaatacttctccttcagctctcacagcaccttgtggacatgagtgaaggtcagtcagtgtgccaaatagattttgtgtggattatggcatggaaagtggctgagaaattctgtagcagggtaacaaaattatcttggtccaggagtcctgtagtggagaagataaaagtcaatgcttaactcataggttaacctcagcatgcttttgatttggtcaagcaatcaaagtactggt

SEQ ID NO: 456989 - DNA, 336 bp, Homo sapiens
ctttgcagtcccccaaaagaccacgaagtcctgggagtaattcaaaggttcctgaaattgaggtcaccgtggaaggtaagggccagtcctcggtatgtttctgttcattctctagtttactaattatgtcagttcactagctatgtgtttatacaggtttatacagatgacgttaaccaaactagcttttaactgtgaacagctgcctgtgataaagctaaatttctgaatgcttctaattgaaaatttttaaatccttaatagaaaacagataacatggatcacatcataaacttcccccaagaaaagtcctaaaatgcttttcctttatcataa

SEQ ID NO: 456990 - DNA, 202 bp, Homo sapiens
caacatcgtgagataccatctctttaccataaaaaaaaaaaaaagcagtatttaagttttgggttttctctgaactgtttcagatgatgataatgaaagactctcgaaagttgaaaaagctagacagctaagagaacaagtgaatgacctctttagtcggaaatttggtaagttttgcatttgcaaagtacagttgctataa

SEQ ID NO: 456991 - DNA, 3573 bp, Homo sapiens
catgaatacggtttgagtgtacgaaacatgagcttctgaattcaacacgtgaagatttacagcttgataagccagcttcaggagtaaaggaagaatggtatgccagaatcactaaattaagaaagatggtggatcagcttttctgcaaaaaatttgcggaagccttggggagcactgaagccaaggctgtaccgtaccaaaaatttgaggcacacccgaatgatctgtacgtggaaggactgccagaaaacattcctttccgaagtccctcatggtatggaatcccaaggctggaaaaaatcattcaagtgggcaatcgaattaaatttgttattaaaagaccagaacttctgactcacagtaccactgaagttactcagccaagaacgaatacaccagtcaaagaagattggaatgtcagaattaccaagctacggaagcaagtggaagagatttttaatttgaaatttgctcaagctcttggactcaccgaggcagtaaaagtaccatatcctgtgtttgaatcaaacccggagttcttgtatgtggaaggcttgccagaggggattcccttccgaagccctacctggtttggaattccacgacttgaaaggatcgtccgcgggagtaataaaatcaagttcgttgttaaaaaacctgaactagttatttcctacttgcctcctgggatggctagtaaaataaacactaaagctttgcagtcccccaaaagaccacgaagtcctgggagtaattcaaaggttcctgaaattgaggtcaccgtggaaggccctaataacaacaatcctcaaacctcagctgttcgaaccccgacccagactaacggttctaacgttcccttcaagccacgagggagagagttttcctttgaggcctggaatgccaaaatcacggacctaaaacagaaagttgaaaatctcttcaatgagaaatgtggggaagctcttggccttaaacaagctgtgaaggtgccgttcgcgttatttgagtctttcccggaagacttttatgtggaaggcttacctgagggtgtgccattccgaagaccatcgacttttggcattccgaggctggagaagatactcagaaacaaagccaaaattaagttcatcattaaaaagcccgaaatgtttgagacggcgattaaggagagcacctcctctaagagccctcccagaaaaataaattcatcacccaatgttaatactactgcatcaggtgttgaagaccttaacatcattcaggtgacaattccagatgatgataatgaaagactctcgaaagttgaaaaagctagacagctaagagaacaagtgaatgacctctttagtcggaaatttggtgaagctattggtatgggttttcctgtgaaagttccctacaggaaaatcacaattaaccctggctgtgtggtggttgatggcatgcccccgggggtgtccttcaaagcccccagctacctggaaatcagctccatgagaaggatcttagactctgccgagtttatcaaattcacggtcattagaccatttccaggacttgtgattaataaccagctggttgatcagagtgagtcagaaggccccgtgatacaagaatcagctgaaccaagccagttggaagttccagccacagaagaaataaaagagactgatggaagctctcagatcaagcaagaaccagaccccacgtggtagacctcttccctcctagggtaaatcagcttctgtgtcagggatgctgtgtggtgtccatctgaaccccctgcatacgcgtagctaatgtgatctccccactttcacataagatggtggccctgccttcagggaatgtgggagccaggtgggagccttcccggatatttaagctagaagattctacagggagattctccttggatcaatatatgtctctcagtcaaagatgtaaaagcacttttgccttaaaaagaatgttctgtttctaaatagagtcaacgttgtcctcctcattggaattcactatgagtcagaatcattagactgactttttttttttccatagtaatagtattttgcagagtctcacagagctgcagatcttttgttcatcttgcagagttaacaagtctgatcctgttagtccagatttcttaaatttggccaagttataataggagcagtagcttgagacccgaagtcaggaaactttgacaatggatttttttttttaatccagagacttgtactggaatttgccttaccctgtcagctcatggacttaaggtttcatcccgctttatgagtgcttctgaatccaagtcattgttacctgaatttgcaaattaagttgtgatattcgtgactgttaaattcctgtaattagattaacctctttgcttgcttgtttgttttctctcctattttagcttaaagtatcagtggttgagaagagcttttcggacctgttactaccccaagctgtgtaatatacttgtataacagaaataccttctatacaaacctttttttctacttttagatagaaatgtctactttttcagcagttctgtgaattaaagagcagagtgactgtgggtctggaatggctggtgtacttgggaatgtactatcaggattttacagcaatgctgggaaatgacagggaaaatgacaggaatgaatctcaccagattttttatgtacgcagcagagccttgagttacggtgtttattttccaatcaagtgaagatatctcctacttctcctactggaacatctcagcttctgcagtgaagaaaaattcctgtgatagttcagttctttagtttttctatttgaaaaaaaaaaatcatttaaatgatcctttgttcacggctctccttaatgactgagtgaacagttcctatctgtatatttgactaaaccttttcctaagctatctctcatggttcctatgtttttttatcataattaaaagcaaaaccatctggatcacctaacagtcagaggtcagtatctcagcgtgtgaattatagaggaaatacagagagaacctcttccacttttacttttcgtccaaataaaatgcatggtgtaccagaagttgaagatcgggttgaggattggggctagctcgatgacactaaggccccaacatcgcgggacctgctgtggcgcggattcttaggaacgctgttctagccggccccctctccaggggtcgccgtggccggcattatttcctagttcttcttgtaaccctgaggtgccagcgcggggagtgaggaggggtcagggggctaaggatgcaacctctgacgttctgcgccttcctaggagagtcttacatgtgttgagatttcacaagcaatgcgagttgtaaaataccagctctacaagaagctaggctctgtgacggcatagttttcagtagctttatcacaatattcacaatggagaattatatgacatggtagcagaaataggcccttttatgtgttgcttctattttacctcaaattgtagatatagggtaatcaataaaatccatccatgcctttcacacactaa

SEQ ID NO: 456992 - DNA, 3521 bp, Homo sapiens
atagttcttggcaatttgaaagttatttgagaaggggaaatttataatgacaattcaaatgaagcaaactaaaaaataatgaagaaagacagaggaaaaagcagtattcacttgaacacatcccaaacaaagaaaatttcaaatgtaacaaggaaaaagcctgctaaagctcacaatacagaaataactattgatactcaaaatagctttaaagccctgctcaccttttgaatgttgggaattgaccaggaggtgactgtaactgtaagatggttcttccagtaatgaccattttctttttcaagatgatgattattctccaccgtctaagagaccaaaggccaatgagctaccgcagccaccagtcccggaacccgccaatgctgggaagcggaaagtgagggagttcaacttcgagaaatggaatgctcgcatcactgatctacgtaaacaagttgaagaattgtttgaaaggaaatatgctcaagccataaaagccaaaggtccggtgacgatcccgtaccctcttttccagtctcatgttgaagatctttatgtagaaggacttcctgaaggaattccttttagaaggccatctacttacggaattcctcgcctggagaggatattacttgcaaaggaaaggattcgttttgtgattaagaaacatgagcttctgaattcaacacgtgaagatttacagcttgataagccagcttcaggagtaaaggaagaatggtatgccagaatcactaaattaagaaagatggtggatcagcttttctgcaaaaaatttgcggaagccttggggagcactgaagccaaggctgtaccgtaccaaaaatttgaggcacacccgaatgatctgtacgtggaaggactgccagaaaacattcctttccgaagtccctcatggtatggaatcccaaggctggaaaaaatcattcaagtgggcaatcgaattaaatttgttattaaaagaccagaacttctgactcacagtaccactgaagttactcagccaagaacgaatacaccagtcaaagaagattggaatgtcagaattaccaagctacggaagcaagtggaagagatttttaatttgaaatttgctcaagctcttggactcaccgaggcagtaaaagtaccatatcctgtgtttgaatcaaacccggagttcttgtatgtggaaggcttgccagaggggattcccttccgaagccctacctggtttggaattccacgacttgaaaggatcgtccgcgggagtaataaaatcaagttcgttgttaaaaaacctgaactagttatttcctacttgcctcctgggatggctagtaaaataaacactaaagctttgcagtcccccaaaagaccacgaagtcctgggagtaattcaaaggttcctgaaattgaggtcaccgtggaaggccctaataacaacaatcctcaaacctcagctgttcgaaccccgacccagactaacggttctaacgttcccttcaagccacgagggagagagttttcctttgaggcctggaatgccaaaatcacggacctaaaacagaaagttgaaaatctcttcaatgagaaatgtggggaagctcttggccttaaacaagctgtgaaggtgccgttcgcgttatttgagtctttcccggaagacttttatgtggaaggcttacctgagggtgtgccattccgaagaccatcgacttttggcattccgaggctggagaagatactcagaaacaaagccaaaattaagttcatcattaaaaagcccgaaatgtttgagacggcgattaaggagagcacctcctctaagagccctcccagaaaaataaattcatcacccaatgttaatactactgcatcaggtgttgaagaccttaacatcattcaggtgacaattccagatgatgataatgaaagactctcgaaagttgaaaaagctagacagctaagagaacaagtgaatgacctctttagtcggaaatttggtgaagctattggtatgggttttcctgtgaaagttccctacaggaaaatcacaattaaccctggctgtgtggtggttgatggcatgcccccgggggtgtccttcaaagcccccagctacctggaaatcagctccatgagaaggatcttagactctgccgagtttatcaaattcacggtcattagaccatttccaggacttgtgattaataaccagctggttgatcagagtgagtcagaaggccccgtgatacaagaatcagctgaaccaagccagttggaagttccagccacagaagaaataaaagagactgatggaagctctcagatcaagcaagaaccagaccccacgtggtagacctcttccctcctaggcttaaagtatcagtggttgagaagagcttttcggacctgttactaccccaagctgtgtaatatacttgtataacagaaataccttctatacaaacctttttttctacttttagatagaaatgtctactttttcagcagttctgtgaattaaagagcagagtgactgtgggtctggaatggctggtgtacttgggaatgtactatcaggattttacagcaatgctgggaaatgacagggaaaatgacaggaatgaatctcaccagattttttatgtacgcagcagagccttgagttacggtgtttattttccaatcaagtgaagatatctcctacttctcctactggaacatctcagcttctgcagtgaagaaaaattcctgtgatagttcagttctttagtttttctatttgaaaaaaaaaaatcatttaaatgatcctttgttcacggctctccttaatgactgagtgaacagttcctatctgtatatttgactaaaccttttcctaagctatctctcatggttcctatgtttttttatcataattaaaagcaaaaccatctggatcacctaacagtcagaggtcagtatctcagcgtgtgaattatagaggaaatacagagagaacctcttccacttttacttttcgtccaaataaaatgcatggtgtaccagaagttgaagatcgggttgaggattggggctagctcgatgacactaaggccccaacatcgcgggacctgctgtggcgcggattcttaggaacgctgttctagccggccccctctccaggggtcgccgtggccggcattatttcctagttcttcttgtaaccctgaggtgccagcgcggggagtgaggaggggtcagggggctaaggatgcaacctctgacgttctgcgccttcctaggagagtcttacatgtgttgagatttcacaagcaatgcgagttgtaaaataccagctctacaagaagctaggctctgtgacggcatagttttcagtagctttatcacaatattcacaatggagaattatatgacatggtagcagaaataggcccttttatgtgttgcttctattttacctcaaattgtagatatagggtaatcaataaaatccatccatgcctttcacacactaa

SEQ ID NO: 456993 - DNA, 3484 bp, Homo sapiens
ggtcggactatagtacggcgcagtgtgctgaactcgttttacagacaccctgcttcttgatgataacacaaaggccagcagggtccactgctgtgtggaatggccttcggtcatttctgcccagagcatagaggtcattttcactaataacataactctccttttgattgaaagtgttaaaatgttcctcctaaaagcacttattttttaggctcgttcttcagatttgccccatatcctaagcaaaatgccttcaatatgaagtggatattgcttgaccgtagggagcttgtccatactgtactcgagaatgtagacacaaagaaagaatgtctgtgtcaaatgttatcctccgcaacttaacgttctcttgcactttcagctcaagctcttggactcaccgaggcagtaaaagtaccatatcctgtgtttgaatcaaacccggagttcttgtatgtggaaggcttgccagaggggattcccttccgaagccctacctggtttggaattccacgacttgaaaggatcgtccgcgggagtaataaaatcaagttcgttgttaaaaaacctgaactagttatttcctacttgcctcctgggatggctagtaaaataaacactaaagctttgcagtcccccaaaagaccacgaagtcctgggagtaattcaaaggttcctgaaattgaggtcaccgtggaaggccctaataacaacaatcctcaaacctcagctgttcgaaccccgacccagactaacggttctaacgttcccttcaagccacgagggagagagttttcctttgaggcctggaatgccaaaatcacggacctaaaacagaaagttgaaaatctcttcaatgagaaatgtggggaagctcttggccttaaacaagctgtgaaggtgccgttcgcgttatttgagtctttcccggaagacttttatgtggaaggcttacctgagggtgtgccattccgaagaccatcgacttttggcattccgaggctggagaagatactcagaaacaaagccaaaattaagttcatcattaaaaagcccgaaatgtttgagacggcgattaaggagagcacctcctctaagagccctcccagaaaaataaattcatcacccaatgttaatactactgcatcaggtgttgaagaccttaacatcattcaggtgacaattccagatgatgataatgaaagactctcgaaagttgaaaaagctagacagctaagagaacaagtgaatgacctctttagtcggaaatttggtgaagctattggtatgggttttcctgtgaaagttccctacaggaaaatcacaattaaccctggctgtgtggtggttgatggcatgcccccgggggtgtccttcaaagcccccagctacctggaaatcagctccatgagaaggatcttagactctgccgagtttatcaaattcacggtcattagaccatttccaggacttgtgattaataaccagctggttgatcagagtgagtcagaaggccccgtgatacaagaatcagctgaaccaagccagttggaagttccagccacagaagaaataaaagagactgatggaagctctcagatcaagcaagaaccagaccccacgtggtagacctcttccctcctagggtaaatcagcttctgtgtcagggatgctgtgtggtgtccatctgaaccccctgcatacgcgtagctaatgtgatctccccactttcacataagatggtggccctgccttcagggaatgtgggagccaggtgggagccttcccggatatttaagctagaagattctacagggagattctccttggatcaatatatgtctctcagtcaaagatgtaaaagcacttttgccttaaaaagaatgttctgtttctaaatagagtcaacgttgtcctcctcattggaattcactatgagtcagaatcattagactgactttttttttttccatagtaatagtattttgcagagtctcacagagctgcagatcttttgttcatcttgcagagttaacaagtctgatcctgttagtccagatttcttaaatttggccaagttataataggagcagtagcttgagacccgaagtcaggaaactttgacaatggatttttttttttaatccagagacttgtactggaatttgccttaccctgtcagctcatggacttaaggtttcatcccgctttatgagtgcttctgaatccaagtcattgttacctgaatttgcaaattaagttgtgatattcgtgactgttaaattcctgtaattagattaacctctttgcttgcttgtttgttttctctcctattttagcttaaagtatcagtggttgagaagagcttttcggacctgttactaccccaagctgtgtaatatacttgtataacagaaataccttctatacaaacctttttttctacttttagatagaaatgtctactttttcagcagttctgtgaattaaagagcagagtgactgtgggtctggaatggctggtgtacttgggaatgtactatcaggattttacagcaatgctgggaaatgacagggaaaatgacaggaatgaatctcaccagattttttatgtacgcagcagagccttgagttacggtgtttattttccaatcaagtgaagatatctcctacttctcctactggaacatctcagcttctgcagtgaagaaaaattcctgtgatagttcagttctttagtttttctatttgaaaaaaaaaaatcatttaaatgatcctttgttcacggctctccttaatgactgagtgaacagttcctatctgtatatttgactaaaccttttcctaagctatctctcatggttcctatgtttttttatcataattaaaagcaaaaccatctggatcacctaacagtcagaggtcagtatctcagcgtgtgaattatagaggaaatacagagagaacctcttccacttttacttttcgtccaaataaaatgcatggtgtaccagaagttgaagatcgggttgaggattggggctagctcgatgacactaaggccccaacatcgcgggacctgctgtggcgcggattcttaggaacgctgttctagccggccccctctccaggggtcgccgtggccggcattatttcctagttcttcttgtaaccctgaggtgccagcgcggggagtgaggaggggtcagggggctaaggatgcaacctctgacgttctgcgccttcctaggagagtcttacatgtgttgagatttcacaagcaatgcgagttgtaaaataccagctctacaagaagctaggctctgtgacggcatagttttcagtagctttatcacaatattcacaatggagaattatatgacatggtagcagaaataggcccttttatgtgttgcttctattttacctcaaattgtagatatagggtaatcaataaaatccatccatgcctttcacacactaa

SEQ ID NO: 456994 - DNA, 2775 bp, Homo sapiens
  misc_feature (13)..(13): n is a, c, g, or t
  misc_feature (20)..(20): n is a, c, g, or t
  misc_feature (31)..(31): n is a, c, g, or t
ctggctggctctngaggatncactaaagccnagccacccagactaacggttctaacgttcccttcaagccacgagggagagagttttcctttgaggcctggaatgccaaaatcacggacctaaaacagaaagttgaaaatctcttcaatgagaaatgtggggaagctcttggccttaaacaagctgtgaaggtgccgttcgcgttatttgagtctttcccggaagacttttatgtggaaggcttacctgagggtgtgccattccgaagaccatcgacttttggcattccgaggctggagaagatactcagaaacaaagccaaaattaagttcatcattaaaaagcccgaaatgtttgagacggcgattaaggagagcacctcctctaagagccctcccagaaaaataaattcatcacccaatgttaatactactgcatcaggtgttgaagaccttaacatcattcaggtgacaattccagatgatgataatgaaagactctcgaaagttgaaaaagctagacagctaagagaacaagtgaatgacctctttagtcggaaatttggtgaagctattggtatgggttttcctgtgaaagttccctacaggaaaatcacaattaaccctggctgtgtggtggttgatggcatgcccccgggggtgtccttcaaagcccccagctacctggaaatcagctccatgagaaggatcttagactctgccgagtttatcaaattcacggtcattagaccatttccaggacttgtgattaataaccagctggttgatcagagtgagtcagaaggccccgtgatacaagaatcagctgaaccaagccagttggaagttccagccacagaagaaataaaagagactgatggaagctctcagatcaagcaagaaccagaccccacgtggtagacctcttccctcctagggtaaatcagcttctgtgtcagggatgctgtgtggtgtccatctgaaccccctgcatacgcgtagctaatgtgatctccccactttcacataagatggtggccctgccttcagggaatgtgggagccaggtgggagccttcccggatatttaagctagaagattctacagggagattctccttggatcaatatatgtctctcagtcaaagatgtaaaagcacttttgccttaaaaagaatgttctgtttctaaatagagtcaacgttgtcctcctcattggaattcactatgagtcagaatcattagactgactttttttttttccatagtaatagtattttgcagagtctcacagagctgcagatcttttgttcatcttgcagagttaacaagtctgatcctgttagtccagatttcttaaatttggccaagttataataggagcagtagcttgagacccgaagtcaggaaactttgacaatggatttttttttttaatccagagacttgtactggaatttgccttaccctgtcagctcatggacttaaggtttcatcccgctttatgagtgcttctgaatccaagtcattgttacctgaatttgcaaattaagttgtgatattcgtgactgttaaattcctgtaattagattaacctctttgcttgcttgtttgttttctctcctattttagcttaaagtatcagtggttgagaagagcttttcggacctgttactaccccaagctgtgtaatatacttgtataacagaaataccttctatacaaacctttttttctacttttagatagaaatgtctactttttcagcagttctgtgaattaaagagcagagtgactgtgggtctggaatggctggtgtacttgggaatgtactatcaggattttacagcaatgctgggaaatgacagggaaaatgacaggaatgaatctcaccagattttttatgtacgcagcagagccttgagttacggtgtttattttccaatcaagtgaagatatctcctacttctcctactggaacatctcagcttctgcagtgaagaaaaattcctgtgatagttcagttctttagtttttctatttgaaaaaaaaaaatcatttaaatgatcctttgttcacggctctccttaatgactgagtgaacagttcctatctgtatatttgactaaaccttttcctaagctatctctcatggttcctatgtttttttatcataattaaaagcaaaaccatctggatcacctaacagtcagaggtcagtatctcagcgtgtgaattatagaggaaatacagagagaacctcttccacttttacttttcgtccaaataaaatgcatggtgtaccagaagttgaagatcgggttgaggattggggctagctcgatgacactaaggccccaacatcgcgggacctgctgtggcgcggattcttaggaacgctgttctagccggccccctctccaggggtcgccgtggccggcattatttcctagttcttcttgtaaccctgaggtgccagcgcggggagtgaggaggggtcagggggctaaggatgcaacctctgacgttctgcgccttcctaggagagtcttacatgtgttgagatttcacaagcaatgcgagttgtaaaataccagctctacaagaagctaggctctgtgacggcatagttttcagtagctttatcacaatattcacaatggagaattatatgacatggtagcagaaataggcccttttatgtgttgcttctattttacctcaaattgtagatatagggtaatcaataaaatccatccatgcctttcacacactaa

SEQ ID NO: 456995 - DNA, 3300 bp, Homo sapiens
atagttcttggcaatttgaaagttatttgagaaggggaaatttataatgacaattcaaatgaagcaaactaaaaaataatgaagaaagacagaggaaaaagcagtattcacttgaacacatcccaaacaaagaaaatttcaaatgtaacaaggaaaaagcctgctaaagctcacaatacagaaataactattgatactcaaaatagctttaaagccctgctcaccttttgaatgttgggaattgaccaggaggtgactgtaactgtaagatggttcttccagtaatgaccattttctttttcaagatgatgattattctccaccgtctaagagaccaaaggccaatgagctaccgcagccaccagtcccggaacccgccaatgctgggaagcggaaagtgagggagttcaacttcgagaaatggaatgctcgcatcactgatctacgtaaacaagttgaagaattgtttgaaaggaaatatgctcaagccataaaagccaaaggtccggtgacgatcccgtaccctcttttccagtctcatgttgaagatctttatgtagaaggacttcctgaaggaattccttttagaaggccatctacttacggaattcctcgcctggagaggatattacttgcaaaggaaaggattcgttttgtgattaagaaacatgagcttctgaattcaacacgtgaagatttacagcttgataagccagcttcaggagtaaaggaagaatggtatgccagaatcactaaattaagaaagatggtggatcagcttttctgcaaaaaatttgcggaagccttggggagcactgaagccaaggctgtaccgtaccaaaaatttgaggcacacccgaatgatctgtacgtggaaggactgccagaaaacattcctttccgaagtccctcatggtatggaatcccaaggctggaaaaaatcattcaagtgggcaatcgaattaaatttgttattaaaagaccagaacttctgactcacagtaccactgaagttactcagccaagaacgaatacaccagtcaaagaagattggaatgtcagaattaccaagctacggaagcaagtggaagagatttttaatttgaaatttgctcaagctcttggactcaccgaggcagtaaaagtaccatatcctgtgtttgaatcaaacccggagttcttgtatgtggaaggcttgccagaggggattcccttccgaagccctacctggtttggaattccacgacttgaaaggatcgtccgcgggagtaataaaatcaagttcgttgttaaaaaacctgaactagttatttcctacttgcctcctgggatggctagtaaaataaacactaaagctttgcagtcccccaaaagaccacgaagtcctgggagtaattcaaaggttcctgaaattgaggtcaccgtggaaggccctaataacaacaatcctcaaacctcagctgttcgaaccccgacccagactaacggttctaacgttcccttcaagccacgagggagagagttttcctttgaggcctggaatgccaaaatcacggacctaaaacagaaagttgaaaatctcttcaatgagaaatgtggggaagctcttggccttaaacaagctgtgaaggtgccgttcgcgttatttgagtctttcccggaagacttttatgtggaaggcttacctgagggtgtgccattccgaagaccatcgacttttggcattccgaggctggagaagatactcagaaacaaagccaaaattaagttcatcattaaaaagcccgaaatgtttgagacggcgattaaggagagcacctcctctaagagccctcccagaaaaataaattcatcacccaatgttaatactactgcatcaggtgttgaagaccttaacatcattcaggtgacaattccagatgatgataatgaaagactctcgaaagttgaaaaagctagacagctaagagaacaagtgaatgacctctttagtcggaaatttggtgaagctattggtatgggttttcctgtgaaagttccctacaggaaaatcacaattaaccctggctgtgtggtggttgatggcatgcccccgggggtgtccttcaaagcccccagctacctggaaatcagctccatgagaaggatcttagactctgccgagtttatcaaattcacggtcattagaccatttccaggacttgtgattaataaccagctggttgatcagagtgagtcagaaggccccgtgatacaagaatcagctgaaccaagccagttggaagttccagccacagaagaaataaaagagactgatggaagctctcagatcaagcaagaaccagaccccacgtggtagacctcttccctcctaggcttaaagtatcagtggttgagaagagcttttcggacctgttactaccccaagctgtgcagcagagccttgagttacggtgtttattttccaatcaagtgaagatatctcctacttctcctactggaacatctcagcttctgcagtgaagaaaaattcctgtgatagttcagttctttagtttttctatttgaaaaaaaaaaatcatttaaatgatcctttgttcacggctctccttaatgactgagtgaacagttcctatctgtatatttgactaaaccttttcctaagctatctctcatggttcctatgtttttttatcataattaaaagcaaaaccatctggatcacctaacagtcagaggtcagtatctcagcgtgtgaattatagaggaaatacagagagaacctcttccacttttacttttcgtccaaataaaatgcatggtgtaccagaagttgaagatcgggttgaggattggggctagctcgatgacactaaggccccaacatcgcgggacctgctgtggcgcggattcttaggaacgctgttctagccggccccctctccaggggtcgccgtggccggcattatttcctagttcttcttgtaaccctgaggtgccagcgcggggagtgaggaggggtcagggggctaaggatgcaacctctgacgttctgcgccttcctaggagagtcttacatgtgttgagatttcacaagcaatgcgagttgtaaaataccagctctacaagaagctaggctctgtgacggcatagttttcagtagctttatcacaatattcacaatggagaattatatgacatggtagcagaaataggcccttttatgtgttgcttctattttacctcaaattgtagatatagggtaatcaataaaatccatccatgcctttcacacactaa

SEQ ID NO: 456996 - DNA, 4404 bp, Homo sapiens
  misc_feature (4265)..(4265): n is a, c, g, or t
atagttcttggcaatttgaaagttatttgagaaggggaaatttataatgacaattcaaatgaagcaaactaaaaaataatgaagaaagacagaggaaaaagcagtattcacttgaacacatcccaaacaaagaaaatttcaaatgtaacaaggaaaaagcctgctaaagctcacaatacagaaataactattgatactcaaaatagctttaaagccctgctcaccttttgaatgttgggaattgaccaggaggtgactgtaactgtaagatggttcttccagtaatgaccattttctttttcaagatgatgattattctccaccgtctaagagaccaaaggccaatgagctaccgcagccaccagtcccggaacccgccaatgctgggaagcggaaagtgagggagttcaacttcgagaaatggaatgctcgcatcactgatctacgtaaacaagttgaagaattgtttgaaaggaaatatgctcaagccataaaagccaaaggtccggtgacgatcccgtaccctcttttccagtctcatgttgaagatctttatgtagaaggacttcctgaaggaattccttttagaaggccatctacttacggaattcctcgcctggagaggatattacttgcaaaggaaaggattcgttttgtgattaagaaacatgagcttctgaattcaacacgtgaagatttacagcttgataagccagcttcaggagtaaaggaagaatggtatgccagaatcactaaattaagaaagatggtggatcagcttttctgcaaaaaatttgcggaagccttggggagcactgaagccaaggctgtaccgtaccaaaaatttgaggcacacccgaatgatctgtacgtggaaggactgccagaaaacattcctttccgaagtccctcatggtatggaatcccaaggctggaaaaaatcattcaagtgggcaatcgaattaaatttgttattaaaagaccagaacttctgactcacagtaccactgaagttactcagccaagaacgaatacaccagtcaaagaagattggaatgtcagaattaccaagctacggaagcaagtggaagagatttttaatttgaaatttgctcaagctcttggactcaccgaggcagtaaaagtaccatatcctgtgtttgaatcaaacccggagttcttgtatgtggaaggcttgccagaggggattcccttccgaagccctacctggtttggaattccacgacttgaaaggatcgtccgcgggagtaataaaatcaagttcgttgttaaaaaacctgaactagttatttcctacttgcctcctgggatggctagtaaaataaacactaaagctttgcagtcccccaaaagaccacgaagtcctgggagtaattcaaaggttcctgaaattgaggtcaccgtggaaggccctaataacaacaatcctcaaacctcagctgttcgaaccccgacccagactaacggttctaacgttcccttcaagccacgagggagagagttttcctttgaggcctggaatgccaaaatcacggacctaaaacagaaagttgaaaatctcttcaatgagaaatgtggggaagctcttggccttaaacaagctgtgaaggtgccgttcgcgttatttgagtctttcccggaagacttttatgtggaaggcttacctgagggtgtgccattccgaagaccatcgacttttggcattccgaggctggagaagatactcagaaacaaagccaaaattaagttcatcattaaaaagcccgaaatgtttgagacggcgattaaggagagcacctcctctaagagccctcccagaaaaataaattcatcacccaatgttaatactactgcatcaggtgttgaagaccttaacatcattcaggtgacaattccagatgatgataatgaaagactctcgaaagttgaaaaagctagacagctaagagaacaagtgaatgacctctttagtcggaaatttggtgaagctattggtatgggttttcctgtgaaagttccctacaggaaaatcacaattaaccctggctgtgtggtggttgatggcatgcccccgggggtgtccttcaaagcccccagctacctggaaatcagctccatgagaaggatcttagactctgccgagtttatcaaattcacggtcattagaccatttccaggacttgtgattaataaccagctggttgatcagagtgagtcagaaggccccgtgatacaagaatcagctgaaccaagccagttggaagttccagccacagaagaaataaaagagactgatggaagctctcagatcaagcaagaaccagaccccacgtggtagacctcttccctcctagggtaaatcagcttctgtgtcagggatgctgtgtggtgtccatctgaaccccctgcatacgcgtagctaatgtgatctccccactttcacataagatggtggccctgccttcagggaatgtgggagccaggtgggagccttcccggatatttaagctagaagattctacagggagattctccttggatcaatatatgtctctcagtcaaagatgtaaaagcacttttgccttaaaaagaatgttctgtttctaaatagagtcaacgttgtcctcctcattggaattcactatgagtcagaatcattagactgactttttttttttccatagtaatagtattttgcagagtctcacagagctgcagatcttttgttcatcttgcagagttaacaagtctgatcctgttagtccagatttcttaaatttggccaagttataataggagcagtagcttgagacccgaagtcaggaaactttgacaatggatttttttttttaatccagagacttgtactggaatttgccttaccctgtcagctcatggacttaaggtttcatcccgctttatgagtgcttctgaatccaagtcattgttacctgaatttgcaaattaagttgtgatattcgtgactgttaaattcctgtaattagattaacctctttgcttgcttgtttgttttctctcctattttagcttaaagtatcagtggttgagaagagcttttcggacctgttactaccccaagctgtgtaatatacttgtataacagaaataccttctatacaaacctttttttctacttttagatagaaatgtctactttttcagcagttctgtgaattaaagagcagagtgactgtgggtctggaatggctggtgtacttgggaatgtactatcaggattttacagcaatgctgggaaatgacagggaaaatgacaggaatgaatctcaccagattttttatgtacgcagcagagccttgagttacggtgtttattttccaatcaagtgaagatatctcctacttctcctactggaacatctcagcttctgcagtgaagaaaaattcctgtgatagttcagttctttagtttttctatttgaaaaaaaaaaatcatttaaatgatcctttgttcacggctctccttaatgactgagtgaacagttcctatctgtatatttgactaaaccttttcctaagctatctctcatggttcctatgtttttttatcataattaaaagcaaaaccatctggatcacctaacagtcagaggtcagtatctcagcgtgtgaattatagaggaaatacagagagaacctcttccacttttacttttcgtccaaataaaatgcatggtgtaccagaagttgaagatcgggttgaggattggggctagctcgatgacactaaggccccaacatcgcgggacctgctgtggcgcggattcttaggaacgctgttctagccggccccctctccaggggtcgccgtggccggcattatttcctagttcttcttgtaaccctgaggtgccagcgcggggagtgaggaggggtcagggggctaaggatgcaacctctgacgttctgcgccttcctaggagagtcttacatgtgttgagatttcacaagcaatgcgagttgtaaaataccagctctacaagaagctaggctctgtgacggcatagttttcagtagctttatcacaatattcacaatggagaattatatgacatggtagcagaaataggcccttttatgtgttgcttctattttacctcaaattgtagatatagggtaatcaataaaatccatccatgcctttcacacactaaaaaaaaaaaaagctttgatgcaagaggtggggctggaaagggacatgtggngttggcattgcttataaataggccaggaaaggagattaggcccaagcactgttaaagccatggcaagcaagtgggggcggctctaataattgcctttgcctcccatcctgagagaggcctggtgggctaggtattatct

SEQ ID NO: 456997 - DNA, 3634 bp, Homo sapiens
atagttcttggcaatttgaaagttatttgagaaggggaaatttataatgacaattcaaatgaagcaaactaaaaaataatgaagaaagacagaggaaaaagcagtattcacttgaacacatcccaaacaaagaaaatttcaaatgtaacaaggaaaaagcctgctaaagctcacaatacagaaataactattgatactcaaaatagctttaaagccctgctcaccttttgaatgttgggaattgaccaggaggtgactgtaactgtaagatggttcttccagtaatgaccattttctttttcaagatgatgattattctccaccgtctaagagaccaaaggccaatgagctaccgcagccaccagtcccggaacccgccaatgctgggaagcggaaagtgagggagttcaacttcgagaaatggaatgctcgcatcactgatctacgtaaacaagttgaagaattgtttgaaaggaaatatgctcaagccataaaagccaaaggtccggtgacgatcccgtaccctcttttccagtctcatgttgaagatctttatgtagaaggacttcctgaaggaattccttttagaaggccatctacttacggaattcctcgcctggagaggatattacttgcaaaggaaaggattcgttttgtgattaagaaacatgagcttctgaattcaacacgtgaagatttacagcttgataagccagcttcaggagtaaaggaagaatggtatgccagaatcactaaattaagaaagatggtggatcagcttttctgcaaaaaatttgcggaagccttggggagcactgaagccaaggctgtaccgtaccaaaaatttgaggcacacccgaatgatctgtacgtggaaggactgccagaaaacattcctttccgaagtccctcatggtatggaatcccaaggctggaaaaaatcattcaagtgggcaatcgaattaaatttgttattaaaagaccagaacttctgactcacagtaccactgaagttactcagccaagaacgaatacaccagtcaaagaagattggaatgtcagaattaccaagctacggaagcaagtggaagagatttttaatttgaaatttgctcaagctcttggactcaccgaggcagtaaaagtaccatatcctgtgtttgaatcaaacccggagttcttgtatgtggaaggcttgccagaggggattcccttccgaagccctacctggtttggaattccacgacttgaaaggatcgtccgcgggagtaataaaatcaagttcgttgttaaaaaacctgaactagttatttcctacttgcctcctgggatggctagtaaaataaacactaaagctttgcagtcccccaaaagaccacgaagtcctgggagtaattcaaaggttcctgaaattgaggtcaccgtggaaggccctaataacaacaatcctcaaacctcagctgttcgaaccccgacccagactaacggttctaacgttcccttcaagccacgagggagagagttttcctttgaggcctggaatgccaaaatcacggacctaaaacagaaagttgaaaatctcttcaatgagaaatgtggggaagctcttggccttaaacaagctgtgaaggtgccgttcgcgttatttgagtctttcccggaagacttttatgtggaaggcttacctgagggtgtgccattccgaagaccatcgacttttggcattccgaggctggagaagatactcagaaacaaagccaaaattaagttcatcattaaaaagcccgaaatgtttgagacggcgattaaggagagcacctcctctaagagccctcccagaaaaataaattcatcacccaatgttaatactactgcatcaggtgttgaagaccttaacatcattcaggtgacaattccagatgatgataatgaaagactctcgaaagttgaaaaagctagacagctaagagaacaagtgaatgacctctttagtcggaaatttggtgaagctattggtatgggttttcctgtgaaagttccctacaggaaaatcacaattaaccctggctgtgtggtggttgatggcatgcccccgggggtgtccttcaaagcccccagctacctggaaatcagctccatgagaaggatcttagactctgccgagtttatcaaattcacggtcattagaccatttccaggacttgtgattaataaccagctggttgatcagagtgagtcagaaggccccgtgatacaagaatcagctgaaccaagccagttggaagttccagccacagaagaaataaaagagactgatggaagctctcagatcaagcaagaaccagaccccacgtggtagacctcttccctcctagggtaaatcagcttctgtgtcagggatgctgtgtggtgtccatctgaaccccctgcatacgcgtagctaatgtgatctccccactttcacataagatggtggccctgccttcagggaatgtgggagccaggtgggagccttcccggatatttaagctagaagattctacagggagattctccttggatcaatatatgtctctcagtcaaagatgtaaaagcacttttgccttaaaaagaatgttctgtttctaaatagagtcaacgttgtcctcctcattggaattcactatgagtcagaatcattagactgactttttttttttccatagtaatagtattttgcagagtctcacagagctgcagatcttttgttcatcttgcagagttaacaagtctgatcctgttagtccagatttcttaaatttggccaagttataataggagcagtagcttgagacccgaagtcaggaaactttgacaatggatttttttttttaatccagagacttgtactggaatttgccttaccctgtcagctcatggacttaaggtttcatcccgctttatgagtgcttctgaatccaagtcattgttacctgaatttgcaaattaagttgtgatattcgtgactgttaaattcctgtaattagattaacctctttgcttgcttgtttgttttctctcctattttagcttaaagtatcagtggttgagaagagcttttcggacctgttactaccccaagctgtgtaatatacttgtataacagaaataccttctatacaaacctttttttctacttttagatagaaatgtctactttttcagcagttctgtgaattaaagagcagagtgactgtgggtctggaatggctggtgtacttgggaatgtactatcaggattttacagcaatgctgggaaatgacagggaaaatgacaggaatgaatctcaccagattttttatgtacgcagcagagccttgagttacggtgtttattttccaatcaagtgaagatatctcctacttctcctactggaacatctcagcttctgcagtgaagaaaaattcctgtgatagttcagttctttagtttttctatttgaaaaaaaaaaatcatttaaatgatcctttgttcacggctctccttaatgactgagtgaacagttcctatctgtatatttgactaaaccttttcctaagctatctctcatggttcctatgtttttttatcataattaaaagcaaaaccatctgg

SEQ ID NO: 456998 - DNA, 904 bp, Homo sapiens
  misc_feature (119)..(119): n is a, c, g, or t
ggacgctcactccagactggggaatggagcatgacagtctttgaatatcgaacacgcaaggttgggagactacctatgtagatatgcaccctatgacatggtggtcctgatcaagaatntggtgtggacgttggccctgtttgctttttataaaccaaactctatctgaaatcccaacaaaaaaaaatttaactccatatgtgttcctctggttctaatcttgtcaaccagtgtggccagtgtggagagagactaaaccttttcctaagctatctctcatggttcctatgtttttttatcataattaaaagcaaaaccatctggatcacctaacagtcagaggtcagtatctcagcgtgtgaattatagaggaaatacagagagaacctcttccacttttacttttcgtccaaataaaatgcatggtgtaccagaagttgaagatcgggttgaggattggggctagctcgatgacactaaggccccaacatcgcgggacctgctgtggcgcggattcttaggaacgctgttctagccggccccctctccaggggtcgccgtggccggcattatttcctagttcttcttgtaaccctgaggtgccagcgcggggagtgaggaggggtcagggggctaaggatgcaacctctgacgttctgcgccttcctaggagagtcttacatgtgttgagatttcacaagcaatgcgagttgtaaaataccagctctacaagaagctaggctctgtgacggcatagttttcagtagctttatcacaatattcacaatggagaattatatgacatggtagcagaaataggcccttttatgtgttgcttctattttacctcaaattgtagatatagggtaatcaataaaatccatccatgcctttcacacactaa

SEQ ID NO: 456999 - DNA, 4030 bp, Homo sapiens
atagttcttggcaatttgaaagttatttgagaaggggaaatttataatgacaattcaaatgaagcaaactaaaaaataatgaagaaagacagaggaaaaagcagtattcacttgaacacatcccaaacaaagaaaatttcaaatgtaacaaggaaaaagcctgctaaagctcacaatacagaaataactattgatactcaaaatagctttaaagccctgctcaccttttgaatgttgggaattgaccaggaggtgactgtaactgtaagatggttcttccagtaatgaccattttctttttcaagatgatgattattctccaccgtctaagagaccaaaggccaatgagctaccgcagccaccagtcccggaacccgccaatgctgggaagcggaaagtgagggagttcaacttcgagaaatggaatgctcgcatcactgatctacgtaaacaagttgaagaattgtttgaaaggaaatatgctcaagccataaaagccaaaggtccggtgacgatcccgtaccctcttttccagtctcatgttgaagatctttatgtagaaggacttcctgaaggaattccttttagaaggccatctacttacggaattcctcgcctggagaggatattacttgcaaaggaaaggattcgttttgtgattaagaaacatgagcttctgaattcaacacgtgaagatttacagcttgataagccagcttcaggagtaaaggaagaatggtatgccagaatcactaaattaagaaagatggtggatcagcttttctgcaaaaaatttgcggaagccttggggagcactgaagccaaggctgtaccgtaccaaaaatttgaggcacacccgaatgatctgtacgtggaaggactgccagaaaacattcctttccgaagtccctcatggtatggaatcccaaggctggaaaaaatcattcaagtgggcaatcgaattaaatttgttattaaaagaccagaacttctgactcacagtaccactgaagttactcagccaagaacgaatacaccagtcaaagaagattggaatgtcagaattaccaagctacggaagcaagtggaagagatttttaatttgaaatttgctcaagctcttggactcaccgaggcagtaaaagtaccatatcctgtgtttgaatcaaacccggagttcttgtatgtggaaggcttgccagaggggattcccttccgaagccctacctggtttggaattccacgacttgaaaggatcgtccgcgggagtaataaaatcaagttcgttgttaaaaaacctgaactagttatttcctacttgcctcctgggatggctagtaaaataaacactaaagctttgcagtcccccaaaagaccacgaagtcctgggagtaattcaaaggttcctgaaattgaggtcaccgtggaaggccctaataacaacaatcctcaaacctcagctgttcgaaccccgacccagactaacggttctaacgttcccttcaagccacgagggagagagttttcctttgaggcctggaatgccaaaatcacggacctaaaacagaaagttgaaaatctcttcaatgagaaatgtggggaagctcttggccttaaacaagctgtgaaggtgccgttcgcgttatttgagtctttcccggaagacttttatgtggaaggcttacctgagggtgtgccattccgaagaccatcgacttttggcattccgaggctggagaagatactcagaaacaaagccaaaattaagttcatcattaaaaagcccgaaatgtttgagacggcgattaaggagagcacctcctctaagagccctcccagaaaaataaattcatcacccaatgttaatactactgcatcaggtgttgaagaccttaacatcattcaggtgacaattccagatgatgataatgaaagactctcgaaagttgaaaaagctagacagctaagagaacaagtgaatgacctctttagtcggaaatttggtgaagctattggtatgggttttcctgtgaaagttccctacaggaaaatcacaattaaccctggctgtgtggtggttgatggcatgcccccgggggtgtccttcaaagcccccagctacctggaaatcagctccatgagaaggatcttagactctgccgagtttatcaaattcacggtcattaggtaagtgagagtttcctgcttagtcacaggagcgaatctggagctcatgaggctgactcttctaaaatgcagccacaggtagtcatcgaatccggcttcctatgctgtgcaatcaacaaatcaaaataacttgtgtcatcattagaatgtcagatgtgcttctacgaactaagctgactcttttaattctttggcaaagggttggcaaactaggactgtttgccaaattcaggctgcctcctatttttagagtcttcctgaaacacagctacacccgtattatccatggctgctttcctgtcacagtgagtaagtagctgggactgagaaggcatggcctccaaagtctaaaatatttactctctagcactttgtagaaaaaccttagctaggcacaatgtctaacgcctgtaatcccagcattttgggaggccaaggcaggcagatcacctgaggtcaggagttccagaccagcctggccaacatggtgaaatcccatctctacaaaaataaaacagttagctgggcatgatggcgggtgcctgtaatcccagctactcgggaggctgaggcaggatagtcgcttgaacccaggaggtggaggttgcaatgagccaagatcatgccactgcactccagcctggacgacagagtgagactccatcacaagaaaaaaagaactttgtcaacctctgtcttagggcgccttgtcacaggcttcgggtcagacggattcaaccttgcatcagccatttgttagccaggtcactctgttctttgtctgtaaatgagattgatcgttgttcccactgagagtgtcagctccttcccgtagagcaggcatgatgattgtactcacctctgacaccattgtgagtgccacattccttcccacgtccttgtcactgtaagagatgcccacctgagcaccaaccccaggttatcttcccctttgtcttccagccccccagaaacagctacgactcaacctacccaatcatttcatcatcagattgccactgtctctagttcaggtctcttgggactggcactcagaaatctcataataaatcctcttgaggcttctcatacactcgtcttcttccaatcttctttccctcaaaatctcatattttggttccacttcacccaccgtcattctccatatcactcccaggagttaggcaaaaagccccttccgttcttccgtatgttaaacttagaatcactctgttccctgctctgcgtttctattttttgtttttcctccatttactagtagcttaacactttctaacagtgttcttattattgatacgtatctatctcttccataagcttataaggtcacggataatacttctcattgtagtacgtaaatgacgtgggctagatatgagttgaataaacagttatacctgtaaattcttacagagtgaaaataaattgttatactttacaatttgtttctctctttagaccatttccaggacttgtgattaataaccgtgagtattttgtgaagtgttttgtttttgttttttcctggggtctgacgtgtgtgcgtgtgagtgtgtatacatgcttaacgtatatcacgttacttcacctatgtcagtaaccaggccaaatacttgttttagccctcagtaaaaacaccaggcacttcctagttgtaaaattattcaagcttcttaacttcctatcctcgatgcacttaatcataaaatggtaataatagcaccgattttgggggagtcgttccagtagatggaaagcatctggaacaggtgtcagcaagctcctgccgactgtcatctcagcggggatcctaaagagtcaa

SEQ ID NO: 457000 - DNA, 2314 bp, Homo sapiens
atagttcttggcaatttgaaagttatttgagaaggggaaatttataatgacaattcaaatgaagcaaactaaaaaataatgaagaaagacagaggaaaaagcagtattcacttgaacacatcccaaacaaagaaaatttcaaatgtaacaaggaaaaagcctgctaaagctcacaatacagaaataactattgatactcaaaatagctttaaagccctgctcaccttttgaatgttgggaattgaccaggaggtgactgtaactgtaagatggttcttccagtaatgaccattttctttttcaagatgatgattattctccaccgtctaagagaccaaaggccaatgagctaccgcagccaccagtcccggaacccgccaatgctgggaagcggaaagtgagggagttcaacttcgagaaatggaatgctcgcatcactgatctacgtaaacaagttgaagaattgtttgaaaggaaatatgctcaagccataaaagccaaaggtccggtgacgatcccgtaccctcttttccagtctcatgttgaagatctttatgtagaaggacttcctgaaggaattccttttagaaggccatctacttacggaattcctcgcctggagaggatattacttgcaaaggaaaggattcgttttgtgattaagaaacatgagcttctgaattcaacacgtgaagatttacagcttgataagccagcttcaggagtaaaggaagaatggtatgccagaatcactaaattaagaaagatggtggatcagcttttctgcaaaaaatttgcggaagccttggggagcactgaagccaaggctgtaccgtaccaaaaatttgaggcacacccgaatgatctgtacgtggaaggactgccagaaaacattcctttccgaagtccctcatggtatggaatcccaaggctggaaaaaatcattcaagtgggcaatcgaattaaatttgttattaaaagaccagaacttctgactcacagtaccactgaagttactcagccaagaacgaatacaccagtcaaagaagattggaatgtcagaattaccaagctacggaagcaagtggaagagatttttaatttgaaatttgctcaagctcttggactcaccgaggcagtaaaagtaccatatcctgtgtttgaatcaaacccggagttcttgtatgtggaaggcttgccagaggggattcccttccgaagccctacctggtttggaattccacgacttgaaaggatcgtccgcgggagtaataaaatcaagttcgttgttaaaaaacctgaactagttatttcctacttgcctcctgggatggctagtaaaataaacactaaagctttgcagtcccccaaaagaccacgaagtcctgggagtaattcaaaggttcctgaaattgaggtcaccgtggaaggccctaataacaacaatcctcaaacctcagctgttcgaaccccgacccagactaacggttctaacgttcccttcaagccacgagggagagagttttcctttgaggcctggaatgccaaaatcacggacctaaaacagaaagttgaaaatctcttcaatgagaaatgtggggaagctcttggccttaaacaagctgtgaaggtgccgttcgcgttatttgagtctttcccggaagacttttatgtggaaggcttacctgagggtgtgccattccgaagaccatcgacttttggcattccgaggctggagaagatactcagaaacaaagccaaaattaagttcatcattaaaaagcccgaaatgtttgagacggcgattaaggagagcacctcctctaagagccctcccagaaaaataaattcatcacccaatgttaatactactgcatcaggtgttgaagaccttaacatcattcaggtgacaattccagatgatgataatgaaagactctcgaaagttgaaaaagctagacagctaagagaacaagtgaatgacctctttagtcggaaatttggtgaagctattggtatgggttttcctgtgaaagttccctacaggaaaatcacaattaaccctggctgtgtggtggttgatggcatgcccccgggggtgtccttcaaagcccccagctacctggaaatcagctccatgagaaggatcttagactctgccgagtttatcaaattcacggtcattagaccatttccaggacttgtgattaataaccagctggttgatcagagtgagtcagaaggccccgtgatacagaatcagctgaaccaagccagttgaaagttccgttgaagccctcggggagtcctctag

SEQ ID NO: 457001 - DNA, 2239 bp, Homo sapiens
atagttcttggcaatttgaaagttatttgagaaggggaaatttataatgacaattcaaatgaagcaaactaaaaaataatgaagaaagacagaggaaaaagcagtattcacttgaacacatcccaaacaaagaaaatttcaaatgtaacaaggaaaaagcctgctaaagctcacaatacagaaataactattgatactcaaaatagctttaaagccctgctcaccttttgaatgttgggaattgaccaggaggtgactgtaactgtaagatggttcttccagtaatgaccattttctttttcaagatgatgattattctccaccgtctaagagaccaaaggccaatgagctaccgcagccaccagtcccggaacccgccaatgctgggaagcggaaagtgagggagttcaacttcgagaaatggaatgctcgcatcactgatctacgtaaacaagttgaagaattgtttgaaaggaaatatgctcaagccataaaagccaaaggtccggtgacgatcccgtaccctcttttccagtctcatgttgaagatctttatgtagaaggacttcctgaaggaattccttttagaaggccatctacttacggaattcctcgcctggagaggatattacttgcaaaggaaaggattcgttttgtgattaagaaacatgagcttctgaattcaacacgtgaagatttacagcttgataagccagcttcaggagtaaaggaagaatggtatgccagaatcactaaattaagaaagatggtggatcagcttttctgcaaaaaatttgcggaagccttggggagcactgaagccaaggctgtaccgtaccaaaaatttgaggcacacccgaatgatctgtacgtggaaggactgccagaaaacattcctttccgaagtccctcatggtatggaatcccaaggctggaaaaaatcattcaagtgggcaatcgaattaaatttgttattaaaagaccagaacttctgactcacagtaccactgaagttactcagccaagaacgaatacaccagtcaaagaagattggaatgtcagaattaccaagctacggaagcaagtggaagagatttttaatttgaaatttgctcaagctcttggactcaccgaggcagtaaaagtaccatatcctgtgtttgaatcaaacccggagttcttgtatgtggaaggcttgccagaggggattcccttccgaagccctacctggtttggaattccacgacttgaaaggatcgtccgcgggagtaataaaatcaagttcgttgttaaaaaacctgaactagttatttcctacttgcctcctgggatggctagtaaaataaacactaaagctttgcagtcccccaaaagaccacgaagtcctgggagtaattcaaaggttcctgaaattgaggtcaccgtggaaggccctaataacaacaatcctcaaacctcagctgttcgaaccccgacccagactaacggttctaacgttcccttcaagccacgagggagagagttttcctttgaggcctggaatgccaaaatcacggacctaaaacagaaagttgaaaatctcttcaatgagaaatgtggggaagctcttggccttaaacaagctgtgaaggtgccgttcgcgttatttgagtctttcccggaagacttttatgtggaaggcttacctgagggtgtgccattccgaagaccatcgacttttggcattccgaggctggagaagatactcagaaacaaagccaaaattaagttcatcattaaaaagtaaggaaactggatgaagtgggattagcatgagttgattgtgtttgacactgggagatgggtatgtgggtttgtgtttgtggcagggctgaattagctctggagtcagaaaaactgctttttaagctgcactcttgtatatgtttaaaacttctggccaggtgcgatctcagctcacaatcactagtgaattcccagcactttgggaggccaaagcaggtggattacctgaggtcagaagttcaagaccaacctggccaacatgatgaaacccatctctactaaaagtacaaaaattagctgggcgtggtggcacgtgcctgtaatcccagctacttgggagactgaggcaggagaatcacttgaacccagcaggcagaggttgcaatgagccaagatcgtgccactgcactccagcctgggcagcaagagcaaaactccatctcaaaaacaaaaa

SEQ ID NO: 457002 - DNA, 1124 bp, Homo sapiens
  misc_feature (14)..(14): n is a, c, g, or t
  misc_feature (18)..(18): n is a, c, g, or t
ctgggattacaggngtgngccacacctggctaatttttgtatttttagtagagacaggagttcgagaccaggctggccaacatggtgaaaccccatctctactaaaaatacaaaaattagctgggtgtggtggcgcgcacctgtagtcccagctactcaggaggctgaggtagaagaatagctggaacccaggaggcagagattgcagtcagccgagattgcaccactgcactccagcctgggagacagagcaagactgactcaaaagaaaaaaaatgacagaagcctgattatcagactgcccggaggagacaggctccagcagatagatgccagccaggcccagctgccacgatttgtcccaggtgaccaaaggcacgcagctccagcatgaatcgttctaacccaacagtgacaagaactgctgggccttaaccgtcatggaagactggggccgcttccaagtcacagacaggagacggggacaggaaagaactcattccacccaatcggacacctaataattgagtgtctacagcagcaatcaagtgacaagtgaggccctacctgacccagaaggtgcctgccggctaaacattctgcccccaccagaaactccagggggtccgcccgttatgccgtggcccacccacgcccctttggatcaccagcagtcacagacaacaggcaggcgaaactgaagaccccaactcagccccagcggaccctccagagcaaaagaggcccccggcgaggccacctgtcggcaggcatgccgaggtcaaacagccggggccaccgttcccagctgggccacgacctgcaccgtccacagatgggctttgagatggatttgtatcagggtggggggtgtggtttggccaaaatgcaatggaccccgacccctcctcgtaaaaggatgttgggtttccctctggtgacacatgggatgcgtcataaaccctcccccaaagtcctggtcagcagcccatccttccaacgatgagttttgcggtttttcagaacagaaatgatcactacgattgacgacggtcgtgatgttaagacgtcgtctccatgagctttggggggacttttatgtggaataaagaaactatcactga

SEQ ID NO: 457003 - DNA, 5043 bp, Homo sapiens
ggaagccgagcctctgccagccctgagctgggaagaagcagctacctcggaggcagggcgcgcaggcgggcggcgatgagagggggcgcagccgcagccccgcgctggggagcccaccgctaaccctgcaccccacccacccctgcacaaaagagctggcgggcgctggccacgtcgccctgggtgaccttcctcggatgcagaatccgcccctgcgagcatcctcttcctcctaggctctgaaggcccggggagcgtgagcgatgcccagctgcacccgggcagggctcgcctttgtttgccagtaaggaggagaggctgtctcagctgcagaggggtcatccctgcttcaagccagtgcctcttcccagctcccatggggaccaccgaagccacgctccggatggaaaacgtggacgtgaaggaggaatggcaggacgaagatcttcccaggccactcccagaagagacgggggtggaactgcttggcagcccggtggaagacacatcctctcctcccaacacgctaaatttcaacggagcgcatcgtaagaggaagacgctggtggccccagagatcaacatttctctggatcagagtgaggggtccctgctgtccgatgacttcttggatacccctgatgacctggatattaacgtggatgacatcgagacccccgatgagaccgactcgctggagttcctggggaatggcaacgaactggagtgggaagacgacacccccgtggccaccgccaagaacatgcccggggacagcgcggatctatttggggacggcacgacggaggacggcagcgccgccaacgggcgcctgtggcggacagtgatcatcggggagcaagagcaccgtatagacctgcacatgatccggccttacatgaaagtggtcacccacggagggtactacggcgaaggcctcaacgccatcatcgtcttcgcagcctgcttccttccagacagcagcctccccgactaccactacatcatggagaacctcttcctgtacgtcatcagcagcttagagctcctggtggctgaggactacatgatcgtgtacctgaacggtgccacgccccggcggaggatgcctggaatcggctggctgaagaagtgctaccagatgatcgaccggaggttgcggaaaaacctgaagtccttgatcatcgtccacccctcgtggttcattcggactgtgctggccatctctcgccctttcatcagcgtcaagttcatcaacaagatccagtacgtgcacagcttggaagacctggagcaactcatccctatggaacacgtccagatcccagactgcgtcctgcaatacgaagaggaaagactgaaggccaggagggagagcgcgaggccccagccggagtttgtgctgcccaggtctgaagagaagccagaggtggcaccagtggaaaacaggtctgctctggtctcagaagatcaggaaacaagcctccagcccctgcacagatcaagctgatgccacgtggcccaagttccaaccctaagtcacgttcatgtcctgaggcgacgtgagcataacaaaggacatggaagaagattccagatgccagaaaacctctgtcagacgcccactggccccagatctcatcctgcctcatcctgagtcccaatcttccaagggtgccagcccctccgttcatctctgaaacccagcatccttttcagctgcttgaaaacattgtattttttttttttaacgatgcagtatttgtgcgttccagaaaagggcccagctctgagcccctcacccttccacactcacgaactctcagccgaggaaggcaagaagcgcagggggtggcccgcgtggcgtcggtggcctccgctcctgctcgcagcccctgtggtcagagctggatacaagattcaagacccttctcttgcttgtcacccgctccaggttggagccacagacacccaccgccaccccggctgggtctgcgtcctttcctgtgcctttccctccagaatgcggcctcagacctagaagctcaacccccctatgagggccacgtcctggggtagctcctgacctccgaccttatgtccaaatttcacacccatggtttttcatttgacccgcccccttctcgctcataatgacacccagctcctttgagaggatcagagcccattgcacaagaagagccgctgccaaccatccttgtcctccgattgcaaaatgacaccccagtaatctagaacattctcaagcccctttaactcagatgtcaagccaccgggcaaaccccgtcaatacctcccaccaaggaatgagatatgtggacctcactgctcccccaacccagcgtcaggctgggacacgccaacgctgttccgggttggaacagcagaggctcagaaactggctctgaaataggcagacctagcaagaggaagatacagggtatcgggcgtttgagtgtttcagaagtcattcgggaagataaatccagtgcgctggccgcagccacctgcattcaaagcttggaccagcgggttcttgttcgggaggcaaatttccctaggaaaaagaagacagacttttctaatgtggtccaaatgcggatcactggtcagatggactctagaagcactgagctccctgtctctggaagtatttaagaaaaggctgggccaggcacgatggctcacgcctgtaatcccagactttgggaggccgaggcaggcggatcacctgaggtgaggagtttgagaacagcctggccaacatggtgaaacctcatctctactaaaaatacaaaaattagccaggcgtggtggcaggtgcctgtaatcccagctacttgggaggctgaggcatgagaatcacttaaacctgagaggcagaggttacagtgagccaagatcgtgccactgcattccagcctgggcgacagagcaagactctgtctcaaaaaaaataaaaaataatcagggcacagtggctcatgcctgtaatcccagcactctgggaggctgaggtgggtggatcacctgaggtcaggagttcaagaccagcctggtgaacatggcgaaaccccgtctctaataaaaatacaaaaattagccgggcatggtggtgcatgcctgtaatcccagctactcgggaggctgaggcaggagaactgcttgaacccaggaggcagaggttgcagtgatccaagatcatgccactgcactccagcctgggcaacaagagcaaaactccgtctcaaaataaaaagaaaagaaaagaatggacagtgtttgcagagagttgctcacgagtttccctctaatcctaaatgtcttcatgtctatcagtctgagcagacggtgagtagggcgggcacattctccaggcccttcttcctagctctgtggttgacctctcagcaagtgctatccaggctgggccaaccagacccacaattaactgagcctcagtgaaagcgtccagtgcatcttgacctgagacagcaaggaattgcatttggggttattccaacgatgatggcagggaactggtggtatttagtgctgaggggcagtgatacagaaagatttgccctgtgggacagggtcctgcgcgagtcccatccccaaaagccagcagctcctgccatgaggaagacggggtttctgagcaggcttatgcctgcaggttcctgtggagccaccggctgtgacgggacacctctgggtctcagcattgccctggggaggctgggacatttagggacatggtagggttttaacatttgtttcccaaatgtcaaatcccgggcacaggggcaagaccctgtcccgaattcccaccccagtgaatggtgtcgctgccaaagccaacacaagatgacaaaagtggctgggtacggtggctcacgcctataatcccagcactttgggagaccgagacaggtggatcacctgaggtcaggagttcgagaccaggctggccaacatggtgaaaccccatctctactaaaaatacaaaaattagctgggtgtggtggcgcgcacctgtagtcccagctactcaggaggctgaggtagaagaatagctggaacccaggaggcagagattgcagtcagccgagattgcaccactgcactccagcctgggagacagagcaagactgactcaaaagaaaaaaaatgacagaagcctgattatcagactgcccggaggagacaggctccagcagatagatgccagccaggcccagctgccacgatttgtcccaggtgaccaaaggcacgcagctccagcatgaatcgttctaacccaacagtgacaagaactgctgggccttaaccgtcatggaagactggggccgcttccaagtcacagacaggagacggggacaggaaagaactcattccacccaatcggacacctaataattgagtgtctacagcagcaatcaagtgacaagtgaggccctacctgacccagaaggtgcctgccggctaaacattctgcccccaccagaaactccagggggtccgcccgttatgccgtggcccacccacgcccctttggatcaccagcagtcacagacaacaggcaggcgaaactgaagaccccaactcagccccagcggaccctccagagcaaaagaggcccccggcgaggccacctgtcggcaggcatgccgaggtcaaacagccggggccaccgttcccagctgggccacgacctgcaccgtccacagatgggctttgagatggatttgtatcagggtggggggtgtggtttggccaaaatgcaatggaccccgacccctcctcgtaaaaggatgttgggtttccctctggtgacacatgggatgcgtcataaaccctcccccaaagtcctggtcagcagcccatccttccaacgatgagttttgcggtttttcagaacagaaatgatcactacgattgacgacggtcgtgatgttaagacgtcgtctccatgagctttggggggacttttatgtggaataaagaaactatcactga

SEQ ID NO: 457004 - DNA, 5119 bp, Homo sapiens
ggaagccgagcctctgccagccctgagctgggaagaagcagctacctcggaggcagggcgcgcaggcgggcggcgatgagagggggcgcagccgcagccccgcgctggggagcccaccgctaaccctgcaccccacccacccctgcacaaaagagctggcgggcgctggccacgtcgccctgggtgaccttcctcggatgcagaatccgcccctgcgagcatcctcttcctcctaggctctgaaggcccggggagcgtgagcgatgcccagctgcacccgggcagggctcgcctttgtttgccagtaaggaggagaggctgtctcagctgcagaggggtcatccctgcttcaagccagtgcctcttcccagctcccatggggaccaccgaagccacgctccggatggaaaacgtggacgtgaaggaggaatggcaggacgaagatcttcccaggccactcccagaagagacgggggtggaactgcttggcagcccggtggaagacacatcctctcctcccaacacgctaaatttcaacggagcgcatcgtaagaggaagacgctggtggccccagagatcaacatttctctggatcagagtgaggggtccctgctgtccgatgacttcttggatacccctgatgacctggatattaacgtggatgacatcgagacccccgatgagaccgactcgctggagttcctggggaatggcaacgaactggagtgggaagacgacacccccgtggccaccgccaagaacatgcccggggacagcgcggatctatttggggacggcacgacggaggacggcagcgccgccaacgggcgcctgtggcggacagtgatcatcggggagcaagagcaccgtatagacctgcacatgatccggccttacatgaaagtggtcacccacggagggtactacggcgaaggcctcaacgccatcatcgtcttcgcagcctgcttccttccagacagcagcctccccgactaccactacatcatggagaacctcttcctgtacgtcatcagcagcttagagctcctggtggctgaggactacatgatcgtgtacctgaacggtgccacgccccggcggaggatgcctggaatcggctggctgaagaagtgctaccagatgatcgaccggaggttgcggaaaaacctgaagtccttgatcatcgtccacccctcgtggttcattcggactgtgctggccatctctcgccctttcatcagcgtcaagttcatcaacaagatccagtacgtgcacagcttggaagacctggagcaactcatccctatggaacacgtccagatcccagactgcgtcctgcaatacgaagaggaaagactgaaggccaggagggagagcgcgaggccccagccggagtttgtgctgcccaggtctgaagagaagccagaggtggcaccagtggaaaacaggtctgctctggtctcagaagatcaggaaacaagcatgtcctgaggcgacgtgagcataacaaaggacatggaagaagattccagatgccagaaaacctctgtcagacgcccactggccccagatctcatcctgcctcatcctgagtcccaatcttccaagggtgccagcccctccgttcatctctgaaacccagcatccttttcagctgcttgaaaacattgtattttttttttttaacgatgcagtatttgtgcgttccagaaaagggcccagctctgagcccctcacccttccacactcacgaactctcagccgaggaaggcaagaagcgcagggggtggcccgcgtggcgtcggtggcctccgctcctgctcgcagcccctgtggtcagagctggatacaagattcaagacccttctcttgcttgtcacccgctccaggttggagccacagacacccaccgccaccccggctgggtctgcgtcctttcctgtgcctttccctccagaatgcggcctcagacctagaagctcaacccccctatgagggccacgtcctggggtagctcctgacctccgaccttatgtccaaatttcacacccatggtttttcatttgacccgcccccttctcgctcataatgacacccagctcctttgagaggatcagagcccattgcacaagaagagccgctgccaaccatccttgtcctccgattgcaaaatgacaccccagtaatctagaacattctcaagcccctttaactcagatgtcaagccaccgggcaaaccccgtcaatacctcccaccaaggaatgagatatgtggacctcactgctcccccaacccagcgtcaggctgggacacgccaacgctgttccgggttggaacagcagaggctcagaaactggctctgaaataggcagacctagcaagaggaagatacagggtatcgggcgtttgagtgtttcagaagtcattcgggaagataaatccagtgcgctggccgcagccacctgcattcaaagcttggaccagcgggttcttgttcgggaggcaaatttccctaggaaaaagaagacagacttttctaatgtggtccaaatgcggatcactggtcagatggactctagaagcactgagctccctgtctctggaagtatttaagaaaaggctgggccaggcacgatggctcacgcctgtaatcccagactttgggaggccgaggcaggcggatcacctgaggtgaggagtttgagaacagcctggccaacatggtgaaacctcatctctactaaaaatacaaaaattagccaggcgtggtggcaggtgcctgtaatcccagctacttgggaggctgaggcatgagaatcacttaaacctgagaggcagaggttacagtgagccaagatcgtgccactgcattccagcctgggcgacagagcaagactctgtctcaaaaaaaataaaaaataatcagggcacagtggctcatgcctgtaatcccagcactctgggaggctgaggtgggtggatcacctgaggtcaggagttcaagaccagcctggtgaacatggcgaaaccccgtctctaataaaaatacaaaaattagccgggcatggtggtgcatgcctgtaatcccagctactcgggaggctgaggcaggagaactgcttgaacccaggaggcagaggttgcagtgatccaagatcatgccactgcactccagcctgggcaacaagagcaaaactccgtctcaaaataaaaagaaaagaaaagaatggacagtgtttgcagagagttgctcacgagtttccctctaatcctaaatgtcttcatgtctatcagtctgagcagacggtgagtagggcgggcacattctccaggcccttcttcctagctctgtggttgacctctcagcaagtgctatccaggctgggccaaccagacccacaattaactgagcctcagtgaaagcgtccagtgcatcttgacctgagacagcaaggaattgcatttggggttattccaacgatgatggcagggaactggtggtatttagtgctgaggggcagtgatacagaaagatttgccctgtgggacagggtcctgcgcgagtcccatccccaaaagccagcagctcctgccatgaggaagacggggtttctgagcaggcttatgcctgcaggttcctgtggagccaccggctgtgacgggacacctctgggtctcagcattgccctggggaggctgggacatttagggacatggtagggttttaacatttgtttcccaaatgtcaaatcccgggcacaggggcaagaccctgtcccgaattcccaccccagtgaatggtgtcgctgccaaagccaacacaagatgacaaaagtggctgggtacggtggctcacgcctataatcccagcactttgggagaccgagacaggtggatcacctgaggtcaggagttcgagaccaggctggccaacatggtgaaaccccatctctactaaaaatacaaaaattagctgggtgtggtggcgcgcacctgtagtcccagctactcaggaggctgaggtagaagaatagctggaacccaggaggcagagattgcagtcagccgagattgcaccactgcactccagcctgggagacagagcaagactgactcaaaagaaaaaaaatgacagaagcctgattatcagactgcccggaggagacaggctccagcagatagatgccagccaggcccagctgccacgatttgtcccaggtgaccaaaggcacgcagctccagcatgaatcgttctaacccaacagtgacaagaactgctgggccttaaccgtcatggaagactggggccgcttccaagtcacagacaggagacggggacaggaaagaactcattccacccaatcggacacctaataattgagtgtctacagcagcaatcaagtgacaagtgaggccctacctgacccagaaggtgcctgccggctaaacattctgcccccaccagaaactccagggggtccgcccgttatgccgtggcccacccacgcccctttggatcaccagcagtcacagacaacaggcaggcgaaactgaagaccccaactcagccccagcggaccctccagagcaaaagaggcccccggcgaggccacctgtcggcaggcatgccgaggtcaaacagccggggccaccgttcccagctgggccacgacctgcaccgtccacagatgggctttgagatggatttgtatcagggtggggggtgtggtttggccaaaatgcaatggaccccgacccctcctcgtaaaaggatgttgggtttccctctggtgacacatgggatgcgtcataaaccctcccccaaagtcctggtcagcagcccatccttccaacgatgagttttgcggtttttcagaacagaaatgatcactacgattgacgacggtcgtgatgttaagacgtcgtctccatgagctttggggggacttttatgtggaataaagaaactatcactgaaaaaaaaaaaagggggcgtctaagttccctcggggccagttaccgaccagttctgtcaaggggcctatgggagcgataaagcagcacgcgcgtacagcgacggaacgccggattggacgcccctgggggccagacacccg

SEQ ID NO: 457005 - DNA, 4443 bp, Homo sapiens
ggaagccgagcctctgccagccctgagctgggaagaagcagctacctcggaggcagggcgcgcaggcgggcggcgatgagagggggcgcagccgcagccccgcgctggggagcccaccgctaaccctgcaccccacccacccctgcacaaaagagctggcgggcgctggccacgtcgccctgggtgaccttcctcggatgcagaatccgcccctgcgagcatcctcttcctcctaggctctgaaggcccggggagcgtgagcgatgcccagctgcacccgggcagggctcgcctttgtttgccagtaaggaggagaggctgtctcagctgcagaggggtcatccctgcttcaagccagtgcctcttcccagctcccatggggaccaccgaagccacgctccggatggaaaacgtggacgtgaaggaggaatggcaggacgaagatcttcccaggccactcccagaagagacgggggtggaactgcttggcagcccggtggaagacacatcctctcctcccaacacgctaaatttcaacggagcgcatcgtaagaggaagacgctggtggccccagagatcaacatttctctggatcagagtgaggggtccctgctgtccgatgacttcttggatacccctgatgacctggatattaacgtggatgacatcgagacccccgatgagaccgactcgctggagttcctggggaatggcaacgaactggagtgggaagacgacacccccgtggccaccgccaagaacatgcccggggacagcgcggatctatttggggacggcacgacggaggacggcagcgccgccaacgggcgcctgtggcggacagtgatcatcggggagcaagagcaccgtatagacctgcacatgatccggccttacatgaaagtggtcacccacggagggtactacggcgaaggcctcaacgccatcatcgtcttcgcagcctgcttccttccagacagcagcctccccgactaccactacatcatggagaacctcttcctgtacgtcatcagcagcttagagctcctggtggctgaggactacatgatcgtgtacctgaacggtgccacgccccggcggaggatgcctggaatcggctggctgaagaagtgctaccagatgatcgaccggaggttgcggaaaaacctgaagtccttgatcatcgtccacccctcgtggttcattcggactgtgctggccatctctcgccctttcatcagcgtcaagttcatcaacaagatccagtacgtgcacagcttggaagacctggagcaactcatccctatggaacacgtccagatcccagactgcgtcctgcaatacgaagaggaaagactgaaggccaggagggagagcgcgaggccccagccggagtttgtgctgcccaggtctgaagagaagccagaggtggcaccagtggaaaacaggtctgctctggtctcagaagatcaggaaacaagcatgtcctgaggcgacgtgagcataacaaaggacatggaagaagattccagatgccagaaaacctctgtcagacgcccactggccccagatctcatcctgcctcatcctgagtcccaatcttccaagggtgccagcccctccgttcatctctgaaacccagcatccttttcagctgcttgaaaacattgtattttttttttttaacgatgcagtatttgtgcgttccagaaaagggcccagctctgagcccctcacccttccacactcacgaactctcagccgaggaaggcaagaagcgcagggggtggcccgcgtggcgtcggtggcctccgctcctgctcgcagcccctgtggtcagagctggatacaagattcaagacccttctcttgcttgtcacccgctccaggttggagccacagacacccaccgccaccccggctgggtctgcgtcctttcctgtgcctttccctccagaatgcggcctcagacctagaagctcaacccccctatgagggccacgtcctggggtagctcctgacctccgaccttatgtccaaatttcacacccatggtttttcatttgacccgcccccttctcgctcataatgacacccagctcctttgagaggatcagagcccattgcacaagaagagccgctgccaaccatccttgtcctccgattgcaaaatgacaccccagtaatctagaacattctcaagcccctttaactcagatgtcaagccaccgggcaaaccccgtcaatacctcccaccaaggaatgagatatgtggacctcactgctcccccaacccagcgtcaggctgggacacgccaacgctgttccgggttggaacagcagaggctcagaaactggctctgaaataggcagacctagcaagaggaagatacagggtatcgggcgtttgagtgtttcagaagtcattcgggaagataaatccagtgcgctggccgcagccacctgcattcaaagcttggaccagcgggttcttgttcgggaggcaaatttccctaggaaaaagaagacagacttttctaatgtggtccaaatgcggatcactggtcagatggactctagaagcactgagctccctgtctctggaagtatttaagaaaagatcatgccactgcactccagcctgggcaacaagagcaaaactccgtctcaaaataaaaagaaaagaaaagaatggacagtgtttgcagagagttgctcacgagtttccctctaatcctaaatgtcttcatgtctatcagtctgagcagacggtgagtagggcgggcacattctccaggcccttcttcctagctctgtggttgacctctcagcaagtgctatccaggctgggccaaccagacccacaattaactgagcctcagtgaaagcgtccagtgcatcttgacctgagacagcaaggaattgcatttggggttattccaacgatgatggcagggaactggtggtatttagtgctgaggggcagtgatacagaaagatttgccctgtgggacagggtcctgcgcgagtcccatccccaaaagccagcagctcctgccatgaggaagacggggtttctgagcaggcttatgcctgcaggttcctgtggagccaccggctgtgacgggacacctctgggtctcagcattgccctggggaggctgggacatttagggacatggtagggttttaacatttgtttcccaaatgtcaaatcccgggcacaggggcaagaccctgtcccgaattcccaccccagtgaatggtgtcgctgccaaagccaacacaagatgacaaaagtggctgggtacggtggctcacgcctataatcccagcactttgggagaccgagacaggtggatcacctgaggtcaggagttcgagaccaggctggccaacatggtgaaaccccatctctactaaaaatacaaaaattagctgggtgtggtggcgcgcacctgtagtcccagctactcaggaggctgaggtagaagaatagctggaacccaggaggcagagattgcagtcagccgagattgcaccactgcactccagcctgggagacagagcaagactgactcaaaagaaaaaaaatgacagaagcctgattatcagactgcccggaggagacaggctccagcagatagatgccagccaggcccagctgccacgatttgtcccaggtgaccaaaggcacgcagctccagcatgaatcgttctaacccaacagtgacaagaactgctgggccttaaccgtcatggaagactggggccgcttccaagtcacagacaggagacggggacaggaaagaactcattccacccaatcggacacctaataattgagtgtctacagcagcaatcaagtgacaagtgaggccctacctgacccagaaggtgcctgccggctaaacattctgcccccaccagaaactccagggggtccgcccgttatgccgtggcccacccacgcccctttggatcaccagcagtcacagacaacaggcaggcgaaactgaagaccccaactcagccccagcggaccctccagagcaaaagaggcccccggcgaggccacctgtcggcaggcatgccgaggtcaaacagccggggccaccgttcccagctgggccacgacctgcaccgtccacagatgggctttgagatggatttgtatcagggtggggggtgtggtttggccaaaatgcaatggaccccgacccctcctcgtaaaaggatgttgggtttccctctggtgacacatgggatgcgtcataaaccctcccccaaagtcctggtcagcagcccatccttccaacgatgagttttgcggtttttcagaacagaaatgatcactacgattgacgacggtcgtgatgttaagacgtcgtctccatgagctttggggggacttttatgtggaataaagaaactatcactga

SEQ ID NO: 457006 - DNA, 3716 bp, Homo sapiens
ggaagccgagcctctgccagccctgagctgggaagaagcagctacctcggaggcagggcgcgcaggcgggcggcgatgagagggggcgcagccgcagccccgcgctggggagcccaccgctaaccctgcaccccacccacccctgcacaaaagagctggcgggcgctggccacgtcgccctgggtgaccttcctcggatgcagaatccgcccctgcgagcatcctcttcctcctaggctctgaaggcccggggagcgtgagcgatgcccagctgcacccgggcagggctcgcctttgtttgccagtaaggaggagaggctgtctcagctgcagaggggtcatccctgcttcaagccagtgcctcttcccagctcccatggggaccaccgaagccacgctccggatggaaaacgtggacgtgaaggaggaatggcaggacgaagatcttcccaggccactcccagaagagacgggggtggaactgcttggcagcccggtggaagacacatcctctcctcccaacacgctaaatttcaacggagcgcatcgtaagaggaagacgctggtggccccagagatcaacatttctctggatcagagtgaggggtccctgctgtccgatgacttcttggatacccctgatgacctggatattaacgtggatgacatcgagacccccgatgagaccgactcgctggagttcctggggaatggcaacgaactggagtgggaagacgacacccccgtggccaccgccaagaacatgcccggggacagcgcggatctatttggggacggcacgacggaggacggcagcgccgccaacgggcgcctgtggcggacagtgatcatcggggagcaagagcaccgtatagacctgcacatgatccggccttacatgaaagtggtcacccacggagggtactacggcgaaggcctcaacgccatcatcgtcttcgcagcctgcttccttccagacagcagcctccccgactaccactacatcatggagaacctcttcctgtacgtcatcagcagcttagagctcctggtggctgaggactacatgatcgtgtacctgaacggtgccacgccccggcggaggatgcctggaatcggctggctgaagaagtgctaccagatgatcgaccggaggttgcggaaaaacctgaagtccttgatcatcgtccacccctcgtggttcattcggactgtgctggccatctctcgccctttcatcagcgtcaagttcatcaacaagatccagtacgtgcacagcttggaagacctggagcaactcatccctatggaacacgtccagatcccagactgcgtcctgcaatacgaagaggaaagactgaaggccaggagggagagcgcgaggccccagccggagtttgtgctgcccaggtctgaagagaagccagaggtggcaccagtggaaaacaggtctgctctggtctcagaagatcaggaaacaagcatgtcctgaggcgacgtgagcataacaaaggacatggaagaagattccagatgccagaaaacctctgtcagacgcccactggccccagatctcatcctgcctcatcctgagtcccaatcttccaagggtgccagcccctccgttcatctctgaaacccagcatccttttcagctgcttgaaaacattgtattttttttttttaacgatgcagtatttgtgcgttccagaaaagggcccagctctgagcccctcacccttccacactcacgaactctcagccgaggaaggcaagaagcgcagggggtggcccgcgtggcgtcggtggcctccgctcctgctcgcagcccctgtggtcagagctggatacaagattcaagacccttctcttgcttgtcacccgctccaggttggagccacagacacccaccgccaccccggctgggtctgcgtcctttcctgtgcctttccctccagaatgcggcctcagacctagaagctcaacccccctatgagggccacgtcctggggtagctcctgacctccgaccttatgtccaaatttcacacccatggtttttcatttgacccgcccccttctcgctcataatgacacccagctcctttgagaggatcagagcccattgcacaagaagagccgctgccaaccatccttgtcctccgattgcaaaatgacaccccagtaatctagaacattctcaagcccctttaactcagatgtcaagccaccgggcaaaccccgtcaatacctcccaccaaggaatgagatatgtggacctcactgctcccccaacccagcgtcaggctgggacacgccaacgctgttccgggttggaacagcagaggctcagaaactggctctgaaataggcagacctagcaagaggaagatacagggtatcgggcgtttgagtgtttcagaagtcattcgggaagataaatccagtgcgctggccgcagccacctgcattcaaagcttggaccagcgggttcttgttcgggaggcaaatttccctaggaaaaagaagacagacttttctaatgtggtccaaatgcggatcactggtcagatggactctagaagcactgagctccctgtctctggaagtatttaagaaaaggctgggccaggcacgatggctcacgcctgtaatcccagactttgggaggccgaggcaggcggatcacctgaggtgaggagtttgagaacagcctggccaacatggtgaaacctcatctctactaaaaatacaaaaattagccaggcgtggtggcaggtgcctgtaatcccagctacttgggaggctgaggcatgagaatcacttaaacctgagaggcagaggttacagtgagccaagatcgtgccactgcattccagcctgggcgacagagcaagactctgtctcaaaaaaaataaaaaataatcagggcacagtggctcatgcctgtaatcccagcactctgggaggctgaggtgggtggatcacctgaggtcaggagttcaagaccagcctggtgaacatggcgaaaccccgtctctaataaaaatacaaaaattagccgggcatggtggtgcatgcctgtaatcccagctactcgggaggctgaggcaggagaactgcttgaacccaggaggcagaggttgcagtgatccaagatcatgccactgcactccagcctgggcaacaagagcaaaactccgtctcaaaataaaaagaaaagaaaagaatggacagtgtttgcagagagttgctcacgagtttccctctaatcctaaatgtcttcatgtctatcagtctgagcagacggtgagtagggcgggcacattctccaggcccttcttcctagctctgtggttgacctctcagcaagtgctatccaggctggacaccagttcctggccatcatcgtgggaataacccccagatgcattccctgctgctcaggtcaagatgccggacgcttccacgaggccagcagtgggggtcggtggacaagcggatagcgcttgggggtatccacggatgatggcggacgggggcaactaggtgcaggaggaacagaaaagacggccggggaaaggcctggcagctccccaaaaggggcgcagagaacgggagaagaaacggaggcagcgacaggtgagacgcggctaagcgggggagcaagaaggaatcaagaagggggcagcgcaccatatggcacacaagcgaggg

SEQ ID NO: 457007 - DNA, 303 bp, Homo sapiens
agcctgcttccttccagacagcagcctccccgactaccactacatcatggagaacctcttcctgtgagtccccgcccgcggcgagcagcctcgggccagctctgatgcctccctggccacaggggcaccaggctgcaaggattgcattgtggccctaggaagcctgcctggcaccagggaagggcgtggtggccacagaccttgatctgagtccctgctggccctgaggctcacagtggccttccctctgggccaccctgttctcctccccgtcctcctcctcctcctcttcctcctccttcc

SEQ ID NO: 457008 - DNA, 4979 bp, Homo sapiens
ggaagccgagcctctgccagccctgagctgggaagaagcagctacctcggaggcagggcgcgcaggcgggcggcgatgagagggggcgcagccgcagccccgcgctggggagcccaccgctaaccctgcaccccacccacccctgcacaaaagagctggcgggcgctggccacgtcgccctgggtgaccttcctcggatgcagaatccgcccctgcgagcatcctcttcctcctaggctctgaaggcccggggagcgtgagcgatgcccagctgcacccgggcagggctcgcctttgtttgccagtaaggaggagaggctgtctcagctgcagaggggtcatccctgcttcaagccagtgcctcttcccagctcccatggggaccaccgaagccacgctccggatggaaaacgtggacgtgaaggaggaatggcaggacgaagatcttcccaggccactcccagaagagacgggggtggaactgcttggcagcccggtggaagacacatcctctcctcccaacacgctaaatttcaacggagcgcatcgtaagaggaagacgctggtggccccagagatcaacatttctctggatcagagtgaggggtccctgctgtccgatgacttcttggatacccctgatgacctggatattaacgtggatgacatcgagacccccgatgagaccgactcgctggagttcctggggaatggcaacgaactggagtgggaagacgacacccccgtggccaccgccaagaacatgcccggggacagcgcggatctatttggggacggcacgacggaggacggcagcgccgccaacgggcgcctgtggcggacagtgatcatcggggagcaagagcaccgtatagacctgcacatgatccggccttacatgaaagtggtcacccacggagggtactacggcgaaggcctcaacgccatcatcgtcttcgcagcctgcttccttccagacagcagcctccccgactaccactacatcatggagaacctcttcctgtacgtcatcagcagcttagagctcctggtggctgaggactacatgatcgtgtacctgaacggtgccacgccccggcggaggatgcctggaatcggctggctgaagaagtgctaccagatgatcgaccggaggttgcggaaaaacctgaagtccttgatcatcgtccacccctcgtggttcattcggactgtgctggccatctctcgccctttcatcagcgtcaagttcatcaacaagatccagtacgtgcacagcttggaagacctggagcaactcatccctatggaacacgtccagatcccagactgcgtcctgcaatacgaagaggaaagactgaaggccaggagggagagcgcgaggccccagccggagtttgtgctgcccaggtctgaagagaagccagaggtggcaccagtggaaaacaggtctgctctggtctcagaagatcaggaaacaagcatgtcctgaggcgacgtgagcataacaaaggacatggaagaagattccagatgccagaaaacctctgtcagacgcccactggccccagatctcatcctgcctcatcctgagtcccaatcttccaagggtgccagcccctccgttcatctctgaaacccagcatccttttcagctgcttgaaaacattgtattttttttttttaacgatgcagtatttgtgcgttccagaaaagggcccagctctgagcccctcacccttccacactcacgaactctcagccgaggaaggcaagaagcgcagggggtggcccgcgtggcgtcggtggcctccgctcctgctcgcagcccctgtggtcagagctggatacaagattcaagacccttctcttgcttgtcacccgctccaggttggagccacagacacccaccgccaccccggctgggtctgcgtcctttcctgtgcctttccctccagaatgcggcctcagacctagaagctcaacccccctatgagggccacgtcctggggtagctcctgacctccgaccttatgtccaaatttcacacccatggtttttcatttgacccgcccccttctcgctcataatgacacccagctcctttgagaggatcagagcccattgcacaagaagagccgctgccaaccatccttgtcctccgattgcaaaatgacaccccagtaatctagaacattctcaagcccctttaactcagatgtcaagccaccgggcaaaccccgtcaatacctcccaccaaggaatgagatatgtggacctcactgctcccccaacccagcgtcaggctgggacacgccaacgctgttccgggttggaacagcagaggctcagaaactggctctgaaataggcagacctagcaagaggaagatacagggtatcgggcgtttgagtgtttcagaagtcattcgggaagataaatccagtgcgctggccgcagccacctgcattcaaagcttggaccagcgggttcttgttcgggaggcaaatttccctaggaaaaagaagacagacttttctaatgtggtccaaatgcggatcactggtcagatggactctagaagcactgagctccctgtctctggaagtatttaagaaaaggctgggccaggcacgatggctcacgcctgtaatcccagactttgggaggccgaggcaggcggatcacctgaggtgaggagtttgagaacagcctggccaacatggtgaaacctcatctctactaaaaatacaaaaattagccaggcgtggtggcaggtgcctgtaatcccagctacttgggaggctgaggcatgagaatcacttaaacctgagaggcagaggttacagtgagccaagatcgtgccactgcattccagcctgggcgacagagcaagactctgtctcaaaaaaaataaaaaataatcagggcacagtggctcatgcctgtaatcccagcactctgggaggctgaggtgggtggatcacctgaggtcaggagttcaagaccagcctggtgaacatggcgaaaccccgtctctaataaaaatacaaaaattagccgggcatggtggtgcatgcctgtaatcccagctactcgggaggctgaggcaggagaactgcttgaacccaggaggcagaggttgcagtgatccaagatcatgccactgcactccagcctgggcaacaagagcaaaactccgtctcaaaataaaaagaaaagaaaagaatggacagtgtttgcagagagttgctcacgagtttccctctaatcctaaatgtcttcatgtctatcagtctgagcagacggtgagtagggcgggcacattctccaggcccttcttcctagctctgtggttgacctctcagcaagtgctatccaggctgggccaaccagacccacaattaactgagcctcagtgaaagcgtccagtgcatcttgacctgagacagcaaggaattgcatttggggttattccaacgatgatggcagggaactggtggtatttagtgctgaggggcagtgatacagaaagatttgccctgtgggacagggtcctgcgcgagtcccatccccaaaagccagcagctcctgccatgaggaagacggggtttctgagcaggcttatgcctgcaggttcctgtggagccaccggctgtgacgggacacctctgggtctcagcattgccctggggaggctgggacatttagggacatggtagggttttaacatttgtttcccaaatgtcaaatcccgggcacaggggcaagaccctgtcccgaattcccaccccagtgaatggtgtcgctgccaaagccaacacaagatgacaaaagtggctgggtacggtggctcacgcctataatcccagcactttgggagaccgagacaggtggatcacctgaggtcaggagttcgagaccaggctggccaacatggtgaaaccccatctctactaaaaatacaaaaattagctgggtgtggtggcgcgcacctgtagtcccagctactcaggaggctgaggtagaagaatagctggaacccaggaggcagagattgcagtcagccgagattgcaccactgcactccagcctgggagacagagcaagactgactcaaaagaaaaaaaatgacagaagcctgattatcagactgcccggaggagacaggctccagcagatagatgccagccaggcccagctgccacgatttgtcccaggtgaccaaaggcacgcagctccagcatgaatcgttctaacccaacagtgacaagaactgctgggccttaaccgtcatggaagactggggccgcttccaagtcacagacaggagacggggacaggaaagaactcattccacccaatcggacacctaataattgagtgtctacagcagcaatcaagtgacaagtgaggccctacctgacccagaaggtgcctgccggctaaacattctgcccccaccagaaactccagggggtccgcccgttatgccgtggcccacccacgcccctttggatcaccagcagtcacagacaacaggcaggcgaaactgaagaccccaactcagccccagcggaccctccagagcaaaagaggcccccggcgaggccacctgtcggcaggcatgccgaggtcaaacagccggggccaccgttcccagctgggccacgacctgcaccgtccacagatgggctttgagatggatttgtatcagggtggggggtgtggtttggccaaaatgcaatggaccccgacccctcctcgtaaaaggatgttgggtttccctctggtgacacatgggatgcgtcataaaccctcccccaaagtcctggtcagcagcccatccttccaacgatgagttttgcggtttttcagaacagaaatgatcactacgattgacgacggtcgtgatgttaagacgtcgtctccatgagctttggggggacttttatgtggaataaagaaactatcactga

SEQ ID NO: 457009 - DNA, 4976 bp, Homo sapiens
ggaagccgagcctctgccagccctgagctgggaagaagcagctacctcggaggcagggcgcgcaggcgggcggcgatgagagggggcgcagccgcagccccgcgctggggagcccaccgctaaccctgcaccccacccacccctgcacaaaagagctggcgggcgctggccacgtcgccctgggtgaccttcctcggatgcagaatccgcccctgcgagcatcctcttcctcctaggctctgaaggcccggggagcgtgagcgatgcccagctgcacccgggcagggctcgcctttgtttgccagtaaggaggagaggctgtctcagctgcagaggggtcatccctgcttcaagccagtgcctcttcccagctcccatggggaccaccgaagccacgctccggatggaaaacgtggacgtgaaggaggaatggcaggacgaagatcttcccaggccactcccagaagagacgggggtggaactgcttggcagcccggtggaagacacatcctctcctcccaacacgctaaatttcaacggagcgcatcgtaagaggaagacgctggtggccccagagatcaacatttctctggatcagagtgaggggtccctgctgtccgatgacttcttggatacccctgatgacctggatattaacgtggatgacatcgagacccccgatgagaccgactcgctggagttcctggggaatggcaacgaactggagtgggaagacgacacccccgtggccaccgccaagaacatgcccggggacagcgcggatctatttggggacggcacgacggaggacggcagcgccgccaacgggcgcctgtggcggacagtgatcatcggggagcaagagcaccgtatagacctgcacatgatccggccttacatgaaagtggtcacccacggagggtactacggcgaaggcctcaacgccatcatcgtcttcgcagcctgcttccttccagacagcagcctccccgactaccactacatcatggagaacctcttcctgtacgtcatcagcagcttagagctcctggtggctgaggactacatgatcgtgtacctgaacggtgccacgccccggcggaggatgcctggaatcggctggctgaagaagtgctaccagatgatcgaccggaggttgcggaaaaacctgaagtccttgatcatcgtccacccctcgtggttcattcggactgtgctggccatctctcgccctttcatcagcgtcaagttcatcaacaagatccagtacgtgcacagcttggaagacctggagcaactcatccctatggaacacgtccagatcccagactgcgtcctgcaatacgaagaggaaagactgaaggccaggagggagagcgcgaggccccagccggagtttgtgctgcccaggtctgaagagaagccagaggtggcaccagtggaaaacaggtaggtgtgcaggggaccatgggcagagagcatgtcctgaggcgacgtgagcataacaaaggacatggaagaagattccagatgccagaaaacctctgtcagacgcccactggccccagatctcatcctgcctcatcctgagtcccaatcttccaagggtgccagcccctccgttcatctctgaaacccagcatccttttcagctgcttgaaaacattgtattttttttttttaacgatgcagtatttgtgcgttccagaaaagggcccagctctgagcccctcacccttccacactcacgaactctcagccgaggaaggcaagaagcgcagggggtggcccgcgtggcgtcggtggcctccgctcctgctcgcagcccctgtggtcagagctggatacaagattcaagacccttctcttgcttgtcacccgctccaggttggagccacagacacccaccgccaccccggctgggtctgcgtcctttcctgtgcctttccctccagaatgcggcctcagacctagaagctcaacccccctatgagggccacgtcctggggtagctcctgacctccgaccttatgtccaaatttcacacccatggtttttcatttgacccgcccccttctcgctcataatgacacccagctcctttgagaggatcagagcccattgcacaagaagagccgctgccaaccatccttgtcctccgattgcaaaatgacaccccagtaatctagaacattctcaagcccctttaactcagatgtcaagccaccgggcaaaccccgtcaatacctcccaccaaggaatgagatatgtggacctcactgctcccccaacccagcgtcaggctgggacacgccaacgctgttccgggttggaacagcagaggctcagaaactggctctgaaataggcagacctagcaagaggaagatacagggtatcgggcgtttgagtgtttcagaagtcattcgggaagataaatccagtgcgctggccgcagccacctgcattcaaagcttggaccagcgggttcttgttcgggaggcaaatttccctaggaaaaagaagacagacttttctaatgtggtccaaatgcggatcactggtcagatggactctagaagcactgagctccctgtctctggaagtatttaagaaaaggctgggccaggcacgatggctcacgcctgtaatcccagactttgggaggccgaggcaggcggatcacctgaggtgaggagtttgagaacagcctggccaacatggtgaaacctcatctctactaaaaatacaaaaattagccaggcgtggtggcaggtgcctgtaatcccagctacttgggaggctgaggcatgagaatcacttaaacctgagaggcagaggttacagtgagccaagatcgtgccactgcattccagcctgggcgacagagcaagactctgtctcaaaaaaaataaaaaataatcagggcacagtggctcatgcctgtaatcccagcactctgggaggctgaggtgggtggatcacctgaggtcaggagttcaagaccagcctggtgaacatggcgaaaccccgtctctaataaaaatacaaaaattagccgggcatggtggtgcatgcctgtaatcccagctactcgggaggctgaggcaggagaactgcttgaacccaggaggcagaggttgcagtgatccaagatcatgccactgcactccagcctgggcaacaagagcaaaactccgtctcaaaataaaaagaaaagaaaagaatggacagtgtttgcagagagttgctcacgagtttccctctaatcctaaatgtcttcatgtctatcagtctgagcagacggtgagtagggcgggcacattctccaggcccttcttcctagctctgtggttgacctctcagcaagtgctatccaggctgggccaaccagacccacaattaactgagcctcagtgaaagcgtccagtgcatcttgacctgagacagcaaggaattgcatttggggttattccaacgatgatggcagggaactggtggtatttagtgctgaggggcagtgatacagaaagatttgccctgtgggacagggtcctgcgcgagtcccatccccaaaagccagcagctcctgccatgaggaagacggggtttctgagcaggcttatgcctgcaggttcctgtggagccaccggctgtgacgggacacctctgggtctcagcattgccctggggaggctgggacatttagggacatggtagggttttaacatttgtttcccaaatgtcaaatcccgggcacaggggcaagaccctgtcccgaattcccaccccagtgaatggtgtcgctgccaaagccaacacaagatgacaaaagtggctgggtacggtggctcacgcctataatcccagcactttgggagaccgagacaggtggatcacctgaggtcaggagttcgagaccaggctggccaacatggtgaaaccccatctctactaaaaatacaaaaattagctgggtgtggtggcgcgcacctgtagtcccagctactcaggaggctgaggtagaagaatagctggaacccaggaggcagagattgcagtcagccgagattgcaccactgcactccagcctgggagacagagcaagactgactcaaaagaaaaaaaatgacagaagcctgattatcagactgcccggaggagacaggctccagcagatagatgccagccaggcccagctgccacgatttgtcccaggtgaccaaaggcacgcagctccagcatgaatcgttctaacccaacagtgacaagaactgctgggccttaaccgtcatggaagactggggccgcttccaagtcacagacaggagacggggacaggaaagaactcattccacccaatcggacacctaataattgagtgtctacagcagcaatcaagtgacaagtgaggccctacctgacccagaaggtgcctgccggctaaacattctgcccccaccagaaactccagggggtccgcccgttatgccgtggcccacccacgcccctttggatcaccagcagtcacagacaacaggcaggcgaaactgaagaccccaactcagccccagcggaccctccagagcaaaagaggcccccggcgaggccacctgtcggcaggcatgccgaggtcaaacagccggggccaccgttcccagctgggccacgacctgcaccgtccacagatgggctttgagatggatttgtatcagggtggggggtgtggtttggccaaaatgcaatggaccccgacccctcctcgtaaaaggatgttgggtttccctctggtgacacatgggatgcgtcataaaccctcccccaaagtcctggtcagcagcccatccttccaacgatgagttttgcggtttttcagaacagaaatgatcactacgattgacgacggtcgtgatgttaagacgtcgtctccatgagctttggggggacttttatgtggaataaagaaactatcactga

SEQ ID NO: 457010 - DNA, 3279 bp, Homo sapiens
gcccgcgtggcgtcggtggcctccccctgcgcttcttgccttcctcggctgagagttcgtgagtgtggaaggcaagaagcgcagggggtggcccgcgtggcgtcggtggcctccgctcctgctcgcagcccctgtggtcagagctggatacaagattcaagacccttctcttgcttgtcacccgctccaggttggagccacagacacccaccgccaccccggctgggtctgcgtcctttcctgtgcctttccctccagaatgcggcctcagacctagaagctcaacccccctatgagggccacgtcctggggtagctcctgacctccgaccttatgtccaaatttcacacccatggtttttcatttgacccgcccccttctcgctcataatgacacccagctcctttgagaggatcagagcccattgcacaagaagagccgctgccaaccatccttgtcctccgattgcaaaatgacaccccagtaatctagaacattctcaagcccctttaactcagatgtcaagccaccgggcaaaccccgtcaatacctcccaccaaggaatgagatatgtggacctcactgctcccccaacccagcgtcaggctgggacacgccaacgctgttccgggttggaacagcagaggctcagaaactggctctgaaataggcagacctagcaagaggaagatacagggtatcgggcgtttgagtgtttcagaagtcattcgggaagataaatccagtgcgctggccgcagccacctgcattcaaagcttggaccagcgggttcttgttcgggaggcaaatttccctaggaaaaagaagacagacttttctaatgtggtccaaatgcggatcactggtcagatggactctagaagcactgagctccctgtctctggaagtatttaagaaaaggctgggccaggcacgatggctcacgcctgtaatcccagactttgggaggccgaggcaggcggatcacctgaggtgaggagtttgagaacagcctggccaacatggtgaaacctcatctctactaaaaatacaaaaattagccaggcgtggtggcaggtgcctgtaatcccagctacttgggaggctgaggcatgagaatcacttaaacctgagaggcagaggttacagtgagccaagatcgtgccactgcattccagcctgggcgacagagcaagactctgtctcaaaaaaaataaaaaataatcagggcacagtggctcatgcctgtaatcccagcactctgggaggctgaggtgggtggatcacctgaggtcaggagttcaagaccagcctggtgaacatggcgaaaccccgtctctaataaaaatacaaaaattagccgggcatggtggtgcatgcctgtaatcccagctactcgggaggctgaggcaggagaactgcttgaacccaggaggcagaggttgcagtgatccaagatcatgccactgcactccagcctgggcaacaagagcaaaactccgtctcaaaataaaaagaaaagaaaagaatggacagtgtttgcagagagttgctcacgagtttccctctaatcctaaatgtcttcatgtctatcagtctgagcagacggtgagtagggcgggcacattctccaggcccttcttcctagctctgtggttgacctctcagcaagtgctatccaggctgggccaaccagacccacaattaactgagcctcagtgaaagcgtccagtgcatcttgacctgagacagcaaggaattgcatttggggttattccaacgatgatggcagggaactggtggtatttagtgctgaggggcagtgatacagaaagatttgccctgtgggacagggtcctgcgcgagtcccatccccaaaagccagcagctcctgccatgaggaagacggggtttctgagcaggcttatgcctgcaggttcctgtggagccaccggctgtgacgggacacctctgggtctcagcattgccctggggaggctgggacatttagggacatggtagggttttaacatttgtttcccaaatgtcaaatcccgggcacaggggcaagaccctgtcccgaattcccaccccagtgaatggtgtcgctgccaaagccaacacaagatgacaaaagtggctgggtacggtggctcacgcctataatcccagcactttgggagaccgagacaggtggatcacctgaggtcaggagttcgagaccaggctggccaacatggtgaaaccccatctctactaaaaatacaaaaattagctgggtgtggtggcgcgcacctgtagtcccagctactcaggaggctgaggtagaagaatagctggaacccaggaggcagagattgcagtcagccgagattgcaccactgcactccagcctgggagacagagcaagactgactcaaaagaaaaaaaatgacagaagcctgattatcagactgcccggaggagacaggctccagcagatagatgccagccaggcccagctgccacgatttgtcccaggtgaccaaaggcacgcagctccagcatgaatcgttctaacccaacagtgacaagaactgctgggccttaaccgtcatggaagactggggccgcttccaagtcacagacaggagacggggacaggaaagaactcattccacccaatcggacacctaataattgagtgtctacagcagcaatcaagtgacaagtgaggccctacctgacccagaaggtgcctgccggctaaacattctgcccccaccagaaactccagggggtccgcccgttatgccgtggcccacccacgcccctttggatcaccagcagtcacagacaacaggcaggcgaaactgaagaccccaactcagccccagcggaccctccagagcaaaagaggcccccggcgaggccacctgtcggcaggcatgccgaggtcaaacagccggggccaccgttcccagctgggccacgacctgcaccgtccacagatgggctttgagatggatttgtatcagggtggggggtgtggtttggccaaaatgcaatggaccccgacccctcctcgtaaaaggatgttgggtttccctctggtgacacatgggatgcgtcataaaccctcccccaaagtcctggtcagcagcccatccttccaacgatgagttttgcggtttttcagaacagaaatgatcactacgattgacgacggtcgtgatgttaagacgtcgtctccatgagctttggggggacttttatgtggaataaagaaactatcactga

SEQ ID NO: 457011 - DNA, 2044 bp, Homo sapiens
ggaagccgagcctctgccagccctgagctgggaagaagcagctacctcggaggcagggcgcgcaggcgggcggcgatgagagggggcgcagccgcagccccgcgctggggagcccaccgctaaccctgcaccccacccacccctgcacaaaagagctggcgggcgctggccacgtcgccctgggtgaccttcctcggatgcagaatccgcccctgcgagcatcctcttcctcctaggctctgaaggcccggggagcgtgagcgatgcccagctgcacccgggcagggctcgcctttgtttgccagtaaggaggagaggctgtctcagctgcagaggggtcatccctgcttcaagccagtgcctcttcccagctcccatggggaccaccgaagccacgctccggatggaaaacgtggacgtgaaggaggaatggcaggacgaagatcttcccaggccactcccagaagagacgggggtggaactgcttggcagcccggtggaagacacatcctctcctcccaacacgctaaatttcaacggagcgcatcgtaagaggaagacgctggtggccccagagatcaacatttctctggatcagagtgaggggtccctgctgtccgatgacttcttggatacccctgatgacctggatattaacgtggatgacatcgagacccccgatgagaccgactcgctggagttcctggggaatggcaacgaactggagtgggaagacgacacccccgtggccaccgccaagaacatgcccggggacagcgcggatctatttggggacggcacgacggaggacggcagcgccgccaacgggcgcctgtggcggacagtgatcatcggggagcaagagcaccgtatagacctgcacatgatccggccttacatgaaagtggtcacccacggagggtactacggcgaaggcctcaacgccatcatcgtcttcgcagcctgcttccttccagacagcagcctccccgactaccactacatcatggagaacctcttcctgtacgtcatcagcagcttagagctcctggtggctgaggactacatgatcgtgtacctgaacggtgccacgccccggcggaggatgcctggaatcggctggctgaagaagtgctaccagatgatcgaccggaggttgcggaaaaacctgaagtccttgatcatcgtccacccctcgtggttcattcggactgtgctggccatctctcgccctttcatcagcgtcaagttcatcaacaagatccagtacgtgcacagcttggaagacctggagcaactcatccctatggaacacgtccagatcccagactgcgtcctgcaatacgaagaggaaagactgaaggccaggagggagagcgcgaggccccagccggagtttgtgctgcccaggtctgaagagaagccagaggtggcaccagtggaaaacaggtctgctctggtctcagaagatcaggaaacaagcatgtcctgaggcgacgtgagcataacaaaggacatggaagaagattccagatgccagaaaacctctgtcagacgcccactggccccagatctcatcctgcctcatcctgagtcccaatcttccaagggtgccagcccctccgttcatctctgaaacccagcatccttttcagctgcttgaaaacattgtattttttttttttaacgatgcagtatttgtgcgttccagaaaagggcccagctctgagcccctcacccttccacactcacgaactctcagccgagatggatttgtatcagggtggggggtgtggtttggccaaaatgcaatggaccccgacccctcctcgtaaaaggatgttgggtttccctctggtgacacatgggatgcgtcataaaccctcccccaaagtcctggtcagcagcccatccttccaacgatgagttttgcggtttttcagaacagaaatgatcactacgattgacgacggtcgtgatgttaagacgtcgtctccatgagctttggggggacttttatgtggaataaagaaactatcactga

SEQ ID NO: 457012 - DNA, 342 bp, Homo sapiens
tccccctcgcccaggccactgcccagatatattcttctccttgggcaagaagttctgtgcatgcaggtcaaatctgaaagggacatttctttctttaatgagtgtcagggatgggggatgtggctgatgatataaggggccctccaatcagactttctaatctaactgaaaagataattacaatgttgatgctaaaaaagaaggttctggcaaaatagaacttctgaagcatcataaatcagatgactaatatttgtgatccctttttaaattttcatgtgaagaagaataggggatgtaactgaagaaatgaactaaaagttcttctatgtattgataacc

SEQ ID NO: 457013 - DNA, 1376 bp, Homo sapiens
tccccgtcggtccgcggggctctcgctggagcctccccgactccggtttcccctcgtccagaagcccgacgtaaccaaagcccagtctgtcactttaaacacgccccgccccgcctcccgcggctgtgttgcctcctcgctggagaacaccctggtcgacctctgtgcgtccgtgtgcgcgagcgcgtcccgccgaggcggtgggcagggcggacggtgcgcagtgcgttcccgctggtcggagccagcacactaaccacgccacgcgccctgccgtcccttcgcctccagccgctgcagtctgggccctgcaggagctgggaaaaaccgcagggaggtcttcaggccgatatgcaagtctcccagccgaaggggcaggggacctgaacaggggaagcagagcacctgggcctggccagagctgacacctggctaggagaggaaggaccaagggacggggcgttcccaggtgggagcctggagggcaaagcgtggtgcgagcagcctcgcgggccgcctaactgccccgttccaagggtgccaccggaccccgctggagaggaacttctccgttggctgatttcatcaccacccattcccgattccacgtttcctttaagcggggctggcggagccgcaaggcggcaaggaactggattgcgattggtcagcacgtgcctcggtcggcggtacaattggctgaggcgctgggccttgggaagcattccccgacgggattggtcgtcgctctcgcagagcccgcctcccgcagtacaagcggcccccgggtcgggtgggaggaggggactccgggaggaggaacatggcggtggcggacctcgctctcattcctgatgtggacatcgactccgacggcgtcttcaagtatgtgctgatccgagtccactcggctccccgctccggggctccggctgcagagagcaaggagatcgtgcgcggctacaagtgggctgagtaccatgcggacatctacgacaaagtgtcgggcgacatgcagaagcaaggctgcgactgtgagtgtctgggcggcgggcgcatctcccaccagagtcaggacaagaagattcacgtgtacggctattccatggcctatggtcctgcccagcacgccatttcaactgagaaaatcaaagccaagtaccccgactacgaggtcacctgggctaacgacggctactgagcactcccagcccggggcctgctgcctccagcagccacttcagagcccccgcctttgcctgcactcctcttgcagggctggccctgcctgctcctgcggcagcctctggtgacgtgctgtccaccaggccttggagacaggctagcctggccacagaattaaacgtgttgccaca

SEQ ID NO: 457014 - DNA, 1028 bp, Homo sapiens
tccccgtcggtccgcggggctctcgctggagcctccccgactccggtttcccctcgtccagaagcccgacgtaaccaaagcccagtctgtcactttaaacacgccccgccccgcctcccgcggctgtgttgcctcctcgctggagaacaccctggtcgacctctgtgcgtccgtgtgcgcgagcgcgtcccgccgaggcggtgggcagggcggacggtgcgcagtgcgttcccgctggtcggagccagcacactaaccacgccacgcgccctgccgtcccttcgcctccagccgctgcagtctgggccctgcaggagctgggaaaaaccgcagggaggtcttcaggccgatatgcaagtctcccagccgaaggggcaggggacctgaacaggggaagcagagcacctgggcctggccagagctgacacctggctaggagaggaaggaccaagggacggggcgttcccaggtgggagcctggagggcaaagcgtggtgcgagcaggtgagggagagagctagttggtaagcgtggaagcccacccgagggggcttgacctgtcccgagaggtccccgcacacccgctctggccgcacgccgtactgcgggcgtggaggcgcaagcccggcggcccggcctccacctgtcccccaagtgcaccctggtccgcgcccagagctctctggagggtggggtatgcgggagaggggtggaggccaaacgcaagggccctcctggagtccccagccctacttcggagccaggggagggggcaccaagtgagagaaattgggcacccccgcctccgctcctgctttcgcacccggcacgcccatctcgtccccgcgcgtctgcaccggccaggcgtcccgcttgcccacccgccgccgcgccccgcgccccctaccccagggcctctgcattcggccccacccctgagggccggccgggaacgcccctggaccggaataatttccagggggcaagagctttcgaaccaagtaaaatagaacttgaatgtaaaaaat

SEQ ID NO: 457015 - DNA, 1873 bp, Homo sapiens
tccccgtcggtccgcggggctctcgctggagcctccccgactccggtttcccctcgtccagaagcccgacgtaaccaaagcccagtctgtcactttaaacacgccccgccccgcctcccgcggctgtgttgcctcctcgctggagaacaccctggtcgacctctgtgcgtccgtgtgcgcgagcgcgtcccgccgaggcggtgggcagggcggacggtgcgcagtgcgttcccgctggtcggagccagcacactaaccacgccacgcgccctgccgtcccttcgcctccagccgctgcagtctgggccctgcaggagctgggaaaaaccgcagggaggtcttcaggccgatatgcaagtctcccagccgaaggggcaggggacctgaacaggggaagcagagcacctgggcctggccagagctgacacctggctaggagaggaaggaccaagggacggggcgttcccaggtgggagcctggagggcaaagcgtggtgcgagcaggtgagggagagagctagttggtaagcgtggaagcccacccgagggggcttgacctgtcccgagaggtccccgcacacccgctctggccgcacgccgtactgcgggcgtggaggcgcaagcccggcggcccggcctccacctgtcccccaagtgcaccctggtccgcgcccagagctctctggagggtggggtatgcgggagaggggtggaggccaaacgcaagggccctcctggagtccccagccctacttcggagccaggggagggggcaccaagtgagagaaattgggcacccccgcctccgctcctgctttcgcacccggcacgcccatctcgtccccgcgcgtctgcaccggccaggcgtcccgcttgcccacccgccgccgcgccccgcgccccctaccccagggcctctgcattcggccccacccctgagggccggccgggaacgcccctggaccggaataatttccagggggcaagagctttcgaaccaacctcgcgggccgcctaactgccccgttccaagggtgccaccggaccccgctggagaggaacttctccgttggctgatttcatcaccacccattcccgattccacgtttcctttaagcggggctggcggagccgcaaggcggcaaggaactggattgcgattggtcagcacgtgcctcggtcggcggtacaattggctgaggcgctgggccttgggaagcattccccgacgggattggtcgtcgctctcgcagagcccgcctcccgcagtacaagcggcccccgggtcgggtgggaggaggggactccgggaggaggaacatggcggtggcggacctcgctctcattcctgatgtggacatcgactccgacggcgtcttcaagtatgtgctgatccgagtccactcggctccccgctccggggctccggctgcagagagcaaggagatcgtgcgcggctacaagtgggctgagtaccatgcggacatctacgacaaagtgtcgggcgacatgcagaagcaaggctgcgactgtgagtgtctgggcggcgggcgcatctcccaccagagtcaggacaagaagattcacgtgtacggctattccatggcctatggtcctgcccagcacgccatttcaactgagaaaatcaaagccaagtaccccgactacgaggtcacctgggctaacgacggctactgagcactcccagcccggggcctgctgcctccagcagccacttcagagcccccgcctttgcctgcactcctcttgcagggctggccctgcctgctcctgcggcagcctctggtgacgtgctgtccaccaggccttggagacaggctagcctggccacagaattaaacgtgttgccaca

SEQ ID NO: 457016 - DNA, 1260 bp, Homo sapiens
tccccgtcggtccgcggggctctcgctggagcctccccgactccggtttcccctcgtccagaagcccgacgtaaccaaagcccagtctgtcactttaaacacgccccgccccgcctcccgcggctgtgttgcctcctcgctggagaacaccctggtcgacctctgtgcgtccgtgtgcgcgagcgcgtcccgccgaggcggtgggcagggcggacggtgcgcagtgcgttcccgctggtcggagccagcacactaaccacgccacgcgccctgccgtcccttcgcctccagccgctgcagtctgggccctgcaggagctgggaaaaaccgcagggaggtcttcaggccgatatgcaagtctcccagccgaaggggcaggggacctgaacaggggaagcagagcacctgggcctggccagagctgacacctggctaggagaggaaggaccaagggacggggcgttcccaggtgggagcctggagggcaaagcgtggtgcgagcagcggggctggcggagccgcaaggcggcaaggaactggattgcgattggtcagcacgtgcctcggtcggcggtacaattggctgaggcgctgggccttgggaagcattccccgacgggattggtcgtcgctctcgcagagcccgcctcccgcagtacaagcggcccccgggtcgggtgggaggaggggactccgggaggaggaacatggcggtggcggacctcgctctcattcctgatgtggacatcgactccgacggcgtcttcaagtatgtgctgatccgagtccactcggctccccgctccggggctccggctgcagagagcaaggagatcgtgcgcggctacaagtgggctgagtaccatgcggacatctacgacaaagtgtcgggcgacatgcagaagcaaggctgcgactgtgagtgtctgggcggcgggcgcatctcccaccagagtcaggacaagaagattcacgtgtacggctattccatggcctatggtcctgcccagcacgccatttcaactgagaaaatcaaagccaagtaccccgactacgaggtcacctgggctaacgacggctactgagcactcccagcccggggcctgctgcctccagcagccacttcagagcccccgcctttgcctgcactcctcttgcagggctggccctgcctgctcctgcggcagcctctggtgacgtgctgtccaccaggccttggagacaggctagcctggccacagaattaaacgtgttgccaca

SEQ ID NO: 457017 - DNA, 5913 bp, Homo sapiens
  misc_feature (3102)..(3102): n is a, c, g, or t
tccccgtcggtccgcggggctctcgctggagcctccccgactccggtttcccctcgtccagaagcccgacgtaaccaaagcccagtctgtcactttaaacacgccccgccccgcctcccgcggctgtgttgcctcctcgctggagaacaccctggtcgacctctgtgcgtccgtgtgcgcgagcgcgtcccgccgaggcggtgggcagggcggacggtgcgcagtgcgttcccgctggtcggagccagcacactaaccacgccacgcgccctgccgtcccttcgcctccagccgctgcagtctgggccctgcaggagctgggaaaaaccgcagggaggtcttcaggccgatatgcaagtctcccagccgaaggggcaggggacctgaacaggggaagcagagcacctgggcctggccagagctgacacctggctaggagaggaaggaccaagggacggggcgttcccaggtgggagcctggagggcaaagcgtggtgcgagcaggtgagggagagagctagttggtaagcgtggaagcccacccgagggggcttgacctgtcccgagaggtccccgcacacccgctctggccgcacgccgtactgcgggcgtggaggcgcaagcccggcggcccggcctccacctgtcccccaagtgcaccctggtccgcgcccagagctctctggagggtggggtatgcgggagaggggtggaggccaaacgcaagggccctcctggagtccccagccctacttcggagccaggggagggggcaccaagtgagagaaattgggcacccccgcctccgctcctgctttcgcacccggcacgcccatctcgtccccgcgcgtctgcaccggccaggcgtcccgcttgcccacccgccgccgcgccccgcgccccctaccccagggcctctgcattcggccccacccctgagggccggccgggaacgcccctggaccggaataatttccagggggcaagagctttcgaaccaacctcgcgggccgcctaactgccccgttccaagggtgccaccggaccccgctggagaggaacttctccgttggctgatttcatcaccacccattcccgattccacgtttcctttaagcggggctggcggagccgcaaggcggcaaggaactggattgcgattggtcagcacgtgcctcggtcggcggtacaattggctgaggcgctgggccttgggaagcattccccgacgggattggtcgtcgctctcgcagagcccgcctcccgcagtacaagcggcccccgggtcgggtgggaggaggggactccgggaggaggaacatggcggtggcggacctcgctctcattcctgatgtggacatcgactccgacggcgtcttcaagtatgtgctgatccgagtccactcggctccccgctccggggctccggctgcagagagcaaggagatcgtgcgcggctacaagtgggctgagtaccatgcggacatctacgacaaagtgtcgggcgacatgcagaagcaaggctgcgactgtgagtgtctgggcggcgggcgcatctcccaccagagtcaggacaagaagattcacgtgtacggctattccatggcctatggtcctgcccagcacgccatttcaactgagaaaatcaaagccaagtaccccgactacgaggtcacctgggctaacgacggctactgagcactcccagcccggggcctgctgcctccagcagccacttcagagcccccgcctttgcctgcactcctcttgcagggctggccctgcctgctcctgcggcagcctctggtgacgtgctgtccaccaggccttggagacaggctagcctggccacagaattaaacgtgttgccacacctgccggcttctgaactctgtccttggcttcctgcaccctgcgtcaccacctccgggggcccccagaccctaactaaagcagggaccctgtatctggcaccggacagcacctggctgctcaggacgaatgaatgacggcgtgatcctccacagcctgacttaaaggcaccctgtgtggccgcactgctccctctggcccaaccatgcctctgtccagccacctgctgcccgccttggtcctgttcctgggagccctggccaggccgtgtgcaacttcgtgtgtgactgcagggactgctcagatgaggcccagtgtggttaccacggggcctcgcccaccctgggcgcccccttcgcctgtgacttcgagcaggacccctgcggctggcgggacattagtacctcaggctacagctggctccgagacagggcaggggccgcactggagggtcctgggcctcactcagaccacacactgggcaccgacttgggtgaggccagggcaagtctctgtgcgcccctgtcccaataccctccttgctccctgccccgtctcctgacctctcacctgcgccaggctggtacatggccgttggaacccaccgagggaaagaggcatccaccgcagccctgcgctcgccaaccctgcgagaggcagcctcctcttgcaagctgaggctctggtaccacgcggcctctggaggtgcaccctggacccccaaggctcgtggggggtgcccaaggggagggcgggtgggcagctggggacaagcagggccgcagctgccctgggacccctgacattgcagatgtggctgaactgcgggtggagctgacccatggcgcagagaccctgaccctgtggcagagcacagggccctggggccctggctggcaggagttggcagtgaccacaggccgcatccggggtgacttccgagtgaccttctctgccacccgaaatgccacccacaggggcgctgtggctctagatgacctagagttctgggactgtggtctgcccaccccccaggccaactgtcccccgggacaccaccactgccagaacaaggtctgcgtggagccccagcagctgtgcgacggggaagacaactgcggggacctgtctgatgagaacccactcacctgtggccgccacatagccaccgactttgagacaggcctgggcccatggaaccgctcggaaggctggtcccggaaccaccgngctggtggtcctgagcgcccctcctggccacgccgtgaccacagccggaacagtgcacaggctggtcttctatcagtacctgagtgggtctgaggctggctgcctccagctgttcctgcagactctggggcccggcgccccccgggcccccgtcctgctgcggaggcgccgaggggagctggggaccgcctgggtccgagaccgtgttgacatccagagcgcctaccccttccagatcctcctggccgggcagacaggcccggggggcgtcgtgggtctggacgacctcatcctgtctgaccactgcagaccagtctcggaggtgtccaccctgcagccgctgcctcctgggccccgggccccagccccccagcccctgccgcccagctcgcggctccaggattcctgcaagcaggggcatcttgcctgcggggacctgtgtgtgcccccggaacaactgtgtgacttcgaggagcagtgcgcagggggcgaggacgagcaggcctgtggcaccacagactttgagtcccccgaggctgggggctgggaggacgccagcgtggggcggctgcagtggcggcgtgtctcagcccaggagagccaggggtccagtgcagctgctgctgggcacttcctgtctctgcagcgggcctgggggcagctaggcgctgaggcccgggtcctcacacccctccttggcccttctggccccagctgtgaactccacctggcttattatttacagagccagccccgagctggagtttgtcggtttggtggacttggatggccctgaccagcagggagctggggtggacaacgtgaccctgagggactgtagccccacagtgaccaccgagagagacagaggttcctgctgcccatcctcactcccacctgggtgctccccttacactcctccagggaccccggagcttccaccttctcagggctctggagggggaggggagaaggtgtgtgacgccacctggccccacccccagaggtctcctgtaactttgagcgggacacatgcagctggtacccaggccacctctcagacacacactggcgctgggtggagagccgcggccctgaccacgaccacaccacaggccaaggccactttgtgctcctggaccccacagaccccctggcctggggccacagtgcccacctgctctccaggccccaggtgccagcagcacccacggagtgtctcagcttctggtaccacctccatgggccccagattgggactctgcgcctagccatgagacgggaaggggaggagacacacctgtggtcgcggtcaggcacccagggcaaccgctggcacgaggcctgggccaccctttcccaccagcctggctcccatgcccagtaccagctgctgttcgagggcctccgggacggataccacggcaccatggcgctggacgatgtggccgtgcggccgggcccctgctgggcccctaattactgctcctttgaggactcagactgcggcttctcccctggaggccaaggtctctggaggcggcaggccaatgcctcgggccatgctgcctggggccccccaacagaccataccactgagacagcccaagggcactacatggtggtggacacaagcccagacgcactaccccggggccagacggcctccctgacctccaaggagcacaggcccctggcccagcctgcttgtctgaccttctggtaccacgggagcctccgcagcccaggcaccctgcgggtctacctggaggagcgcgggaggcaccaggtgctcagcctcagtgcccacggcgggcttgcctggcgcctgggcagcatggacgtgcaggccgagcgagcctggagggttcctgtgattttgagtctggcctgtgtggctggagccacctggcctggcccggcctgggcggatacagctgggactggggcgggggagccaccccctctcgttacccccagccccctgtggaccacaccctgggcacagaggcaggccactttgccttctttgaaactggcgtgctgggccccgggggccgggccgcctggctgcgcagcgagcctctgccggccaccccagcctcctgcctccgcttctggtaccacatgggttttcctgagcacttctacaagggggagctgaaggtactgctgcacagtgctcagggccagctggctgtgtggggcgcaggcgggcatcggcggcaccagtggctggaggcccaggtggaggtagccagtgccaaggagttccagatcgtgtttgaagccactctgggcggccagccagccctggggcccattgccctggatgacgtggagtatctggctgggcagcattgccagcagcctgcccccagcccggggaacacagccgcacccgggtctgtgccagctgtggttggcagtgccctcctattgctcatgctcctggtgctgctgggacttgggggacggcgctggctgcagaagaaggggagctgccccttccagagcaacacagaggccacagcccctggctttgacaacatccttttcaatgcggatggtgtcaccctcccggcatctgtcaccagtgatccgtagaccaccccagacaaggccccgcttcctcacgtgacatccagcacttggtcagaccctagccagggaccggacacctgccccgcccaggctgggacaggctgcaggtctcaggatatgctgaggcctgggcgttccctgccctgtgctgactctgttgctctgtgaataaacaccctggcccatgagggcagcccaaaaaaacag

SEQ ID NO: 457018 - DNA, 6079 bp, Homo sapiens
  misc_feature (3102)..(3102): n is a, c, g, or t
tccccgtcggtccgcggggctctcgctggagcctccccgactccggtttcccctcgtccagaagcccgacgtaaccaaagcccagtctgtcactttaaacacgccccgccccgcctcccgcggctgtgttgcctcctcgctggagaacaccctggtcgacctctgtgcgtccgtgtgcgcgagcgcgtcccgccgaggcggtgggcagggcggacggtgcgcagtgcgttcccgctggtcggagccagcacactaaccacgccacgcgccctgccgtcccttcgcctccagccgctgcagtctgggccctgcaggagctgggaaaaaccgcagggaggtcttcaggccgatatgcaagtctcccagccgaaggggcaggggacctgaacaggggaagcagagcacctgggcctggccagagctgacacctggctaggagaggaaggaccaagggacggggcgttcccaggtgggagcctggagggcaaagcgtggtgcgagcaggtgagggagagagctagttggtaagcgtggaagcccacccgagggggcttgacctgtcccgagaggtccccgcacacccgctctggccgcacgccgtactgcgggcgtggaggcgcaagcccggcggcccggcctccacctgtcccccaagtgcaccctggtccgcgcccagagctctctggagggtggggtatgcgggagaggggtggaggccaaacgcaagggccctcctggagtccccagccctacttcggagccaggggagggggcaccaagtgagagaaattgggcacccccgcctccgctcctgctttcgcacccggcacgcccatctcgtccccgcgcgtctgcaccggccaggcgtcccgcttgcccacccgccgccgcgccccgcgccccctaccccagggcctctgcattcggccccacccctgagggccggccgggaacgcccctggaccggaataatttccagggggcaagagctttcgaaccaacctcgcgggccgcctaactgccccgttccaagggtgccaccggaccccgctggagaggaacttctccgttggctgatttcatcaccacccattcccgattccacgtttcctttaagcggggctggcggagccgcaaggcggcaaggaactggattgcgattggtcagcacgtgcctcggtcggcggtacaattggctgaggcgctgggccttgggaagcattccccgacgggattggtcgtcgctctcgcagagcccgcctcccgcagtacaagcggcccccgggtcgggtgggaggaggggactccgggaggaggaacatggcggtggcggacctcgctctcattcctgatgtggacatcgactccgacggcgtcttcaagtatgtgctgatccgagtccactcggctccccgctccggggctccggctgcagagagcaaggagatcgtgcgcggctacaagtgggctgagtaccatgcggacatctacgacaaagtgtcgggcgacatgcagaagcaaggctgcgactgtgagtgtctgggcggcgggcgcatctcccaccagagtcaggacaagaagattcacgtgtacggctattccatggcctatggtcctgcccagcacgccatttcaactgagaaaatcaaagccaagtaccccgactacgaggtcacctgggctaacgacggctactgagcactcccagcccggggcctgctgcctccagcagccacttcagagcccccgcctttgcctgcactcctcttgcagggctggccctgcctgctcctgcggcagcctctggtgacgtgctgtccaccaggccttggagacaggctagcctggccacagaattaaacgtgttgccacacctgccggcttctgaactctgtccttggcttcctgcaccctgcgtcaccacctccgggggcccccagaccctaactaaagcagggaccctgtatctggcaccggacagcacctggctgctcaggacgaatgaatgacggcgtgatcctccacagcctgacttaaaggcaccctgtgtggccgcactgctccctctggcccaaccatgcctctgtccagccacctgctgcccgccttggtcctgttcctgggagccctggccaggccgtgtgcaacttcgtgtgtgactgcagggactgctcagatgaggcccagtgtggttaccacggggcctcgcccaccctgggcgcccccttcgcctgtgacttcgagcaggacccctgcggctggcgggacattagtacctcaggctacagctggctccgagacagggcaggggccgcactggagggtcctgggcctcactcagaccacacactgggcaccgacttgggtgaggccagggcaagtctctgtgcgcccctgtcccaataccctccttgctccctgccccgtctcctgacctctcacctgcgccaggctggtacatggccgttggaacccaccgagggaaagaggcatccaccgcagccctgcgctcgccaaccctgcgagaggcagcctcctcttgcaagctgaggctctggtaccacgcggcctctggaggtgcaccctggacccccaaggctcgtggggggtgcccaaggggagggcgggtgggcagctggggacaagcagggccgcagctgccctgggacccctgacattgcagatgtggctgaactgcgggtggagctgacccatggcgcagagaccctgaccctgtggcagagcacagggccctggggccctggctggcaggagttggcagtgaccacaggccgcatccggggtgacttccgagtgaccttctctgccacccgaaatgccacccacaggggcgctgtggctctagatgacctagagttctgggactgtggtctgcccaccccccaggccaactgtcccccgggacaccaccactgccagaacaaggtctgcgtggagccccagcagctgtgcgacggggaagacaactgcggggacctgtctgatgagaacccactcacctgtggccgccacatagccaccgactttgagacaggcctgggcccatggaaccgctcggaaggctggtcccggaaccaccgngctggtggtcctgagcgcccctcctggccacgccgtgaccacagccggaacagtgcacaggctggtcttctatcagtacctgagtgggtctgaggctggctgcctccagctgttcctgcagactctggggcccggcgccccccgggcccccgtcctgctgcggaggcgccgaggggagctggggaccgcctgggtccgagaccgtgttgacatccagagcgcctaccccttccagatcctcctggccgggcagacaggcccggggggcgtcgtgggtctggacgacctcatcctgtctgaccactgcagaccagtctcggaggtgtccaccctgcagccgctgcctcctgggccccgggccccagccccccagcccctgccgcccagctcgcggctccaggattcctgcaagcaggggcatcttgcctgcggggacctgtgtgtgcccccggaacaactgtgtgacttcgaggagcagtgcgcagggggcgaggacgagcaggcctgtggcaccacagactttgagtcccccgaggctgggggctgggaggacgccagcgtggggcggctgcagtggcggcgtgtctcagcccaggagagccaggggtccagtgcagctgctgctgggcacttcctgtctctgcagcgggcctgggggcagctaggcgctgaggcccgggtcctcacacccctccttggcccttctggccccagctgtgaactccacctggcttattatttacagagccagccccgagctggagtttgtcggtttggtggacttggatggccctgaccagcagggagctggggtggacaacgtgaccctgagggactgtagccccacagtgaccaccgagagagacagaggttcctgctgcccatcctcactcccacctgggtgctccccttacactcctccagggaccccggagcttccaccttctcagggctctggagggggaggggagaaggtgtgtgacgccacctggccccacccccagaggtctcctgtaactttgagcgggacacatgcagctggtacccaggccacctctcagacacacactggcgctgggtggagagccgcggccctgaccacgaccacaccacaggccaaggccactttgtgctcctggaccccacagaccccctggcctggggccacagtgcccacctgctctccaggccccaggtgccagcagcacccacggagtgtctcagcttctggtaccacctccatgggccccagattgggactctgcgcctagccatgagacgggaaggggaggagacacacctgtggtcgcggtcaggcacccagggcaaccgctggcacgaggcctgggccaccctttcccaccagcctggctcccatgcccagtaccagctgctgttcgagggcctccgggacggataccacggcaccatggcgctggacgatgtggccgtgcggccgggcccctgctgggcccctaattactgctcctttgaggactcagactgcggcttctcccctggaggccaaggtctctggaggcggcaggccaatgcctcgggccatgctgcctggggccccccaacagaccataccactgagacagcccaaggtatgggggcctggcaggggcagggattgaggggctggccaggggctggcaggctgatgctggcacctccagggcactacatggtggtggacacaagcccagacgcactaccccggggccagacggcctccctgacctccaaggagcacaggcccctggcccagcctgcttgtctgaccttctggtaccacgggagcctccgcagcccaggcaccctgcgggtctacctggaggagcgcgggaggcaccaggtgctcagcctcagtgcccacggcgggcttgcctggcgcctgggcagcatggacgtgcaggccgagcgagcctggagggttcctgtgattttgagtctggcctgtgtggctggagccacctggcctggcccggcctgggcggatacagctgggactggggcgggggagccaccccctctcgttacccccagccccctgtggaccacaccctgggcacagaggcaggccactttgccttctttgaaactggcgtgctgggccccgggggccgggccgcctggctgcgcagcgagcctctgccggccaccccagcctcctgcctccgcttctggtaccacatgggttttcctgagcacttctacaagggggagctgaaggtactgctgcacagtgctcagggccagctggctgtgtggggcgcaggcgggcatcggcggcaccagtggctggaggcccaggtggaggtagccagtgccaaggagttccagatcgtgtttgaagccactctgggcggccagccagccctggggcccattgccctggatgacgtggagtatctggctgggcagcattgccagcagcctgcccccagcccggggaacacagccgcacccgggtctgtgccagctgtggttggcagtgccctcctattgctcatgctcctggtgctgctgggacttgggggacggcgctggctgcagaagaaggggagctgccccttccagagcaacacagaggccacagcccctggctttgacaacatccttttcaatgcggatggtgtcaccctcccggcatctgtcaccagtgatccgtagaccaccccagacaaggccccacaacccacgcgctcacggtttgtgggcgcggctggagtggtaaaaggctcagtaaaatcctgcgaagaaaaatacttctgaggtaataaataggattatcccgtatcgaaggcctttttggacgggtggtgtgtgatgtccttggtatgtgctttcatcgtgttacatcgcgccataacccactacaacccacgcgctccacaacccacgcgcccaaaacccatcgcgcccacaactcacgcgcccacaacccacgcgcccacaacccacggaccca

SEQ ID NO: 457019 - DNA, 3932 bp, Homo sapiens
  misc_feature (3102)..(3102): n is a, c, g, or t
tccccgtcggtccgcggggctctcgctggagcctccccgactccggtttcccctcgtccagaagcccgacgtaaccaaagcccagtctgtcactttaaacacgccccgccccgcctcccgcggctgtgttgcctcctcgctggagaacaccctggtcgacctctgtgcgtccgtgtgcgcgagcgcgtcccgccgaggcggtgggcagggcggacggtgcgcagtgcgttcccgctggtcggagccagcacactaaccacgccacgcgccctgccgtcccttcgcctccagccgctgcagtctgggccctgcaggagctgggaaaaaccgcagggaggtcttcaggccgatatgcaagtctcccagccgaaggggcaggggacctgaacaggggaagcagagcacctgggcctggccagagctgacacctggctaggagaggaaggaccaagggacggggcgttcccaggtgggagcctggagggcaaagcgtggtgcgagcaggtgagggagagagctagttggtaagcgtggaagcccacccgagggggcttgacctgtcccgagaggtccccgcacacccgctctggccgcacgccgtactgcgggcgtggaggcgcaagcccggcggcccggcctccacctgtcccccaagtgcaccctggtccgcgcccagagctctctggagggtggggtatgcgggagaggggtggaggccaaacgcaagggccctcctggagtccccagccctacttcggagccaggggagggggcaccaagtgagagaaattgggcacccccgcctccgctcctgctttcgcacccggcacgcccatctcgtccccgcgcgtctgcaccggccaggcgtcccgcttgcccacccgccgccgcgccccgcgccccctaccccagggcctctgcattcggccccacccctgagggccggccgggaacgcccctggaccggaataatttccagggggcaagagctttcgaaccaacctcgcgggccgcctaactgccccgttccaagggtgccaccggaccccgctggagaggaacttctccgttggctgatttcatcaccacccattcccgattccacgtttcctttaagcggggctggcggagccgcaaggcggcaaggaactggattgcgattggtcagcacgtgcctcggtcggcggtacaattggctgaggcgctgggccttgggaagcattccccgacgggattggtcgtcgctctcgcagagcccgcctcccgcagtacaagcggcccccgggtcgggtgggaggaggggactccgggaggaggaacatggcggtggcggacctcgctctcattcctgatgtggacatcgactccgacggcgtcttcaagtatgtgctgatccgagtccactcggctccccgctccggggctccggctgcagagagcaaggagatcgtgcgcggctacaagtgggctgagtaccatgcggacatctacgacaaagtgtcgggcgacatgcagaagcaaggctgcgactgtgagtgtctgggcggcgggcgcatctcccaccagagtcaggacaagaagattcacgtgtacggctattccatggcctatggtcctgcccagcacgccatttcaactgagaaaatcaaagccaagtaccccgactacgaggtcacctgggctaacgacggctactgagcactcccagcccggggcctgctgcctccagcagccacttcagagcccccgcctttgcctgcactcctcttgcagggctggccctgcctgctcctgcggcagcctctggtgacgtgctgtccaccaggccttggagacaggctagcctggccacagaattaaacgtgttgccacacctgccggcttctgaactctgtccttggcttcctgcaccctgcgtcaccacctccgggggcccccagaccctaactaaagcagggaccctgtatctggcaccggacagcacctggctgctcaggacgaatgaatgacggcgtgatcctccacagcctgacttaaaggcaccctgtgtggccgcactgctccctctggcccaaccatgcctctgtccagccacctgctgcccgccttggtcctgttcctgggagccctggccaggccgtgtgcaacttcgtgtgtgactgcagggactgctcagatgaggcccagtgtggttaccacggggcctcgcccaccctgggcgcccccttcgcctgtgacttcgagcaggacccctgcggctggcgggacattagtacctcaggctacagctggctccgagacagggcaggggccgcactggagggtcctgggcctcactcagaccacacactgggcaccgacttgggtgaggccagggcaagtctctgtgcgcccctgtcccaataccctccttgctccctgccccgtctcctgacctctcacctgcgccaggctggtacatggccgttggaacccaccgagggaaagaggcatccaccgcagccctgcgctcgccaaccctgcgagaggcagcctcctcttgcaagctgaggctctggtaccacgcggcctctggaggtgcaccctggacccccaaggctcgtggggggtgcccaaggggagggcgggtgggcagctggggacaagcagggccgcagctgccctgggacccctgacattgcagatgtggctgaactgcgggtggagctgacccatggcgcagagaccctgaccctgtggcagagcacagggccctggggccctggctggcaggagttggcagtgaccacaggccgcatccggggtgacttccgagtgaccttctctgccacccgaaatgccacccacaggggcgctgtggctctagatgacctagagttctgggactgtggtctgcccaccccccaggccaactgtcccccgggacaccaccactgccagaacaaggtctgcgtggagccccagcagctgtgcgacggggaagacaactgcggggacctgtctgatgagaacccactcacctgtggccgccacatagccaccgactttgagacaggcctgggcccatggaaccgctcggaaggctggtcccggaaccaccgngctggtggtcctgagcgcccctcctggccacgccgtgaccacagccggaacagtgcacaggctggtcttctatcagtacctgagtgggtctgaggctggctgcctccagctgttcctgcagactctggggcccggcgccccccgggcccccgtcctgctgcggaggcgccgaggggagctggggaccgcctgggtccgagaccgtgttgacatccagagcgcctaccccttccagatcctcctggccgggcagacaggcccggggggcgtcgtgggtctggacgacctcatcctgtctgaccactgcagaccagtctcggaggtgtccaccctgcagccgctgcctcctgggccccgggccccagccccccagcccctgccgcccagctcgcggctccaggattcctgcaagcaggggcatcttgcctgcggggacctgtgtgtgcccccggaacaactgtgtgacttcgaggagcagtgcgcagggggcgaggacgagcaggcctgtggcaccacagactttgagtcccccgaggctgggggctgggaggacgccagcgtggggcggctgcagtggcggcgtgtctcagcccaggagagccaggggtccagtgcagctgctgctgggcacttcctgtctctgcagcgggcctgggggcagctaggcgctgaggcccgggtcctcacacccctccttggcccttctggccccagctgtgaactccacctggcttattatttacagagccagccccgaggtaccgccacactccgcaagttccctggccagcccctgggtgctccctgcacagtgggaggggtctggggcc

SEQ ID NO: 457020 - DNA, 5630 bp, Homo sapiens
  misc_feature (2819)..(2819): n is a, c, g, or t
ctccttgtaccggtagcggggttggggacggaagccttcggtcggtggagaggagaaagggagaggccttcgggcggtggacggggaagagagggagtccttcgggcggtggagggggtggagagcgaggccttcgggcggtggagagcggggaggggggaggccttcgggcggtgggagggggagagagggaggcctttgggcggtgggggccacggggagggtggtcttcggactacgtgcgggacaggaggtcagggctggcaagtccctcaggcctccctcgttgccccagcctcgcgggccgcctaactgccccgttccaagggtgccaccggaccccgctggagaggaacttctccgttggctgatttcatcaccacccattcccgattccacgtttcctttaagcggggctggcggagccgcaaggcggcaaggaactggattgcgattggtcagcacgtgcctcggtcggcggtacaattggctgaggcgctgggccttgggaagcattccccgacgggattggtcgtcgctctcgcagagcccgcctcccgcagtacaagcggcccccgggtcgggtgggaggaggggactccgggaggaggaacatggcggtggcggacctcgctctcattcctgatgtggacatcgactccgacggcgtcttcaagtatgtgctgatccgagtccactcggctccccgctccggggctccggctgcagagagcaaggagatcgtgcgcggctacaagtgggctgagtaccatgcggacatctacgacaaagtgtcgggcgacatgcagaagcaaggctgcgactgtgagtgtctgggcggcgggcgcatctcccaccagagtcaggacaagaagattcacgtgtacggctattccatggtgagccgcagccccgtcccgccctgccggaggccccagtaccagcttcgaggcccacctgagcctgctgccctgacccgtggccccagctgagcacgcaggcttcctggggttctcccagggtcggcggcagagccctccctccagggcccattgtgttcctgcattcccccatggagcacacgccagacctgaggggtgggacggacacccccaggcatggccggctgtctcctctccctgccttgggaggccttgctgggctctagctgtcctccagcactttgggccctgggcccccagaggcagtcagtacctgggtggagctcagagtccccacctgtgctcttcacaaaaaccaccagcagatgagacccacgtgcgtccctctgggcgcctcaggccccaggatccaccatcaaggcctatggtcctgcccagcacgccatttcaactgagaaaatcaaagccaagtaccccgactacgaggtcacctgggctaacgacggctactgagcactcccagcccggggcctgctgcctccagcagccacttcagagcccccgcctttgcctgcactcctcttgcagggctggccctgcctgctcctgcggcagcctctggtgacgtgctgtccaccaggccttggagacaggctagcctggccacagaattaaacgtgttgccacacctgccggcttctgaactctgtccttggcttcctgcaccctgcgtcaccacctccgggggcccccagaccctaactaaagcagggaccctgtatctggcaccggacagcacctggctgctcaggacgaatgaatgacggcgtgatcctccacagcctgacttaaaggcaccctgtgtggccgcactgctccctctggcccaaccatgcctctgtccagccacctgctgcccgccttggtcctgttcctgggagccctggccaggccgtgtgcaacttcgtgtgtgactgcagggactgctcagatgaggcccagtgtggttaccacggggcctcgcccaccctgggcgcccccttcgcctgtgacttcgagcaggacccctgcggctggcgggacattagtacctcaggctacagctggctccgagacagggcaggggccgcactggagggtcctgggcctcactcagaccacacactgggcaccgacttgggtgaggccagggcaagtctctgtgcgcccctgtcccaataccctccttgctccctgccccgtctcctgacctctcacctgcgccaggctggtacatggccgttggaacccaccgagggaaagaggcatccaccgcagccctgcgctcgccaaccctgcgagaggcagcctcctcttgcaagctgaggctctggtaccacgcggcctctggaggtgcaccctggacccccaaggctcgtggggggtgcccaaggggagggcgggtgggcagctggggacaagcagggccgcagctgccctgggacccctgacattgcagatgtggctgaactgcgggtggagctgacccatggcgcagagaccctgaccctgtggcagagcacagggccctggggccctggctggcaggagttggcagtgaccacaggccgcatccggggtgacttccgagtgaccttctctgccacccgaaatgccacccacaggggcgctgtggctctagatgacctagagttctgggactgtggtctgcccaccccccaggccaactgtcccccgggacaccaccactgccagaacaaggtctgcgtggagccccagcagctgtgcgacggggaagacaactgcggggacctgtctgatgagaacccactcacctgtggccgccacatagccaccgactttgagacaggcctgggcccatggaaccgctcggaaggctggtcccggaaccaccgngctggtggtcctgagcgcccctcctggccacgccgtgaccacagccggaacagtgcacaggctggtcttctatcagtacctgagtgggtctgaggctggctgcctccagctgttcctgcagactctggggcccggcgccccccgggcccccgtcctgctgcggaggcgccgaggggagctggggaccgcctgggtccgagaccgtgttgacatccagagcgcctaccccttccagatcctcctggccgggcagacaggcccggggggcgtcgtgggtctggacgacctcatcctgtctgaccactgcagaccagtctcggaggtgtccaccctgcagccgctgcctcctgggccccgggccccagccccccagcccctgccgcccagctcgcggctccaggattcctgcaagcaggggcatcttgcctgcggggacctgtgtgtgcccccggaacaactgtgtgacttcgaggagcagtgcgcagggggcgaggacgagcaggcctgtggcaccacagactttgagtcccccgaggctgggggctgggaggacgccagcgtggggcggctgcagtggcggcgtgtctcagcccaggagagccaggggtccagtgcagctgctgctgggcacttcctgtctctgcagcgggcctgggggcagctaggcgctgaggcccgggtcctcacacccctccttggcccttctggccccagctgtgaactccacctggcttattatttacagagccagccccgagctggagtttgtcggtttggtggacttggatggccctgaccagcagggagctggggtggacaacgtgaccctgagggactgtagccccacagtgaccaccgagagagacagaggttcctgctgcccatcctcactcccacctgggtgctccccttacactcctccagggaccccggagcttccaccttctcagggctctggagggggaggggagaaggtgtgtgacgccacctggccccacccccagaggtctcctgtaactttgagcgggacacatgcagctggtacccaggccacctctcagacacacactggcgctgggtggagagccgcggccctgaccacgaccacaccacaggccaaggccactttgtgctcctggaccccacagaccccctggcctggggccacagtgcccacctgctctccaggccccaggtgccagcagcacccacggagtgtctcagcttctggtaccacctccatgggccccagattgggactctgcgcctagccatgagacgggaaggggaggagacacacctgtggtcgcggtcaggcacccagggcaaccgctggcacgaggcctgggccaccctttcccaccagcctggctcccatgcccagtaccagctgctgttcgagggcctccgggacggataccacggcaccatggcgctggacgatgtggccgtgcggccgggcccctgctgggcccctaattactgctcctttgaggactcagactgcggcttctcccctggaggccaaggtctctggaggcggcaggccaatgcctcgggccatgctgcctggggccccccaacagaccataccactgagacagcccaagggcactacatggtggtggacacaagcccagacgcactaccccggggccagacggcctccctgacctccaaggagcacaggcccctggcccagcctgcttgtctgaccttctggtaccacgggagcctccgcagcccaggcaccctgcgggtctacctggaggagcgcgggaggcaccaggtgctcagcctcagtgcccacggcgggcttgcctggcgcctgggcagcatggacgtgcaggccgagcgagcctggagggttcctgtgattttgagtctggcctgtgtggctggagccacctggcctggcccggcctgggcggatacagctgggactggggcgggggagccaccccctctcgttacccccagccccctgtggaccacaccctgggcacagaggcaggccactttgccttctttgaaactggcgtgctgggccccgggggccgggccgcctggctgcgcagcgagcctctgccggccaccccagcctcctgcctccgcttctggtaccacatgggttttcctgagcacttctacaagggggagctgaaggtactgctgcacagtgctcagggccagctggctgtgtggggcgcaggcgggcatcggcggcaccagtggctggaggcccaggtggaggtagccagtgccaaggagttccagatcgtgtttgaagccactctgggcggccagccagccctggggcccattgccctggatgacgtggagtatctggctgggcagcattgccagcagcctgcccccagcccggggaacacagccgcacccgggtctgtgccagctgtggttggcagtgccctcctattgctcatgctcctggtgctgctgggacttgggggacggcgctggctgcagaagaaggggagctgccccttccagagcaacacagaggccacagcccctggctttgacaacatccttttcaatgcggatggtgtcaccctcccggcatctgtcaccagtgatccgtagaccaccccagacaaggccccgcttcctcacgtgacatccagcacttggtcagaccctagccagggaccggacacctgccccgcccaggctgggacaggctgcaggtctcaggatatgctgaggcctgggcgttccctgccctgtgctgactctgttgctctgtgaataaacaccctggcccatgagggcagcccaaaaaaacag

SEQ ID NO: 457021 - DNA, 6335 bp, Homo sapiens
  misc_feature (3524)..(3524): n is a, c, g, or t
tccccgtcggtccgcggggctctcgctggagcctccccgactccggtttcccctcgtccagaagcccgacgtaaccaaagcccagtctgtcactttaaacacgccccgccccgcctcccgcggctgtgttgcctcctcgctggagaacaccctggtcgacctctgtgcgtccgtgtgcgcgagcgcgtcccgccgaggcggtgggcagggcggacggtgcgcagtgcgttcccgctggtcggagccagcacactaaccacgccacgcgccctgccgtcccttcgcctccagccgctgcagtctgggccctgcaggagctgggaaaaaccgcagggaggtcttcaggccgatatgcaagtctcccagccgaaggggcaggggacctgaacaggggaagcagagcacctgggcctggccagagctgacacctggctaggagaggaaggaccaagggacggggcgttcccaggtgggagcctggagggcaaagcgtggtgcgagcaggtgagggagagagctagttggtaagcgtggaagcccacccgagggggcttgacctgtcccgagaggtccccgcacacccgctctggccgcacgccgtactgcgggcgtggaggcgcaagcccggcggcccggcctccacctgtcccccaagtgcaccctggtccgcgcccagagctctctggagggtggggtatgcgggagaggggtggaggccaaacgcaagggccctcctggagtccccagccctacttcggagccaggggagggggcaccaagtgagagaaattgggcacccccgcctccgctcctgctttcgcacccggcacgcccatctcgtccccgcgcgtctgcaccggccaggcgtcccgcttgcccacccgccgccgcgccccgcgccccctaccccagggcctctgcattcggccccacccctgagggccggccgggaacgcccctggaccggaataatttccagggggcaagagctttcgaaccaacctcgcgggccgcctaactgccccgttccaagggtgccaccggaccccgctggagaggaacttctccgttggctgatttcatcaccacccattcccgattccacgtttcctttaagcggggctggcggagccgcaaggcggcaaggaactggattgcgattggtcagcacgtgcctcggtcggcggtacaattggctgaggcgctgggccttgggaagcattccccgacgggattggtcgtcgctctcgcagagcccgcctcccgcagtacaagcggcccccgggtcgggtgggaggaggggactccgggaggaggaacatggcggtggcggacctcgctctcattcctgatgtggacatcgactccgacggcgtcttcaagtatgtgctgatccgagtccactcggctccccgctccggggctccggctgcagagagcaaggagatcgtgcgcggctacaagtgggctgagtaccatggtgagggcgggacctgcgggcatgccaggggcacgcctggcgaggcgggggcggggctggcgggacggagacggggctgacgaggcaggggcggggctggcggggcgggggcggggctgcgggccgtagcggactgcgctctgctccgagtcctgcccctgctaggtttgacccaggctgaggtcctgggcgggaagggcgtgacacggcctgacaccctccccagcagtctcccagttcccgcgccctccccggttccaccctccttcgctcattcatccctgtcccagcctcaaggggcttcgtctctcctggggaaggggctgttcagagctgggatttcagaccccttcggctgggagttcctcccgcggcctccaagggcggccagggcacgtcctgaggccgccctcccatcccagcggacatctacgacaaagtgtcgggcgacatgcagaagcaaggctgcgactgtgagtgtctgggcggcgggcgcatctcccaccagagtcaggacaagaagattcacgtgtacggctattccatggcctatggtcctgcccagcacgccatttcaactgagaaaatcaaagccaagtaccccgactacgaggtcacctgggctaacgacggctactgagcactcccagcccggggcctgctgcctccagcagccacttcagagcccccgcctttgcctgcactcctcttgcagggctggccctgcctgctcctgcggcagcctctggtgacgtgctgtccaccaggccttggagacaggctagcctggccacagaattaaacgtgttgccacacctgccggcttctgaactctgtccttggcttcctgcaccctgcgtcaccacctccgggggcccccagaccctaactaaagcagggaccctgtatctggcaccggacagcacctggctgctcaggacgaatgaatgacggcgtgatcctccacagcctgacttaaaggcaccctgtgtggccgcactgctccctctggcccaaccatgcctctgtccagccacctgctgcccgccttggtcctgttcctgggagccctggccaggccgtgtgcaacttcgtgtgtgactgcagggactgctcagatgaggcccagtgtggttaccacggggcctcgcccaccctgggcgcccccttcgcctgtgacttcgagcaggacccctgcggctggcgggacattagtacctcaggctacagctggctccgagacagggcaggggccgcactggagggtcctgggcctcactcagaccacacactgggcaccgacttgggtgaggccagggcaagtctctgtgcgcccctgtcccaataccctccttgctccctgccccgtctcctgacctctcacctgcgccaggctggtacatggccgttggaacccaccgagggaaagaggcatccaccgcagccctgcgctcgccaaccctgcgagaggcagcctcctcttgcaagctgaggctctggtaccacgcggcctctggaggtgcaccctggacccccaaggctcgtggggggtgcccaaggggagggcgggtgggcagctggggacaagcagggccgcagctgccctgggacccctgacattgcagatgtggctgaactgcgggtggagctgacccatggcgcagagaccctgaccctgtggcagagcacagggccctggggccctggctggcaggagttggcagtgaccacaggccgcatccggggtgacttccgagtgaccttctctgccacccgaaatgccacccacaggggcgctgtggctctagatgacctagagttctgggactgtggtctgcccaccccccaggccaactgtcccccgggacaccaccactgccagaacaaggtctgcgtggagccccagcagctgtgcgacggggaagacaactgcggggacctgtctgatgagaacccactcacctgtggccgccacatagccaccgactttgagacaggcctgggcccatggaaccgctcggaaggctggtcccggaaccaccgngctggtggtcctgagcgcccctcctggccacgccgtgaccacagccggaacagtgcacaggctggtcttctatcagtacctgagtgggtctgaggctggctgcctccagctgttcctgcagactctggggcccggcgccccccgggcccccgtcctgctgcggaggcgccgaggggagctggggaccgcctgggtccgagaccgtgttgacatccagagcgcctaccccttccagatcctcctggccgggcagacaggcccggggggcgtcgtgggtctggacgacctcatcctgtctgaccactgcagaccagtctcggaggtgtccaccctgcagccgctgcctcctgggccccgggccccagccccccagcccctgccgcccagctcgcggctccaggattcctgcaagcaggggcatcttgcctgcggggacctgtgtgtgcccccggaacaactgtgtgacttcgaggagcagtgcgcagggggcgaggacgagcaggcctgtggcaccacagactttgagtcccccgaggctgggggctgggaggacgccagcgtggggcggctgcagtggcggcgtgtctcagcccaggagagccaggggtccagtgcagctgctgctgggcacttcctgtctctgcagcgggcctgggggcagctaggcgctgaggcccgggtcctcacacccctccttggcccttctggccccagctgtgaactccacctggcttattatttacagagccagccccgagctggagtttgtcggtttggtggacttggatggccctgaccagcagggagctggggtggacaacgtgaccctgagggactgtagccccacagtgaccaccgagagagacagaggttcctgctgcccatcctcactcccacctgggtgctccccttacactcctccagggaccccggagcttccaccttctcagggctctggagggggaggggagaaggtgtgtgacgccacctggccccacccccagaggtctcctgtaactttgagcgggacacatgcagctggtacccaggccacctctcagacacacactggcgctgggtggagagccgcggccctgaccacgaccacaccacaggccaaggccactttgtgctcctggaccccacagaccccctggcctggggccacagtgcccacctgctctccaggccccaggtgccagcagcacccacggagtgtctcagcttctggtaccacctccatgggccccagattgggactctgcgcctagccatgagacgggaaggggaggagacacacctgtggtcgcggtcaggcacccagggcaaccgctggcacgaggcctgggccaccctttcccaccagcctggctcccatgcccagtaccagctgctgttcgagggcctccgggacggataccacggcaccatggcgctggacgatgtggccgtgcggccgggcccctgctgggcccctaattactgctcctttgaggactcagactgcggcttctcccctggaggccaaggtctctggaggcggcaggccaatgcctcgggccatgctgcctggggccccccaacagaccataccactgagacagcccaagggcactacatggtggtggacacaagcccagacgcactaccccggggccagacggcctccctgacctccaaggagcacaggcccctggcccagcctgcttgtctgaccttctggtaccacgggagcctccgcagcccaggcaccctgcgggtctacctggaggagcgcgggaggcaccaggtgctcagcctcagtgcccacggcgggcttgcctggcgcctgggcagcatggacgtgcaggccgagcgagcctggagggttcctgtgattttgagtctggcctgtgtggctggagccacctggcctggcccggcctgggcggatacagctgggactggggcgggggagccaccccctctcgttacccccagccccctgtggaccacaccctgggcacagaggcaggccactttgccttctttgaaactggcgtgctgggccccgggggccgggccgcctggctgcgcagcgagcctctgccggccaccccagcctcctgcctccgcttctggtaccacatgggttttcctgagcacttctacaagggggagctgaaggtactgctgcacagtgctcagggccagctggctgtgtggggcgcaggcgggcatcggcggcaccagtggctggaggcccaggtggaggtagccagtgccaaggagttccagatcgtgtttgaagccactctgggcggccagccagccctggggcccattgccctggatgacgtggagtatctggctgggcagcattgccagcagcctgcccccagcccggggaacacagccgcacccgggtctgtgccagctgtggttggcagtgccctcctattgctcatgctcctggtgctgctgggacttgggggacggcgctggctgcagaagaaggggagctgccccttccagagcaacacagaggccacagcccctggctttgacaacatccttttcaatgcggatggtgtcaccctcccggcatctgtcaccagtgatccgtagaccaccccagacaaggccccgcttcctcacgtgacatccagcacttggtcagaccctagccagggaccggacacctgccccgcccaggctgggacaggctgcaggtctcaggatatgctgaggcctgggcgttccctgccctgtgctgactctgttgctctgtgaataaacaccctggcccatgagggcagcccaaaaaaacag

SEQ ID NO: 457022 - DNA, 5970 bp, Homo sapiens
  misc_feature (3159)..(3159): n is a, c, g, or t
tccccgtcggtccgcggggctctcgctggagcctccccgactccggtttcccctcgtccagaagcccgacgtaaccaaagcccagtctgtcactttaaacacgccccgccccgcctcccgcggctgtgttgcctcctcgctggagaacaccctggtcgacctctgtgcgtccgtgtgcgcgagcgcgtcccgccgaggcggtgggcagggcggacggtgcgcagtgcgttcccgctggtcggagccagcacactaaccacgccacgcgccctgccgtcccttcgcctccagccgctgcagtctgggccctgcaggagctgggaaaaaccgcagggaggtcttcaggccgatatgcaagtctcccagccgaaggggcaggggacctgaacaggggaagcagagcacctgggcctggccagagctgacacctggctaggagaggaaggaccaagggacggggcgttcccaggtgggagcctggagggcaaagcgtggtgcgagcaggtgagggagagagctagttggtaagcgtggaagcccacccgagggggcttgacctgtcccgagaggtccccgcacacccgctctggccgcacgccgtactgcgggcgtggaggcgcaagcccggcggcccggcctccacctgtcccccaagtgcaccctggtccgcgcccagagctctctggagggtggggtatgcgggagaggggtggaggccaaacgcaagggccctcctggagtccccagccctacttcggagccaggggagggggcaccaagtgagagaaattgggcacccccgcctccgctcctgctttcgcacccggcacgcccatctcgtccccgcgcgtctgcaccggccaggcgtcccgcttgcccacccgccgccgcgccccgcgccccctaccccagggcctctgcattcggccccacccctgagggccggccgggaacgcccctggaccggaataatttccagggggcaagagctttcgaaccaacctcgcgggccgcctaactgccccgttccaagggtgccaccggaccccgctggagaggaacttctccgttggctgatttcatcaccacccattcccgattccacgtttcctttaagcggggctggcggagccgcaaggcggcaaggaactggattgcgattggtcagcacgtgcctcggtcggcggtacaattggctgaggcgctgggccttgggaagcattccccgacgggattggtcgtcgctctcgcagagcccgcctcccgcagtacaagcggcccccgggtcgggtgggaggaggggactccgggaggaggaacatggcggtggcggacctcgctctcattcctgatgtggacatcgactccgacggcgtcttcaagtatgtgctgatccgagtccactcggctccccgctccggggctccggctgcagagagcaaggagatcgtgcgcggctacaagtgggctgagtaccatgcggacatctacgacaaagtgtcgggcgacatgcagaagcaaggctgcgactgtgagtgtctgggcggcgggcgcatctcccaccagagtcaggacaagaagattcacgtgtacggctattccatgagatgagacccacgtgcgtccctctgggcgcctcaggccccaggatccaccatcaaggcctatggtcctgcccagcacgccatttcaactgagaaaatcaaagccaagtaccccgactacgaggtcacctgggctaacgacggctactgagcactcccagcccggggcctgctgcctccagcagccacttcagagcccccgcctttgcctgcactcctcttgcagggctggccctgcctgctcctgcggcagcctctggtgacgtgctgtccaccaggccttggagacaggctagcctggccacagaattaaacgtgttgccacacctgccggcttctgaactctgtccttggcttcctgcaccctgcgtcaccacctccgggggcccccagaccctaactaaagcagggaccctgtatctggcaccggacagcacctggctgctcaggacgaatgaatgacggcgtgatcctccacagcctgacttaaaggcaccctgtgtggccgcactgctccctctggcccaaccatgcctctgtccagccacctgctgcccgccttggtcctgttcctgggagccctggccaggccgtgtgcaacttcgtgtgtgactgcagggactgctcagatgaggcccagtgtggttaccacggggcctcgcccaccctgggcgcccccttcgcctgtgacttcgagcaggacccctgcggctggcgggacattagtacctcaggctacagctggctccgagacagggcaggggccgcactggagggtcctgggcctcactcagaccacacactgggcaccgacttgggtgaggccagggcaagtctctgtgcgcccctgtcccaataccctccttgctccctgccccgtctcctgacctctcacctgcgccaggctggtacatggccgttggaacccaccgagggaaagaggcatccaccgcagccctgcgctcgccaaccctgcgagaggcagcctcctcttgcaagctgaggctctggtaccacgcggcctctggaggtgcaccctggacccccaaggctcgtggggggtgcccaaggggagggcgggtgggcagctggggacaagcagggccgcagctgccctgggacccctgacattgcagatgtggctgaactgcgggtggagctgacccatggcgcagagaccctgaccctgtggcagagcacagggccctggggccctggctggcaggagttggcagtgaccacaggccgcatccggggtgacttccgagtgaccttctctgccacccgaaatgccacccacaggggcgctgtggctctagatgacctagagttctgggactgtggtctgcccaccccccaggccaactgtcccccgggacaccaccactgccagaacaaggtctgcgtggagccccagcagctgtgcgacggggaagacaactgcggggacctgtctgatgagaacccactcacctgtggccgccacatagccaccgactttgagacaggcctgggcccatggaaccgctcggaaggctggtcccggaaccaccgngctggtggtcctgagcgcccctcctggccacgccgtgaccacagccggaacagtgcacaggctggtcttctatcagtacctgagtgggtctgaggctggctgcctccagctgttcctgcagactctggggcccggcgccccccgggcccccgtcctgctgcggaggcgccgaggggagctggggaccgcctgggtccgagaccgtgttgacatccagagcgcctaccccttccagatcctcctggccgggcagacaggcccggggggcgtcgtgggtctggacgacctcatcctgtctgaccactgcagaccagtctcggaggtgtccaccctgcagccgctgcctcctgggccccgggccccagccccccagcccctgccgcccagctcgcggctccaggattcctgcaagcaggggcatcttgcctgcggggacctgtgtgtgcccccggaacaactgtgtgacttcgaggagcagtgcgcagggggcgaggacgagcaggcctgtggcaccacagactttgagtcccccgaggctgggggctgggaggacgccagcgtggggcggctgcagtggcggcgtgtctcagcccaggagagccaggggtccagtgcagctgctgctgggcacttcctgtctctgcagcgggcctgggggcagctaggcgctgaggcccgggtcctcacacccctccttggcccttctggccccagctgtgaactccacctggcttattatttacagagccagccccgagctggagtttgtcggtttggtggacttggatggccctgaccagcagggagctggggtggacaacgtgaccctgagggactgtagccccacagtgaccaccgagagagacagaggttcctgctgcccatcctcactcccacctgggtgctccccttacactcctccagggaccccggagcttccaccttctcagggctctggagggggaggggagaaggtgtgtgacgccacctggccccacccccagaggtctcctgtaactttgagcgggacacatgcagctggtacccaggccacctctcagacacacactggcgctgggtggagagccgcggccctgaccacgaccacaccacaggccaaggccactttgtgctcctggaccccacagaccccctggcctggggccacagtgcccacctgctctccaggccccaggtgccagcagcacccacggagtgtctcagcttctggtaccacctccatgggccccagattgggactctgcgcctagccatgagacgggaaggggaggagacacacctgtggtcgcggtcaggcacccagggcaaccgctggcacgaggcctgggccaccctttcccaccagcctggctcccatgcccagtaccagctgctgttcgagggcctccgggacggataccacggcaccatggcgctggacgatgtggccgtgcggccgggcccctgctgggcccctaattactgctcctttgaggactcagactgcggcttctcccctggaggccaaggtctctggaggcggcaggccaatgcctcgggccatgctgcctggggccccccaacagaccataccactgagacagcccaagggcactacatggtggtggacacaagcccagacgcactaccccggggccagacggcctccctgacctccaaggagcacaggcccctggcccagcctgcttgtctgaccttctggtaccacgggagcctccgcagcccaggcaccctgcgggtctacctggaggagcgcgggaggcaccaggtgctcagcctcagtgcccacggcgggcttgcctggcgcctgggcagcatggacgtgcaggccgagcgagcctggagggttcctgtgattttgagtctggcctgtgtggctggagccacctggcctggcccggcctgggcggatacagctgggactggggcgggggagccaccccctctcgttacccccagccccctgtggaccacaccctgggcacagaggcaggccactttgccttctttgaaactggcgtgctgggccccgggggccgggccgcctggctgcgcagcgagcctctgccggccaccccagcctcctgcctccgcttctggtaccacatgggttttcctgagcacttctacaagggggagctgaaggtactgctgcacagtgctcagggccagctggctgtgtggggcgcaggcgggcatcggcggcaccagtggctggaggcccaggtggaggtagccagtgccaaggagttccagatcgtgtttgaagccactctgggcggccagccagccctggggcccattgccctggatgacgtggagtatctggctgggcagcattgccagcagcctgcccccagcccggggaacacagccgcacccgggtctgtgccagctgtggttggcagtgccctcctattgctcatgctcctggtgctgctgggacttgggggacggcgctggctgcagaagaaggggagctgccccttccagagcaacacagaggccacagcccctggctttgacaacatccttttcaatgcggatggtgtcaccctcccggcatctgtcaccagtgatccgtagaccaccccagacaaggccccgcttcctcacgtgacatccagcacttggtcagaccctagccagggaccggacacctgccccgcccaggctgggacaggctgcaggtctcaggatatgctgaggcctgggcgttccctgccctgtgctgactctgttgctctgtgaataaacaccctggcccatgagggcagcccaaaaaaacag

SEQ ID NO: 457023 - DNA, 5264 bp, Homo sapiens
  misc_feature (2453)..(2453): n is a, c, g, or t
ctccttgtaccggtagcggggttggggacggaagccttcggtcggtggagaggagaaagggagaggccttcgggcggtggacggggaagagagggagtccttcgggcggtggagggggtggagagcgaggccttcgggcggtggagagcggggaggggggaggccttcgggcggtgggagggggagagagggaggcctttgggcggtgggggccacggggagggtggtcttcggactacgtgcgggacaggaggtcagggctggcaagtccctcaggcctccctcgttgccccagcctcgcgggccgcctaactgccccgttccaagggtgccaccggaccccgctggagaggaacttctccgttggctgatttcatcaccacccattcccgattccacgtttcctttaagcggggctggcggagccgcaaggcggcaaggaactggattgcgattggtcagcacgtgcctcggtcggcggtacaattggctgaggcgctgggccttgggaagcattccccgacgggattggtcgtcgctctcgcagagcccgcctcccgcagtacaagcggcccccgggtcgggtgggaggaggggactccgggaggaggaacatggcggtggcggacctcgctctcattcctgatgtggacatcgactccgacggcgtcttcaagtatgtgctgatccgagtccactcggctccccgctccggggctccggctgcagagagcaaggagatcgtgcgcggctacaagtgggctgagtaccatgcggacatctacgacaaagtgtcgggcgacatgcagaagcaaggctgcgactgtgagtgtctgggcggcgggcgcatctcccaccagagtcaggacaagaagattcacgtgtacggctattccatgagatgagacccacgtgcgtccctctgggcgcctcaggccccaggatccaccatcaaggcctatggtcctgcccagcacgccatttcaactgagaaaatcaaagccaagtaccccgactacgaggtcacctgggctaacgacggctactgagcactcccagcccggggcctgctgcctccagcagccacttcagagcccccgcctttgcctgcactcctcttgcagggctggccctgcctgctcctgcggcagcctctggtgacgtgctgtccaccaggccttggagacaggctagcctggccacagaattaaacgtgttgccacacctgccggcttctgaactctgtccttggcttcctgcaccctgcgtcaccacctccgggggcccccagaccctaactaaagcagggaccctgtatctggcaccggacagcacctggctgctcaggacgaatgaatgacggcgtgatcctccacagcctgacttaaaggcaccctgtgtggccgcactgctccctctggcccaaccatgcctctgtccagccacctgctgcccgccttggtcctgttcctgggagccctggccaggccgtgtgcaacttcgtgtgtgactgcagggactgctcagatgaggcccagtgtggttaccacggggcctcgcccaccctgggcgcccccttcgcctgtgacttcgagcaggacccctgcggctggcgggacattagtacctcaggctacagctggctccgagacagggcaggggccgcactggagggtcctgggcctcactcagaccacacactgggcaccgacttgggtgaggccagggcaagtctctgtgcgcccctgtcccaataccctccttgctccctgccccgtctcctgacctctcacctgcgccaggctggtacatggccgttggaacccaccgagggaaagaggcatccaccgcagccctgcgctcgccaaccctgcgagaggcagcctcctcttgcaagctgaggctctggtaccacgcggcctctggaggtgcaccctggacccccaaggctcgtggggggtgcccaaggggagggcgggtgggcagctggggacaagcagggccgcagctgccctgggacccctgacattgcagatgtggctgaactgcgggtggagctgacccatggcgcagagaccctgaccctgtggcagagcacagggccctggggccctggctggcaggagttggcagtgaccacaggccgcatccggggtgacttccgagtgaccttctctgccacccgaaatgccacccacaggggcgctgtggctctagatgacctagagttctgggactgtggtctgcccaccccccaggccaactgtcccccgggacaccaccactgccagaacaaggtctgcgtggagccccagcagctgtgcgacggggaagacaactgcggggacctgtctgatgagaacccactcacctgtggccgccacatagccaccgactttgagacaggcctgggcccatggaaccgctcggaaggctggtcccggaaccaccgngctggtggtcctgagcgcccctcctggccacgccgtgaccacagccggaacagtgcacaggctggtcttctatcagtacctgagtgggtctgaggctggctgcctccagctgttcctgcagactctggggcccggcgccccccgggcccccgtcctgctgcggaggcgccgaggggagctggggaccgcctgggtccgagaccgtgttgacatccagagcgcctaccccttccagatcctcctggccgggcagacaggcccggggggcgtcgtgggtctggacgacctcatcctgtctgaccactgcagaccagtctcggaggtgtccaccctgcagccgctgcctcctgggccccgggccccagccccccagcccctgccgcccagctcgcggctccaggattcctgcaagcaggggcatcttgcctgcggggacctgtgtgtgcccccggaacaactgtgtgacttcgaggagcagtgcgcagggggcgaggacgagcaggcctgtggcaccacagactttgagtcccccgaggctgggggctgggaggacgccagcgtggggcggctgcagtggcggcgtgtctcagcccaggagagccaggggtccagtgcagctgctgctgggcacttcctgtctctgcagcgggcctgggggcagctaggcgctgaggcccgggtcctcacacccctccttggcccttctggccccagctgtgaactccacctggcttattatttacagagccagccccgagctggagtttgtcggtttggtggacttggatggccctgaccagcagggagctggggtggacaacgtgaccctgagggactgtagccccacagtgaccaccgagagagacagaggttcctgctgcccatcctcactcccacctgggtgctccccttacactcctccagggaccccggagcttccaccttctcagggctctggagggggaggggagaaggtgtgtgacgccacctggccccacccccagaggtctcctgtaactttgagcgggacacatgcagctggtacccaggccacctctcagacacacactggcgctgggtggagagccgcggccctgaccacgaccacaccacaggccaaggccactttgtgctcctggaccccacagaccccctggcctggggccacagtgcccacctgctctccaggccccaggtgccagcagcacccacggagtgtctcagcttctggtaccacctccatgggccccagattgggactctgcgcctagccatgagacgggaaggggaggagacacacctgtggtcgcggtcaggcacccagggcaaccgctggcacgaggcctgggccaccctttcccaccagcctggctcccatgcccagtaccagctgctgttcgagggcctccgggacggataccacggcaccatggcgctggacgatgtggccgtgcggccgggcccctgctgggcccctaattactgctcctttgaggactcagactgcggcttctcccctggaggccaaggtctctggaggcggcaggccaatgcctcgggccatgctgcctggggccccccaacagaccataccactgagacagcccaagggcactacatggtggtggacacaagcccagacgcactaccccggggccagacggcctccctgacctccaaggagcacaggcccctggcccagcctgcttgtctgaccttctggtaccacgggagcctccgcagcccaggcaccctgcgggtctacctggaggagcgcgggaggcaccaggtgctcagcctcagtgcccacggcgggcttgcctggcgcctgggcagcatggacgtgcaggccgagcgagcctggagggttcctgtgattttgagtctggcctgtgtggctggagccacctggcctggcccggcctgggcggatacagctgggactggggcgggggagccaccccctctcgttacccccagccccctgtggaccacaccctgggcacagaggcaggccactttgccttctttgaaactggcgtgctgggccccgggggccgggccgcctggctgcgcagcgagcctctgccggccaccccagcctcctgcctccgcttctggtaccacatgggttttcctgagcacttctacaagggggagctgaaggtactgctgcacagtgctcagggccagctggctgtgtggggcgcaggcgggcatcggcggcaccagtggctggaggcccaggtggaggtagccagtgccaaggagttccagatcgtgtttgaagccactctgggcggccagccagccctggggcccattgccctggatgacgtggagtatctggctgggcagcattgccagcagcctgcccccagcccggggaacacagccgcacccgggtctgtgccagctgtggttggcagtgccctcctattgctcatgctcctggtgctgctgggacttgggggacggcgctggctgcagaagaaggggagctgccccttccagagcaacacagaggccacagcccctggctttgacaacatccttttcaatgcggatggtgtcaccctcccggcatctgtcaccagtgatccgtagaccaccccagacaaggccccgcttcctcacgtgacatccagcacttggtcagaccctagccagggaccggacacctgccccgcccaggctgggacaggctgcaggtctcaggatatgctgaggcctgggcgttccctgccctgtgctgactctgttgctctgtgaataaacaccctggcccatgagggcagcccaaaaaaacag

SEQ ID NO: 457024 - DNA, 6281 bp, Homo sapiens
  misc_feature (3470)..(3470): n is a, c, g, or t
tccccgtcggtccgcggggctctcgctggagcctccccgactccggtttcccctcgtccagaagcccgacgtaaccaaagcccagtctgtcactttaaacacgccccgccccgcctcccgcggctgtgttgcctcctcgctggagaacaccctggtcgacctctgtgcgtccgtgtgcgcgagcgcgtcccgccgaggcggtgggcagggcggacggtgcgcagtgcgttcccgctggtcggagccagcacactaaccacgccacgcgccctgccgtcccttcgcctccagccgctgcagtctgggccctgcaggagctgggaaaaaccgcagggaggtcttcaggccgatatgcaagtctcccagccgaaggggcaggggacctgaacaggggaagcagagcacctgggcctggccagagctgacacctggctaggagaggaaggaccaagggacggggcgttcccaggtgggagcctggagggcaaagcgtggtgcgagcaggtgagggagagagctagttggtaagcgtggaagcccacccgagggggcttgacctgtcccgagaggtccccgcacacccgctctggccgcacgccgtactgcgggcgtggaggcgcaagcccggcggcccggcctccacctgtcccccaagtgcaccctggtccgcgcccagagctctctggagggtggggtatgcgggagaggggtggaggccaaacgcaagggccctcctggagtccccagccctacttcggagccaggggagggggcaccaagtgagagaaattgggcacccccgcctccgctcctgctttcgcacccggcacgcccatctcgtccccgcgcgtctgcaccggccaggcgtcccgcttgcccacccgccgccgcgccccgcgccccctaccccagggcctctgcattcggccccacccctgagggccggccgggaacgcccctggaccggaataatttccagggggcaagagctttcgaaccaacctcgcgggccgcctaactgccccgttccaagggtgccaccggaccccgctggagaggaacttctccgttggctgatttcatcaccacccattcccgattccacgtttcctttaagcggggctggcggagccgcaaggcggcaaggaactggattgcgattggtcagcacgtgcctcggtcggcggtacaattggctgaggcgctgggccttgggaagcattccccgacgggattggtcgtcgctctcgcagagcccgcctcccgcagtacaagcggcccccgggtcgggtgggaggaggggactccgggaggaggaacatggcggtggcggacctcgctctcattcctgatgtggacatcgactccgacggcgtcttcaagtatgtgctgatccgagtccactcggctccccgctccggggctccggctgcagagagcaaggagatcgtgcgcggctacaagtgggctgagtaccatggtgagggcgggacctgcgggcatgccaggggcacgcctggcgaggcgggggcggggctggcgggacggagacggggctgacgaggcaggggcggggctggcggggcgggggcggggctgcgggccgtagcggactgcgctctgctccgagtcctgcccctgctaggtttgacccaggctgaggtcctgggcgggaagggcgtgacacggcctgacaccctccccagcagtctcccagttcccgcgccctccccggttccaccctccttcgctcattcatccctgtcccagcctcaaggggcttcgtctctcctggggaaggggctgttcagagctgggatttcagaccccttcggctgggagttcctcccgcggcctccaagggcggccagggcacgtcctgaggccgccctcccatcccagcggacatctacgacaaagtgtcgggcgacatgcagaagcaaggctgcgactgtgagtgtctgggcggcgggcgcatctcccaccagagtcaggacaagaagattcacgtgtacggctattccatggcctatggtcctgcccagcacgccatttcaactgagtgagcactcccagcccggggcctgctgcctccagcagccacttcagagcccccgcctttgcctgcactcctcttgcagggctggccctgcctgctcctgcggcagcctctggtgacgtgctgtccaccaggccttggagacaggctagcctggccacagaattaaacgtgttgccacacctgccggcttctgaactctgtccttggcttcctgcaccctgcgtcaccacctccgggggcccccagaccctaactaaagcagggaccctgtatctggcaccggacagcacctggctgctcaggacgaatgaatgacggcgtgatcctccacagcctgacttaaaggcaccctgtgtggccgcactgctccctctggcccaaccatgcctctgtccagccacctgctgcccgccttggtcctgttcctgggagccctggccaggccgtgtgcaacttcgtgtgtgactgcagggactgctcagatgaggcccagtgtggttaccacggggcctcgcccaccctgggcgcccccttcgcctgtgacttcgagcaggacccctgcggctggcgggacattagtacctcaggctacagctggctccgagacagggcaggggccgcactggagggtcctgggcctcactcagaccacacactgggcaccgacttgggtgaggccagggcaagtctctgtgcgcccctgtcccaataccctccttgctccctgccccgtctcctgacctctcacctgcgccaggctggtacatggccgttggaacccaccgagggaaagaggcatccaccgcagccctgcgctcgccaaccctgcgagaggcagcctcctcttgcaagctgaggctctggtaccacgcggcctctggaggtgcaccctggacccccaaggctcgtggggggtgcccaaggggagggcgggtgggcagctggggacaagcagggccgcagctgccctgggacccctgacattgcagatgtggctgaactgcgggtggagctgacccatggcgcagagaccctgaccctgtggcagagcacagggccctggggccctggctggcaggagttggcagtgaccacaggccgcatccggggtgacttccgagtgaccttctctgccacccgaaatgccacccacaggggcgctgtggctctagatgacctagagttctgggactgtggtctgcccaccccccaggccaactgtcccccgggacaccaccactgccagaacaaggtctgcgtggagccccagcagctgtgcgacggggaagacaactgcggggacctgtctgatgagaacccactcacctgtggccgccacatagccaccgactttgagacaggcctgggcccatggaaccgctcggaaggctggtcccggaaccaccgngctggtggtcctgagcgcccctcctggccacgccgtgaccacagccggaacagtgcacaggctggtcttctatcagtacctgagtgggtctgaggctggctgcctccagctgttcctgcagactctggggcccggcgccccccgggcccccgtcctgctgcggaggcgccgaggggagctggggaccgcctgggtccgagaccgtgttgacatccagagcgcctaccccttccagatcctcctggccgggcagacaggcccggggggcgtcgtgggtctggacgacctcatcctgtctgaccactgcagaccagtctcggaggtgtccaccctgcagccgctgcctcctgggccccgggccccagccccccagcccctgccgcccagctcgcggctccaggattcctgcaagcaggggcatcttgcctgcggggacctgtgtgtgcccccggaacaactgtgtgacttcgaggagcagtgcgcagggggcgaggacgagcaggcctgtggcaccacagactttgagtcccccgaggctgggggctgggaggacgccagcgtggggcggctgcagtggcggcgtgtctcagcccaggagagccaggggtccagtgcagctgctgctgggcacttcctgtctctgcagcgggcctgggggcagctaggcgctgaggcccgggtcctcacacccctccttggcccttctggccccagctgtgaactccacctggcttattatttacagagccagccccgagctggagtttgtcggtttggtggacttggatggccctgaccagcagggagctggggtggacaacgtgaccctgagggactgtagccccacagtgaccaccgagagagacagaggttcctgctgcccatcctcactcccacctgggtgctccccttacactcctccagggaccccggagcttccaccttctcagggctctggagggggaggggagaaggtgtgtgacgccacctggccccacccccagaggtctcctgtaactttgagcgggacacatgcagctggtacccaggccacctctcagacacacactggcgctgggtggagagccgcggccctgaccacgaccacaccacaggccaaggccactttgtgctcctggaccccacagaccccctggcctggggccacagtgcccacctgctctccaggccccaggtgccagcagcacccacggagtgtctcagcttctggtaccacctccatgggccccagattgggactctgcgcctagccatgagacgggaaggggaggagacacacctgtggtcgcggtcaggcacccagggcaaccgctggcacgaggcctgggccaccctttcccaccagcctggctcccatgcccagtaccagctgctgttcgagggcctccgggacggataccacggcaccatggcgctggacgatgtggccgtgcggccgggcccctgctgggcccctaattactgctcctttgaggactcagactgcggcttctcccctggaggccaaggtctctggaggcggcaggccaatgcctcgggccatgctgcctggggccccccaacagaccataccactgagacagcccaagggcactacatggtggtggacacaagcccagacgcactaccccggggccagacggcctccctgacctccaaggagcacaggcccctggcccagcctgcttgtctgaccttctggtaccacgggagcctccgcagcccaggcaccctgcgggtctacctggaggagcgcgggaggcaccaggtgctcagcctcagtgcccacggcgggcttgcctggcgcctgggcagcatggacgtgcaggccgagcgagcctggagggttcctgtgattttgagtctggcctgtgtggctggagccacctggcctggcccggcctgggcggatacagctgggactggggcgggggagccaccccctctcgttacccccagccccctgtggaccacaccctgggcacagaggcaggccactttgccttctttgaaactggcgtgctgggccccgggggccgggccgcctggctgcgcagcgagcctctgccggccaccccagcctcctgcctccgcttctggtaccacatgggttttcctgagcacttctacaagggggagctgaaggtactgctgcacagtgctcagggccagctggctgtgtggggcgcaggcgggcatcggcggcaccagtggctggaggcccaggtggaggtagccagtgccaaggagttccagatcgtgtttgaagccactctgggcggccagccagccctggggcccattgccctggatgacgtggagtatctggctgggcagcattgccagcagcctgcccccagcccggggaacacagccgcacccgggtctgtgccagctgtggttggcagtgccctcctattgctcatgctcctggtgctgctgggacttgggggacggcgctggctgcagaagaaggggagctgccccttccagagcaacacagaggccacagcccctggctttgacaacatccttttcaatgcggatggtgtcaccctcccggcatctgtcaccagtgatccgtagaccaccccagacaaggccccgcttcctcacgtgacatccagcacttggtcagaccctagccagggaccggacacctgccccgcccaggctgggacaggctgcaggtctcaggatatgctgaggcctgggcgttccctgccctgtgctgactctgttgctctgtgaataaacaccctggcccatgagggcagcccaaaaaaacag

SEQ ID NO: 457025 - DNA, 2490 bp, Homo sapiens
tccccgtcggtccgcggggctctcgctggagcctccccgactccggtttcccctcgtccagaagcccgacgtaaccaaagcccagtctgtcactttaaacacgccccgccccgcctcccgcggctgtgttgcctcctcgctggagaacaccctggtcgacctctgtgcgtccgtgtgcgcgagcgcgtcccgccgaggcggtgggcagggcggacggtgcgcagtgcgttcccgctggtcggagccagcacactaaccacgccacgcgccctgccgtcccttcgcctccagccgctgcagtctgggccctgcaggagctgggaaaaaccgcagggaggtcttcaggccgatatgcaagtctcccagccgaaggggcaggggacctgaacaggggaagcagagcacctgggcctggccagagctgacacctggctaggagaggaaggaccaagggacggggcgttcccaggtgggagcctggagggcaaagcgtggtgcgagcaggtgagggagagagctagttggtaagcgtggaagcccacccgagggggcttgacctgtcccgagaggtccccgcacacccgctctggccgcacgccgtactgcgggcgtggaggcgcaagcccggcggcccggcctccacctgtcccccaagtgcaccctggtccgcgcccagagctctctggagggtggggtatgcgggagaggggtggaggccaaacgcaagggccctcctggagtccccagccctacttcggagccaggggagggggcaccaagtgagagaaattgggcacccccgcctccgctcctgctttcgcacccggcacgcccatctcgtccccgcgcgtctgcaccggccaggcgtcccgcttgcccacccgccgccgcgccccgcgccccctaccccagggcctctgcattcggccccacccctgagggccggccgggaacgcccctggaccggaataatttccagggggcaagagctttcgaaccaacctcgcgggccgcctaactgccccgttccaagggtgccaccggaccccgctggagaggaacttctccgttggctgatttcatcaccacccattcccgattccacgtttcctttaagcggggctggcggagccgcaaggcggcaaggaactggattgcgattggtcagcacgtgcctcggtcggcggtacaattggctgaggcgctgggccttgggaagcattccccgacgggattggtcgtcgctctcgcagagcccgcctcccgcagtacaagcggcccccgggtcgggtgggaggaggggactccgggaggaggaacatggcggtggcggacctcgctctcattcctgatgtggacatcgactccgacggcgtcttcaagtatgtgctgatccgagtccactcggctccccgctccggggctccggctgcagagagcaaggagatcgtgcgcggctacaagtgggctgagtaccatgcggacatctacgacaaagtgtcgggcgacatgcagaagcaaggctgcgactgtgagtgtctgggcggcgggcgcatctcccaccagagtcaggacaagaagattcacgtgtacggctattccatggtgagccgcagccccgtcccgccctgccggaggccccagtaccagcttcgaggcccacctgagcctgctgccctgacccgtggccccagctgagcacgcaggcttcctggggttctcccagggtcggcggcagagccctccctccagggcccattgtgttcctgcattcccccatggagcacacgccagacctgaggggtgggacggacacccccaggcatggccggctgtctcctctccctgccttgggaggccttgctgggctctagctgtcctccagcactttgggccctgggcccccagaggcagtcagtacctgggtggagctcagagtccccacctgtgctcttcacaaaaaccaccagcagatgagacccacgtgcgtccctctgggcgcctcaggccccaggatccaccatcaaggtttgcttgcctgtggaggtcgcctctccccaggggagcccccaagggcggtcgggatggtgggtttggcatccccaggcactgcctatccctttcccacactcgcttctggtgtggctggtggctggatgcccagagccgggtatcgggttgaagggtccaggtagtgccagcaggcgtcttctcttctccaggcctatggtcctgcccagcacgccatttcaactgagaaaatcaaagccaagtaccccgactacgaggtcacctgggctaacgacggctactgagcactcccagcccggggcctgctgcctccagcagccacttcagagcccccgcctttgcctgcactcctcttgcagggctggccctgcctgctcctgcggcagcctctggtgacgtgctgtccaccaggccttggagacaggctagcctggccacagaattaaacgtgttgccaca

SEQ ID NO: 457026 - DNA, 2296 bp, Homo sapiens
tccccgtcggtccgcggggctctcgctggagcctccccgactccggtttcccctcgtccagaagcccgacgtaaccaaagcccagtctgtcactttaaacacgccccgccccgcctcccgcggctgtgttgcctcctcgctggagaacaccctggtcgacctctgtgcgtccgtgtgcgcgagcgcgtcccgccgaggcggtgggcagggcggacggtgcgcagtgcgttcccgctggtcggagccagcacactaaccacgccacgcgccctgccgtcccttcgcctccagccgctgcagtctgggccctgcaggagctgggaaaaaccgcagggaggtcttcaggccgatatgcaagtctcccagccgaaggggcaggggacctgaacaggggaagcagagcacctgggcctggccagagctgacacctggctaggagaggaaggaccaagggacggggcgttcccaggtgggagcctggagggcaaagcgtggtgcgagcaggtgagggagagagctagttggtaagcgtggaagcccacccgagggggcttgacctgtcccgagaggtccccgcacacccgctctggccgcacgccgtactgcgggcgtggaggcgcaagcccggcggcccggcctccacctgtcccccaagtgcaccctggtccgcgcccagagctctctggagggtggggtatgcgggagaggggtggaggccaaacgcaagggccctcctggagtccccagccctacttcggagccaggggagggggcaccaagtgagagaaattgggcacccccgcctccgctcctgctttcgcacccggcacgcccatctcgtccccgcgcgtctgcaccggccaggcgtcccgcttgcccacccgccgccgcgccccgcgccccctaccccagggcctctgcattcggccccacccctgagggccggccgggaacgcccctggaccggaataatttccagggggcaagagctttcgaaccaacctcgcgggccgcctaactgccccgttccaagggtgccaccggaccccgctggagaggaacttctccgttggctgatttcatcaccacccattcccgattccacgtttcctttaagcggggctggcggagccgcaaggcggcaaggaactggattgcgattggtcagcacgtgcctcggtcggcggtacaattggctgaggcgctgggccttgggaagcattccccgacgggattggtcgtcgctctcgcagagcccgcctcccgcagtacaagcggcccccgggtcgggtgggaggaggggactccgggaggaggaacatggcggtggcggacctcgctctcattcctgatgtggacatcgactccgacggcgtcttcaagtatgtgctgatccgagtccactcggctccccgctccggggctccggctgcagagagcaaggagatcgtgcgcggctacaagtgggctgagtaccatgcggacatctacgacaaagtgtcgggcgacatgcagaagcaaggctgcgactgtgagtgtctgggcggcgggcgcatctcccaccagagtcaggacaagaagattcacgtgtacggctattccatggtgagccgcagccccgtcccgccctgccggaggccccagtaccagcttcgaggcccacctgagcctgctgccctgacccgtggccccagctgagcacgcaggcttcctggggttctcccagggtcggcggcagagccctccctccagggcccattgtgttcctgcattcccccatggagcacacgccagacctgaggggtgggacggacacccccaggcatggccggctgtctcctctccctgccttgggaggccttgctgggctctagctgtcctccagcactttgggccctgggcccccagaggcagtcagtacctgggtggagctcagagtccccacctgtgctcttcacaaaaaccaccagcagatgagacccacgtgcgtccctctgggcgcctcaggccccaggatccaccatcaaggcctatggtcctgcccagcacgccatttcaactgagaaaatcaaagccaagtaccccgactacgaggtcacctgggctaacgacggctactgagcactcccagcccggggcctgctgcctccagcagccacttcagagcccccgcctttgcctgcactcctcttgcagggctggccctgcctgctcctgcggcagcctctggtgacgtgctgtccaccaggccttggagacaggctagcctggccacagaattaaacgtgttgccaca

SEQ ID NO: 457027 - DNA, 1530 bp, Homo sapiens
  misc_feature (1512)..(1512): n is a, c, g, or t
tccccgtcggtccgcggggctctcgctggagcctccccgactccggtttcccctcgtccagaagcccgacgtaaccaaagcccagtctgtcactttaaacacgccccgccccgcctcccgcggctgtgttgcctcctcgctggagaacaccctggtcgacctctgtgcgtccgtgtgcgcgagcgcgtcccgccgaggcggtgggcagggcggacggtgcgcagtgcgttcccgctggtcggagccagcacactaaccacgccacgcgccctgccgtcccttcgcctccagccgctgcagtctgggccctgcaggagctgggaaaaaccgcagggaggtcttcaggccgatatgcaagtctcccagccgaaggggcaggggacctgaacaggggaagcagagcacctgggcctggccagagctgacacctggctaggagaggaaggaccaagggacggggcgttcccaggtgggagcctggagggcaaagcgtggtgcgagcaggtgagggagagagctagttggtaagcgtggaagcccacccgagggggcttgacctgtcccgagaggtccccgcacacccgctctggccgcacgccgtactgcgggcgtggaggcgcaagcccggcggcccggcctccacctgtcccccaagtgcaccctggtccgcgcccagagctctctggagggtggggtatgcgggagaggggtggaggccaaacgcaagggccctcctggagtccccagccctacttcggagccaggggagggggcaccaagtgagagaaattgggcacccccgcctccgctcctgctttcgcacccggcacgcccatctcgtccccgcgcgtctgcaccggccaggcgtcccgcttgcccacccgccgccgcgccccgcgccccctaccccagggcctctgcattcggccccacccctgagggccggccgggaacgcccctggaccggaataatttccagggggcaagagctttcgaaccaacctcgcgggccgcctaactgccccgttccaagggtgccaccggaccccgctggagaggaacttctccgttggctgatttcatcaccacccattcccgattccacgtttcctttaagcggggctggcggagccgcaaggcggcaaggaactggattgcgattggtcagcacgtgcctcggtcggcggtacaattggctgaggcgctgggccttgggaagcattccccgacgggattggtcgtcgctctcgcagagcccgcctcccgcagtacaagcggcccccgggtcgggtgggaggaggggactccgggaggaggaacatggcggtggcggacctcgctctcattcctgatgtggacatcgactccgacggcgtcttcaagtatgtgctgatccgagtccactcggctccccgctccggggctccggctgcagagagcaaggagatcgtgcgcggctacaagtgggctgagtaccatgcggacatctacgaccacgtactggccaagcantggggggatccatctaga

SEQ ID NO: 457028 - DNA, 461 bp, Homo sapiens
tgctttggagggctcacatgtccctatggcccacagggaacacagccgcacccgggtctgtgccagctgtggttggcagtgccctcctattgctcatgctcctggtgctgctgggacttgggggacggcgctggctgcagaagaaggggagctgccccttccagagcaacacagaggccacagcccctggctttgacaacatccttttcaatgcggatggtgtcaccctcccggcatctgtcaccagtgatccgtagaccaccccagacaaggccccgcttcctcacgtgacatccagcacttggtcagaccctagccagggaccggacacctgccccgcccaggctgggacaggctgcaggtctcaggatatgctgaggcctgggcgttccctgccctgtgctgactctgttgctctgtgaataaacaccctggcccatgagggcagcccaaaaaaacag

SEQ ID NO: 457029 - DNA, 1167 bp, Homo sapiens
ctccttgtaccggtagcggggttggggacggaagccttcggtcggtggagaggagaaagggagaggccttcgggcggtggacggggaagagagggagtccttcgggcggtggagggggtggagagcgaggccttcgggcggtggagagcggggaggggggaggccttcgggcggtgggagggggagagagggaggcctttgggcggtgggggccacggggagggtggtcttcggactacgtgcgggacaggaggtcagggctggcaagtccctcaggcctccctcgttgccccagcctcgcgggccgcctaactgccccgttccaagggtgccaccggaccccgctggagaggaacttctccgttggctgatttcatcaccacccattcccgattccacgtttcctttaagcggggctggcggagccgcaaggcggcaaggaactggattgcgattggtcagcacgtgcctcggtcggcggtacaattggctgaggcgctgggccttgggaagcattccccgacgggattggtcgtcgctctcgcagagcccgcctcccgcagtacaagcggcccccgggtcgggtgggaggaggggactccgggaggaggaacatggcggtggcggacctcgctctcattcctgatgtggacatcgactccgacggcgtcttcaagtatgtgctgatccgagtccactcggctccccgctccggggctccggctgcagagagcaaggagatcgtgcgcggctacaagtgggctgagtaccatgcggacatctacgacaaagtgtcgggcgacatgcagaagcaaggctgcgactgtgagtgtctgggcggcgggcgcatctcccaccagagtcaggacaagaagattcacgtgtacggctattccatggcctatggtcctgcccagcacgccatttcaactgagaaaatcaaagccaagtaccccgactacgaggtcacctgggctaacgacggctactgagcactcccagcccggggcctgctgcctccagcagccacttcagagcccccgcctttgcctgcactcctcttgcagggctggccctgcctgctcctgcggcagcctctggtgacgtgctgtccaccaggccttggagacaggctagcctggccacagaattaaacgtgttgccaca

SEQ ID NO: 457030 - DNA, 5983 bp, Homo sapiens
  misc_feature (3102)..(3102): n is a, c, g, or t
tccccgtcggtccgcggggctctcgctggagcctccccgactccggtttcccctcgtccagaagcccgacgtaaccaaagcccagtctgtcactttaaacacgccccgccccgcctcccgcggctgtgttgcctcctcgctggagaacaccctggtcgacctctgtgcgtccgtgtgcgcgagcgcgtcccgccgaggcggtgggcagggcggacggtgcgcagtgcgttcccgctggtcggagccagcacactaaccacgccacgcgccctgccgtcccttcgcctccagccgctgcagtctgggccctgcaggagctgggaaaaaccgcagggaggtcttcaggccgatatgcaagtctcccagccgaaggggcaggggacctgaacaggggaagcagagcacctgggcctggccagagctgacacctggctaggagaggaaggaccaagggacggggcgttcccaggtgggagcctggagggcaaagcgtggtgcgagcaggtgagggagagagctagttggtaagcgtggaagcccacccgagggggcttgacctgtcccgagaggtccccgcacacccgctctggccgcacgccgtactgcgggcgtggaggcgcaagcccggcggcccggcctccacctgtcccccaagtgcaccctggtccgcgcccagagctctctggagggtggggtatgcgggagaggggtggaggccaaacgcaagggccctcctggagtccccagccctacttcggagccaggggagggggcaccaagtgagagaaattgggcacccccgcctccgctcctgctttcgcacccggcacgcccatctcgtccccgcgcgtctgcaccggccaggcgtcccgcttgcccacccgccgccgcgccccgcgccccctaccccagggcctctgcattcggccccacccctgagggccggccgggaacgcccctggaccggaataatttccagggggcaagagctttcgaaccaacctcgcgggccgcctaactgccccgttccaagggtgccaccggaccccgctggagaggaacttctccgttggctgatttcatcaccacccattcccgattccacgtttcctttaagcggggctggcggagccgcaaggcggcaaggaactggattgcgattggtcagcacgtgcctcggtcggcggtacaattggctgaggcgctgggccttgggaagcattccccgacgggattggtcgtcgctctcgcagagcccgcctcccgcagtacaagcggcccccgggtcgggtgggaggaggggactccgggaggaggaacatggcggtggcggacctcgctctcattcctgatgtggacatcgactccgacggcgtcttcaagtatgtgctgatccgagtccactcggctccccgctccggggctccggctgcagagagcaaggagatcgtgcgcggctacaagtgggctgagtaccatgcggacatctacgacaaagtgtcgggcgacatgcagaagcaaggctgcgactgtgagtgtctgggcggcgggcgcatctcccaccagagtcaggacaagaagattcacgtgtacggctattccatggcctatggtcctgcccagcacgccatttcaactgagaaaatcaaagccaagtaccccgactacgaggtcacctgggctaacgacggctactgagcactcccagcccggggcctgctgcctccagcagccacttcagagcccccgcctttgcctgcactcctcttgcagggctggccctgcctgctcctgcggcagcctctggtgacgtgctgtccaccaggccttggagacaggctagcctggccacagaattaaacgtgttgccacacctgccggcttctgaactctgtccttggcttcctgcaccctgcgtcaccacctccgggggcccccagaccctaactaaagcagggaccctgtatctggcaccggacagcacctggctgctcaggacgaatgaatgacggcgtgatcctccacagcctgacttaaaggcaccctgtgtggccgcactgctccctctggcccaaccatgcctctgtccagccacctgctgcccgccttggtcctgttcctgggagccctggccaggccgtgtgcaacttcgtgtgtgactgcagggactgctcagatgaggcccagtgtggttaccacggggcctcgcccaccctgggcgcccccttcgcctgtgacttcgagcaggacccctgcggctggcgggacattagtacctcaggctacagctggctccgagacagggcaggggccgcactggagggtcctgggcctcactcagaccacacactgggcaccgacttgggtgaggccagggcaagtctctgtgcgcccctgtcccaataccctccttgctccctgccccgtctcctgacctctcacctgcgccaggctggtacatggccgttggaacccaccgagggaaagaggcatccaccgcagccctgcgctcgccaaccctgcgagaggcagcctcctcttgcaagctgaggctctggtaccacgcggcctctggaggtgcaccctggacccccaaggctcgtggggggtgcccaaggggagggcgggtgggcagctggggacaagcagggccgcagctgccctgggacccctgacattgcagatgtggctgaactgcgggtggagctgacccatggcgcagagaccctgaccctgtggcagagcacagggccctggggccctggctggcaggagttggcagtgaccacaggccgcatccggggtgacttccgagtgaccttctctgccacccgaaatgccacccacaggggcgctgtggctctagatgacctagagttctgggactgtggtctgcccaccccccaggccaactgtcccccgggacaccaccactgccagaacaaggtctgcgtggagccccagcagctgtgcgacggggaagacaactgcggggacctgtctgatgagaacccactcacctgtggccgccacatagccaccgactttgagacaggcctgggcccatggaaccgctcggaaggctggtcccggaaccaccgngctggtggtcctgagcgcccctcctggccacgccgtgaccacagccggaacagtgcacaggctggtcttctatcagtacctgagtgggtctgaggctggctgcctccagctgttcctgcagactctggggcccggcgccccccgggcccccgtcctgctgcggaggcgccgaggggagctggggaccgcctgggtccgagaccgtgttgacatccagagcgcctaccccttccagatcctcctggccgggcagacaggcccggggggcgtcgtgggtctggacgacctcatcctgtctgaccactgcagaccagtctcggaggtgtccaccctgcagccgctgcctcctgggccccgggccccagccccccagcccctgccgcccagctcgcggctccaggattcctgcaagcaggggcatcttgcctgcggggacctgtgtgtgcccccggaacaactgtgtgacttcgaggagcagtgcgcagggggcgaggacgagcaggcctgtggcaccacagactttgagtcccccgaggctgggggctgggaggacgccagcgtggggcggctgcagtggcggcgtgtctcagcccaggagagccaggggtccagtgcagctgctgctgggcacttcctgtctctgcagcgggcctgggggcagctaggcgctgaggcccgggtcctcacacccctccttggcccttctggccccagctgtgaactccacctggcttattatttacagagccagccccgagctggagtttgtcggtttggtggacttggatggccctgaccagcagggagctggggtggacaacgtgaccctgagggactgtagccccacagtgaccaccgagagagacagaggttcctgctgcccatcctcactcccacctgggtgctccccttacactcctccagggaccccggagcttccaccttctcagggctctggagggggaggggagaaggtgtgtgacgccacctggccccacccccagaggtctcctgtaactttgagcgggacacatgcagctggtacccaggccacctctcagacacacactggcgctgggtggagagccgcggccctgaccacgaccacaccacaggccaaggccactttgtgctcctggaccccacagaccccctggcctggggccacagtgcccacctgctctccaggccccaggtgccagcagcacccacggagtgtctcagcttctggtaccacctccatgggccccagattgggactctgcgcctagccatgagacgggaaggggaggagacacacctgtggtcgcggtcaggcacccagggcaaccgctggcacgaggcctgggccaccctttcccaccagcctggctcccatgcccagtaccagctgctgttcgagggcctccgggacggataccacggcaccatggcgctggacgatgtggccgtgcggccgggcccctgctgggcccctaattactgctcctttgaggactcagactgcggcttctcccctggaggccaaggtctctggaggcggcaggccaatgcctcgggccatgctgcctggggccccccaacagaccataccactgagacagcccaaggtatgggggcctggcaggggcagggattgaggggctggccaggggctggcaggctgatgctggcacctccagggcactacatggtggtggacacaagcccagacgcactaccccggggccagacggcctccctgacctccaaggagcacaggcccctggcccagcctgcttgtctgaccttctggtaccacgggagcctccgcagcccaggcaccctgcgggtctacctggaggagcgcgggaggcaccaggtgctcagcctcagtgcccacggcgggcttgcctggcgcctgggcagcatggacgtgcaggccgagcgagcctggagggttcctgtgattttgagtctggcctgtgtggctggagccacctggcctggcccggcctgggcggatacagctgggactggggcgggggagccaccccctctcgttacccccagccccctgtggaccacaccctgggcacagaggcaggccactttgccttctttgaaactggcgtgctgggccccgggggccgggccgcctggctgcgcagcgagcctctgccggccaccccagcctcctgcctccgcttctggtaccacatgggttttcctgagcacttctacaagggggagctgaaggtactgctgcacagtgctcagggccagctggctgtgtggggcgcaggcgggcatcggcggcaccagtggctggaggcccaggtggaggtagccagtgccaaggagttccagatcgtgtttgaagccactctgggcggccagccagccctggggcccattgccctggatgacgtggagtatctggctgggcagcattgccagcagcctgcccccagcccggggaacacagccgcacccgggtctgtgccagctgtggttggcagtgccctcctattgctcatgctcctggtgctgctgggacttgggggacggcgctggctgcagaagaaggggagctgccccttccagagcaacacagaggccacagcccctggctttgacaacatccttttcaatgcggatggtgtcaccctcccggcatctgtcaccagtgatccgtagaccaccccagacaaggccccgcttcctcacgtgacatccagcacttggtcagaccctagccagggaccggacacctgccccgcccaggctgggacaggctgcaggtctcaggatatgctgaggcctgggcgttccctgccctgtgctgactgcttaacgcctgcgggtatacgcccccttgggccaccttagtggcgcgccg

SEQ ID NO: 457031 - DNA, 3768 bp, Homo sapiens
  misc_feature (3102)..(3102): n is a, c, g, or t
tccccgtcggtccgcggggctctcgctggagcctccccgactccggtttcccctcgtccagaagcccgacgtaaccaaagcccagtctgtcactttaaacacgccccgccccgcctcccgcggctgtgttgcctcctcgctggagaacaccctggtcgacctctgtgcgtccgtgtgcgcgagcgcgtcccgccgaggcggtgggcagggcggacggtgcgcagtgcgttcccgctggtcggagccagcacactaaccacgccacgcgccctgccgtcccttcgcctccagccgctgcagtctgggccctgcaggagctgggaaaaaccgcagggaggtcttcaggccgatatgcaagtctcccagccgaaggggcaggggacctgaacaggggaagcagagcacctgggcctggccagagctgacacctggctaggagaggaaggaccaagggacggggcgttcccaggtgggagcctggagggcaaagcgtggtgcgagcaggtgagggagagagctagttggtaagcgtggaagcccacccgagggggcttgacctgtcccgagaggtccccgcacacccgctctggccgcacgccgtactgcgggcgtggaggcgcaagcccggcggcccggcctccacctgtcccccaagtgcaccctggtccgcgcccagagctctctggagggtggggtatgcgggagaggggtggaggccaaacgcaagggccctcctggagtccccagccctacttcggagccaggggagggggcaccaagtgagagaaattgggcacccccgcctccgctcctgctttcgcacccggcacgcccatctcgtccccgcgcgtctgcaccggccaggcgtcccgcttgcccacccgccgccgcgccccgcgccccctaccccagggcctctgcattcggccccacccctgagggccggccgggaacgcccctggaccggaataatttccagggggcaagagctttcgaaccaacctcgcgggccgcctaactgccccgttccaagggtgccaccggaccccgctggagaggaacttctccgttggctgatttcatcaccacccattcccgattccacgtttcctttaagcggggctggcggagccgcaaggcggcaaggaactggattgcgattggtcagcacgtgcctcggtcggcggtacaattggctgaggcgctgggccttgggaagcattccccgacgggattggtcgtcgctctcgcagagcccgcctcccgcagtacaagcggcccccgggtcgggtgggaggaggggactccgggaggaggaacatggcggtggcggacctcgctctcattcctgatgtggacatcgactccgacggcgtcttcaagtatgtgctgatccgagtccactcggctccccgctccggggctccggctgcagagagcaaggagatcgtgcgcggctacaagtgggctgagtaccatgcggacatctacgacaaagtgtcgggcgacatgcagaagcaaggctgcgactgtgagtgtctgggcggcgggcgcatctcccaccagagtcaggacaagaagattcacgtgtacggctattccatggcctatggtcctgcccagcacgccatttcaactgagaaaatcaaagccaagtaccccgactacgaggtcacctgggctaacgacggctactgagcactcccagcccggggcctgctgcctccagcagccacttcagagcccccgcctttgcctgcactcctcttgcagggctggccctgcctgctcctgcggcagcctctggtgacgtgctgtccaccaggccttggagacaggctagcctggccacagaattaaacgtgttgccacacctgccggcttctgaactctgtccttggcttcctgcaccctgcgtcaccacctccgggggcccccagaccctaactaaagcagggaccctgtatctggcaccggacagcacctggctgctcaggacgaatgaatgacggcgtgatcctccacagcctgacttaaaggcaccctgtgtggccgcactgctccctctggcccaaccatgcctctgtccagccacctgctgcccgccttggtcctgttcctgggagccctggccaggccgtgtgcaacttcgtgtgtgactgcagggactgctcagatgaggcccagtgtggttaccacggggcctcgcccaccctgggcgcccccttcgcctgtgacttcgagcaggacccctgcggctggcgggacattagtacctcaggctacagctggctccgagacagggcaggggccgcactggagggtcctgggcctcactcagaccacacactgggcaccgacttgggtgaggccagggcaagtctctgtgcgcccctgtcccaataccctccttgctccctgccccgtctcctgacctctcacctgcgccaggctggtacatggccgttggaacccaccgagggaaagaggcatccaccgcagccctgcgctcgccaaccctgcgagaggcagcctcctcttgcaagctgaggctctggtaccacgcggcctctggaggtgcaccctggacccccaaggctcgtggggggtgcccaaggggagggcgggtgggcagctggggacaagcagggccgcagctgccctgggacccctgacattgcagatgtggctgaactgcgggtggagctgacccatggcgcagagaccctgaccctgtggcagagcacagggccctggggccctggctggcaggagttggcagtgaccacaggccgcatccggggtgacttccgagtgaccttctctgccacccgaaatgccacccacaggggcgctgtggctctagatgacctagagttctgggactgtggtctgcccaccccccaggccaactgtcccccgggacaccaccactgccagaacaaggtctgcgtggagccccagcagctgtgcgacggggaagacaactgcggggacctgtctgatgagaacccactcacctgtggccgccacatagccaccgactttgagacaggcctgggcccatggaaccgctcggaaggctggtcccggaaccaccgngctggtggtcctgagcgcccctcctggccacgccgtgaccacagccggaacagtgcacaggctggtcttctatcagtacctgagtgggtctgaggctggctgcctccagctgttcctgcagactctggggcccggcgccccccgggcccccgtcctgctgcggaggcgccgaggggagctggggaccgcctgggtccgagaccgtgttgacatccagagcgcctaccccttccagatcctcctggccgggcagacaggcccggggggcgtcgtgggtctggacgacctcatcctgtctgaccactgcagaccagtctcggaggtgtccaccctgcagccgctgcctcctgggccccgggccccagccccccagccccccaacagaccataccactgagacagcccaaggtatgggggcctggcaggggcagggattgaggggctggccaggggctggcaggctgatgctggcacctccagggcactacatggtggtggacacaagcccagacgcactaccccggggccagacggcctccctgacctccaaggagcacaggctgcaggtctcaggatatgctgaggcctgggcgttccctgccctgtgctgactctgttgctctgtgaataaacaccctggcccatgagggcagcccaaaaaaacag

SEQ ID NO: 457032 - DNA, 2163 bp, Homo sapiens
  misc_feature (1888)..(1888): n is a, c, g, or t
  misc_feature (1894)..(1894): n is a, c, g, or t
  misc_feature (1901)..(1901): n is a, c, g, or t
  misc_feature (1911)..(1911): n is a, c, g, or t
  misc_feature (1954)..(1954): n is a, c, g, or t
  misc_feature (2033)..(2033): n is a, c, g, or t
  misc_feature (2042)..(2042): n is a, c, g, or t
  misc_feature (2054)..(2055): n is a, c, g, or t
  misc_feature (2063)..(2063): n is a, c, g, or t
  misc_feature (2066)..(2066): n is a, c, g, or t
  misc_feature (2068)..(2068): n is a, c, g, or t
  misc_feature (2074)..(2074): n is a, c, g, or t
  misc_feature (2078)..(2078): n is a, c, g, or t
  misc_feature (2087)..(2087): n is a, c, g, or t
  misc_feature (2106)..(2106): n is a, c, g, or t
  misc_feature (2108)..(2108): n is a, c, g, or t
  misc_feature (2116)..(2116): n is a, c, g, or t
tccccgtcggtccgcggggctctcgctggagcctccccgactccggtttcccctcgtccagaagcccgacgtaaccaaagcccagtctgtcactttaaacacgccccgccccgcctcccgcggctgtgttgcctcctcgctggagaacaccctggtcgacctctgtgcgtccgtgtgcgcgagcgcgtcccgccgaggcggtgggcagggcggacggtgcgcagtgcgttcccgctggtcggagccagcacactaaccacgccacgcgccctgccgtcccttcgcctccagccgctgcagtctgggccctgcaggagctgggaaaaaccgcagggaggtcttcaggccgatatgcaagtctcccagccgaaggggcaggggacctgaacaggggaagcagagcacctgggcctggccagagctgacacctggctaggagaggaaggaccaagggacggggcgttcccaggtgggagcctggagggcaaagcgtggtgcgagcaggtgagggagagagctagttggtaagcgtggaagcccacccgagggggcttgacctgtcccgagaggtccccgcacacccgctctggccgcacgccgtactgcgggcgtggaggcgcaagcccggcggcccggcctccacctgtcccccaagtgcaccctggtccgcgcccagagctctctggagggtggggtatgcgggagaggggtggaggccaaacgcaagggccctcctggagtccccagccctacttcggagccaggggagggggcaccaagtgagagaaattgggcacccccgcctccgctcctgctttcgcacccggcacgcccatctcgtccccgcgcgtctgcaccggccaggcgtcccgcttgcccacccgccgccgcgccccgcgccccctaccccagggcctctgcattcggccccacccctgagggccggccgggaacgcccctggaccggaataatttccagggggcaagagctttcgaaccaacctcgcgggccgcctaactgccccgttccaagggtgccaccggaccccgctggagaggaacttctccgttggctgatttcatcaccacccattcccgattccacgtttcctttaagcggggctggcggagccgcaaggcggcaaggaactggattgcgattggtcagcacgtgcctcggtcggcggtacaattggctgaggcgctgggccttgggaagcattccccgacgggattggtcgtcgctctcgcagagcccgcctcccgcagtacaagcggcccccgggtcgggtgggaggaggggactccgggaggaggaacatggcggtggcggacctcgctctcattcctgatgtggacatcgactccgacggcgtcttcaagtatgtgctgatccgagtccactcggctccccgctccggggctccggctgcagagagcaaggagatcgtgcgcggctacaagtgggctgagtaccatgcggacatctacgacaaagtgtcgggcgacatgcagaagcaaggctgcgactgtgagtgtctgggcggcgggcgcatctcccaccagagtcaggacaagaagattcacgtgtacggctattccatggcctatggtcctgcccagcacgccatttcaactgagaaaatcaaagccaagtaccccgactacgaggtcacctgggctaacgacggctactgagcactcccagcccggggcctgctgcctccagcagccacttcagagcccccgcctttgcctgcactcctcttgcagggctggccctgcctgctcctgcggcagcctctggtgacgtgctgtccaccaggccttggagacaggctagcctggccacagaattaaacgtgttgccacaaaaaaaaaaaaaatnttctgntcctttntttttttttntttttaacttcctgcctatacacacgcagccatcagcccacanagacatgactaccaacgcgggccccttgacccatactggcctcagcacctaagactggacaactttgtacctaatgccngcccacctngcatatactggnnggcctctnctntngcacangggncttagtcgngaccacatggctgttgcangntctgctgnggttgcccattgggacctggcggcgacttgtcccgtgctgcttgtct

SEQ ID NO: 457033 - DNA, 5629 bp, Homo sapiens
  misc_feature (2818)..(2818): n is a, c, g, or t
ctccttgtaccggtagcggggttggggacggaagccttcggtcggtggagaggagaaagggagaggccttcgggcggtggacggggaagagagggagtccttcgggcggtggagggggtggagagcgaggccttcgggcggtggagagcggggaggggggaggccttcgggcggtgggagggggagagagggaggcctttgggcggtgggggccacggggagggtggtcttcggactacgtgcgggacaggaggtcagggctggcaagtccctcaggcctccctcgttgccccagcctcgcgggccgcctaactgccccgttccaagggtgccaccggaccccgctggagaggaacttctccgttggctgatttcatcaccacccattcccgattccacgtttcctttaagcggggctggcggagccgcaaggcggcaaggaactggattgcgattggtcagcacgtgcctcggtcggcggtacaattggctgaggcgctgggccttgggaagcattccccgacgggattggtcgtcgctctcgcagagcccgcctcccgcagtacaagcggcccccgggtcgggtgggaggaggggactccgggaggaggaacatggcggtggcggacctcgctctcattcctgatgtggacatcgactccgacggcgtcttcaagtatgtgctgatccgagtccactcggctccccgctccggggctccggctgcagagagcaaggagatcgtgcgcggctacaagtgggctgagtaccatggtgagggcgggacctgcgggcatgccaggggcacgcctggcgaggcgggggcggggctggcgggacggagacggggctgacgaggcaggggcggggctggcggggcgggggcggggctgcgggccgtagcggactgcgctctgctccgagtcctgcccctgctaggtttgacccaggctgaggtcctgggcgggaagggcgtgacacggcctgacaccctccccagcagtctcccagttcccgcgccctccccggttccaccctccttcgctcattcatccctgtcccagcctcaaggggcttcgtctctcctggggaaggggctgttcagagctgggatttcagaccccttcggctgggagttcctcccgcggcctccaagggcggccagggcacgtcctgaggccgccctcccatcccagcggacatctacgacaaagtgtcgggcgacatgcagaagcaaggctgcgactgtgagtgtctgggcggcgggcgcatctcccaccagagtcaggacaagaagattcacgtgtacggctattccatggcctatggtcctgcccagcacgccatttcaactgagaaaatcaaagccaagtaccccgactacgaggtcacctgggctaacgacggctactgagcactcccagcccggggcctgctgcctccagcagccacttcagagcccccgcctttgcctgcactcctcttgcagggctggccctgcctgctcctgcggcagcctctggtgacgtgctgtccaccaggccttggagacaggctagcctggccacagaattaaacgtgttgccacacctgccggcttctgaactctgtccttggcttcctgcaccctgcgtcaccacctccgggggcccccagaccctaactaaagcagggaccctgtatctggcaccggacagcacctggctgctcaggacgaatgaatgacggcgtgatcctccacagcctgacttaaaggcaccctgtgtggccgcactgctccctctggcccaaccatgcctctgtccagccacctgctgcccgccttggtcctgttcctgggagccctggccaggccgtgtgcaacttcgtgtgtgactgcagggactgctcagatgaggcccagtgtggttaccacggggcctcgcccaccctgggcgcccccttcgcctgtgacttcgagcaggacccctgcggctggcgggacattagtacctcaggctacagctggctccgagacagggcaggggccgcactggagggtcctgggcctcactcagaccacacactgggcaccgacttgggtgaggccagggcaagtctctgtgcgcccctgtcccaataccctccttgctccctgccccgtctcctgacctctcacctgcgccaggctggtacatggccgttggaacccaccgagggaaagaggcatccaccgcagccctgcgctcgccaaccctgcgagaggcagcctcctcttgcaagctgaggctctggtaccacgcggcctctggaggtgcaccctggacccccaaggctcgtggggggtgcccaaggggagggcgggtgggcagctggggacaagcagggccgcagctgccctgggacccctgacattgcagatgtggctgaactgcgggtggagctgacccatggcgcagagaccctgaccctgtggcagagcacagggccctggggccctggctggcaggagttggcagtgaccacaggccgcatccggggtgacttccgagtgaccttctctgccacccgaaatgccacccacaggggcgctgtggctctagatgacctagagttctgggactgtggtctgcccaccccccaggccaactgtcccccgggacaccaccactgccagaacaaggtctgcgtggagccccagcagctgtgcgacggggaagacaactgcggggacctgtctgatgagaacccactcacctgtggccgccacatagccaccgactttgagacaggcctgggcccatggaaccgctcggaaggctggtcccggaaccaccgngctggtggtcctgagcgcccctcctggccacgccgtgaccacagccggaacagtgcacaggctggtcttctatcagtacctgagtgggtctgaggctggctgcctccagctgttcctgcagactctggggcccggcgccccccgggcccccgtcctgctgcggaggcgccgaggggagctggggaccgcctgggtccgagaccgtgttgacatccagagcgcctaccccttccagatcctcctggccgggcagacaggcccggggggcgtcgtgggtctggacgacctcatcctgtctgaccactgcagaccagtctcggaggtgtccaccctgcagccgctgcctcctgggccccgggccccagccccccagcccctgccgcccagctcgcggctccaggattcctgcaagcaggggcatcttgcctgcggggacctgtgtgtgcccccggaacaactgtgtgacttcgaggagcagtgcgcagggggcgaggacgagcaggcctgtggcaccacagactttgagtcccccgaggctgggggctgggaggacgccagcgtggggcggctgcagtggcggcgtgtctcagcccaggagagccaggggtccagtgcagctgctgctgggcacttcctgtctctgcagcgggcctgggggcagctaggcgctgaggcccgggtcctcacacccctccttggcccttctggccccagctgtgaactccacctggcttattatttacagagccagccccgagctggagtttgtcggtttggtggacttggatggccctgaccagcagggagctggggtggacaacgtgaccctgagggactgtagccccacagtgaccaccgagagagacagaggttcctgctgcccatcctcactcccacctgggtgctccccttacactcctccagggaccccggagcttccaccttctcagggctctggagggggaggggagaaggtgtgtgacgccacctggccccacccccagaggtctcctgtaactttgagcgggacacatgcagctggtacccaggccacctctcagacacacactggcgctgggtggagagccgcggccctgaccacgaccacaccacaggccaaggccactttgtgctcctggaccccacagaccccctggcctggggccacagtgcccacctgctctccaggccccaggtgccagcagcacccacggagtgtctcagcttctggtaccacctccatgggccccagattgggactctgcgcctagccatgagacgggaaggggaggagacacacctgtggtcgcggtcaggcacccagggcaaccgctggcacgaggcctgggccaccctttcccaccagcctggctcccatgcccagtaccagctgctgttcgagggcctccgggacggataccacggcaccatggcgctggacgatgtggccgtgcggccgggcccctgctgggcccctaattactgctcctttgaggactcagactgcggcttctcccctggaggccaaggtctctggaggcggcaggccaatgcctcgggccatgctgcctggggccccccaacagaccataccactgagacagcccaagggcactacatggtggtggacacaagcccagacgcactaccccggggccagacggcctccctgacctccaaggagcacaggcccctggcccagcctgcttgtctgaccttctggtaccacgggagcctccgcagcccaggcaccctgcgggtctacctggaggagcgcgggaggcaccaggtgctcagcctcagtgcccacggcgggcttgcctggcgcctgggcagcatggacgtgcaggccgagcgagcctggagggttcctgtgattttgagtctggcctgtgtggctggagccacctggcctggcccggcctgggcggatacagctgggactggggcgggggagccaccccctctcgttacccccagccccctgtggaccacaccctgggcacagaggcaggccactttgccttctttgaaactggcgtgctgggccccgggggccgggccgcctggctgcgcagcgagcctctgccggccaccccagcctcctgcctccgcttctggtaccacatgggttttcctgagcacttctacaagggggagctgaaggtactgctgcacagtgctcagggccagctggctgtgtggggcgcaggcgggcatcggcggcaccagtggctggaggcccaggtggaggtagccagtgccaaggagttccagatcgtgtttgaagccactctgggcggccagccagccctggggcccattgccctggatgacgtggagtatctggctgggcagcattgccagcagcctgcccccagcccggggaacacagccgcacccgggtctgtgccagctgtggttggcagtgccctcctattgctcatgctcctggtgctgctgggacttgggggacggcgctggctgcagaagaaggggagctgccccttccagagcaacacagaggccacagcccctggctttgacaacatccttttcaatgcggatggtgtcaccctcccggcatctgtcaccagtgatccgtagaccaccccagacaaggccccgcttcctcacgtgacatccagcacttggtcagaccctagccagggaccggacacctgccccgcccaggctgggacaggctgcaggtctcaggatatgctgaggcctgggcgttccctgccctgtgctgactctgttgctctgtgaataaacaccctggcccatgagggcagcccaaaaaaacag

SEQ ID NO: 457034 - DNA, 6530 bp, Homo sapiens
  misc_feature (3719)..(3719): n is a, c, g, or t
tccccgtcggtccgcggggctctcgctggagcctccccgactccggtttcccctcgtccagaagcccgacgtaaccaaagcccagtctgtcactttaaacacgccccgccccgcctcccgcggctgtgttgcctcctcgctggagaacaccctggtcgacctctgtgcgtccgtgtgcgcgagcgcgtcccgccgaggcggtgggcagggcggacggtgcgcagtgcgttcccgctggtcggagccagcacactaaccacgccacgcgccctgccgtcccttcgcctccagccgctgcagtctgggccctgcaggagctgggaaaaaccgcagggaggtcttcaggccgatatgcaagtctcccagccgaaggggcaggggacctgaacaggggaagcagagcacctgggcctggccagagctgacacctggctaggagaggaaggaccaagggacggggcgttcccaggtgggagcctggagggcaaagcgtggtgcgagcaggtgagggagagagctagttggtaagcgtggaagcccacccgagggggcttgacctgtcccgagaggtccccgcacacccgctctggccgcacgccgtactgcgggcgtggaggcgcaagcccggcggcccggcctccacctgtcccccaagtgcaccctggtccgcgcccagagctctctggagggtggggtatgcgggagaggggtggaggccaaacgcaagggccctcctggagtccccagccctacttcggagccaggggagggggcaccaagtgagagaaattgggcacccccgcctccgctcctgctttcgcacccggcacgcccatctcgtccccgcgcgtctgcaccggccaggcgtcccgcttgcccacccgccgccgcgccccgcgccccctaccccagggcctctgcattcggccccacccctgagggccggccgggaacgcccctggaccggaataatttccagggggcaagagctttcgaaccaacctcgcgggccgcctaactgccccgttccaagggtgccaccggaccccgctggagaggaacttctccgttggctgatttcatcaccacccattcccgattccacgtttcctttaagcggggctggcggagccgcaaggcggcaaggaactggattgcgattggtcagcacgtgcctcggtcggcggtacaattggctgaggcgctgggccttgggaagcattccccgacgggattggtcgtcgctctcgcagagcccgcctcccgcagtacaagcggcccccgggtcgggtgggaggaggggactccgggaggaggaacatggcggtggcggacctcgctctcattcctgatgtggacatcgactccgacggcgtcttcaagtatgtgctgatccgagtccactcggctccccgctccggggctccggctgcagagagcaaggagatcgtgcgcggctacaagtgggctgagtaccatgcggacatctacgacaaagtgtcgggcgacatgcagaagcaaggctgcgactgtgagtgtctgggcggcgggcgcatctcccaccagagtcaggacaagaagattcacgtgtacggctattccatggtgagccgcagccccgtcccgccctgccggaggccccagtaccagcttcgaggcccacctgagcctgctgccctgacccgtggccccagctgagcacgcaggcttcctggggttctcccagggtcggcggcagagccctccctccagggcccattgtgttcctgcattcccccatggagcacacgccagacctgaggggtgggacggacacccccaggcatggccggctgtctcctctccctgccttgggaggccttgctgggctctagctgtcctccagcactttgggccctgggcccccagaggcagtcagtacctgggtggagctcagagtccccacctgtgctcttcacaaaaaccaccagcagatgagacccacgtgcgtccctctgggcgcctcaggccccaggatccaccatcaaggtttgcttgcctgtggaggtcgcctctccccaggggagcccccaagggcggtcgggatggtgggtttggcatccccaggcactgcctatccctttcccacactcgcttctggtgtggctggtggctggatgcccagagccgggtatcgggttgaagggtccaggtagtgccagcaggcgtcttctcttctccaggcctatggtcctgcccagcacgccatttcaactgagaaaatcaaagccaagtaccccgactacgaggtcacctgggctaacgacggctactgagcactcccagcccggggcctgctgcctccagcagccacttcagagcccccgcctttgcctgcactcctcttgcagggctggccctgcctgctcctgcggcagcctctggtgacgtgctgtccaccaggccttggagacaggctagcctggccacagaattaaacgtgttgccacacctgccggcttctgaactctgtccttggcttcctgcaccctgcgtcaccacctccgggggcccccagaccctaactaaagcagggaccctgtatctggcaccggacagcacctggctgctcaggacgaatgaatgacggcgtgatcctccacagcctgacttaaaggcaccctgtgtggccgcactgctccctctggcccaaccatgcctctgtccagccacctgctgcccgccttggtcctgttcctgggagccctggccaggccgtgtgcaacttcgtgtgtgactgcagggactgctcagatgaggcccagtgtggttaccacggggcctcgcccaccctgggcgcccccttcgcctgtgacttcgagcaggacccctgcggctggcgggacattagtacctcaggctacagctggctccgagacagggcaggggccgcactggagggtcctgggcctcactcagaccacacactgggcaccgacttgggtgaggccagggcaagtctctgtgcgcccctgtcccaataccctccttgctccctgccccgtctcctgacctctcacctgcgccaggctggtacatggccgttggaacccaccgagggaaagaggcatccaccgcagccctgcgctcgccaaccctgcgagaggcagcctcctcttgcaagctgaggctctggtaccacgcggcctctggaggtgcaccctggacccccaaggctcgtggggggtgcccaaggggagggcgggtgggcagctggggacaagcagggccgcagctgccctgggacccctgacattgcagatgtggctgaactgcgggtggagctgacccatggcgcagagaccctgaccctgtggcagagcacagggccctggggccctggctggcaggagttggcagtgaccacaggccgcatccggggtgacttccgagtgaccttctctgccacccgaaatgccacccacaggggcgctgtggctctagatgacctagagttctgggactgtggtctgcccaccccccaggccaactgtcccccgggacaccaccactgccagaacaaggtctgcgtggagccccagcagctgtgcgacggggaagacaactgcggggacctgtctgatgagaacccactcacctgtggccgccacatagccaccgactttgagacaggcctgggcccatggaaccgctcggaaggctggtcccggaaccaccgngctggtggtcctgagcgcccctcctggccacgccgtgaccacagccggaacagtgcacaggctggtcttctatcagtacctgagtgggtctgaggctggctgcctccagctgttcctgcagactctggggcccggcgccccccgggcccccgtcctgctgcggaggcgccgaggggagctggggaccgcctgggtccgagaccgtgttgacatccagagcgcctaccccttccagatcctcctggccgggcagacaggcccggggggcgtcgtgggtctggacgacctcatcctgtctgaccactgcagaccagtctcggaggtgtccaccctgcagccgctgcctcctgggccccgggccccagccccccagcccctgccgcccagctcgcggctccaggattcctgcaagcaggggcatcttgcctgcggggacctgtgtgtgcccccggaacaactgtgtgacttcgaggagcagtgcgcagggggcgaggacgagcaggcctgtggcaccacagactttgagtcccccgaggctgggggctgggaggacgccagcgtggggcggctgcagtggcggcgtgtctcagcccaggagagccaggggtccagtgcagctgctgctgggcacttcctgtctctgcagcgggcctgggggcagctaggcgctgaggcccgggtcctcacacccctccttggcccttctggccccagctgtgaactccacctggcttattatttacagagccagccccgagctggagtttgtcggtttggtggacttggatggccctgaccagcagggagctggggtggacaacgtgaccctgagggactgtagccccacagtgaccaccgagagagacagaggttcctgctgcccatcctcactcccacctgggtgctccccttacactcctccagggaccccggagcttccaccttctcagggctctggagggggaggggagaaggtgtgtgacgccacctggccccacccccagaggtctcctgtaactttgagcgggacacatgcagctggtacccaggccacctctcagacacacactggcgctgggtggagagccgcggccctgaccacgaccacaccacaggccaaggccactttgtgctcctggaccccacagaccccctggcctggggccacagtgcccacctgctctccaggccccaggtgccagcagcacccacggagtgtctcagcttctggtaccacctccatgggccccagattgggactctgcgcctagccatgagacgggaaggggaggagacacacctgtggtcgcggtcaggcacccagggcaaccgctggcacgaggcctgggccaccctttcccaccagcctggctcccatgcccagtaccagctgctgttcgagggcctccgggacggataccacggcaccatggcgctggacgatgtggccgtgcggccgggcccctgctgggcccctaattactgctcctttgaggactcagactgcggcttctcccctggaggccaaggtctctggaggcggcaggccaatgcctcgggccatgctgcctggggccccccaacagaccataccactgagacagcccaagggcactacatggtggtggacacaagcccagacgcactaccccggggccagacggcctccctgacctccaaggagcacaggcccctggcccagcctgcttgtctgaccttctggtaccacgggagcctccgcagcccaggcaccctgcgggtctacctggaggagcgcgggaggcaccaggtgctcagcctcagtgcccacggcgggcttgcctggcgcctgggcagcatggacgtgcaggccgagcgagcctggagggttcctgtgattttgagtctggcctgtgtggctggagccacctggcctggcccggcctgggcggatacagctgggactggggcgggggagccaccccctctcgttacccccagccccctgtggaccacaccctgggcacagaggcaggccactttgccttctttgaaactggcgtgctgggccccgggggccgggccgcctggctgcgcagcgagcctctgccggccaccccagcctcctgcctccgcttctggtaccacatgggttttcctgagcacttctacaagggggagctgaaggtactgctgcacagtgctcagggccagctggctgtgtggggcgcaggcgggcatcggcggcaccagtggctggaggcccaggtggaggtagccagtgccaaggagttccagatcgtgtttgaagccactctgggcggccagccagccctggggcccattgccctggatgacgtggagtatctggctgggcagcattgccagcagcctgcccccagcccggggaacacagccgcacccgggtctgtgccagctgtggttggcagtgccctcctattgctcatgctcctggtgctgctgggacttgggggacggcgctggctgcagaagaaggggagctgccccttccagagcaacacagaggccacagcccctggctttgacaacatccttttcaatgcggatggtgtcaccctcccggcatctgtcaccagtgatccgtagaccaccccagacaaggccccgcttcctcacgtgacatccagcacttggtcagaccctagccagggaccggacacctgccccgcccaggctgggacaggctgcaggtctcaggatatgctgaggcctgggcgttccctgccctgtgctgactctgttgctctgtgaataaacaccctggcccatgagggcagcccaaaaaaacag

SEQ ID NO: 457035 - DNA, 1944 bp, Homo sapiens
tccccgtcggtccgcggggctctcgctggagcctccccgactccggtttcccctcgtccagaagcccgacgtaaccaaagcccagtctgtcactttaaacacgccccgccccgcctcccgcggctgtgttgcctcctcgctggagaacaccctggtcgacctctgtgcgtccgtgtgcgcgagcgcgtcccgccgaggcggtgggcagggcggacggtgcgcagtgcgttcccgctggtcggagccagcacactaaccacgccacgcgccctgccgtcccttcgcctccagccgctgcagtctgggccctgcaggagctgggaaaaaccgcagggaggtcttcaggccgatatgcaagtctcccagccgaaggggcaggggacctgaacaggggaagcagagcacctgggcctggccagagctgacacctggctaggagaggaaggaccaagggacggggcgttcccaggtgggagcctggagggcaaagcgtggtgcgagcaggtgagggagagagctagttggtaagcgtggaagcccacccgagggggcttgacctgtcccgagaggtccccgcacacccgctctggccgcacgccgtactgcgggcgtggaggcgcaagcccggcggcccggcctccacctgtcccccaagtgcaccctggtccgcgcccagagctctctggagggtggggtatgcgggagaggggtggaggccaaacgcaagggccctcctggagtccccagccctacttcggagccaggggagggggcaccaagtgagagaaattgggcacccccgcctccgctcctgctttcgcacccggcacgcccatctcgtccccgcgcgtctgcaccggccaggcgtcccgcttgcccacccgccgccgcgccccgcgccccctaccccagggcctctgcattcggccccacccctgagggccggccgggaacgcccctggaccggaataatttccagggggcaagagctttcgaaccaacctcgcgggccgcctaactgccccgttccaagggtgccaccggaccccgctggagaggaacttctccgttggctgatttcatcaccacccattcccgattccacgtttcctttaagcggggctggcggagccgcaaggcggcaaggaactggattgcgattggtcagcacgtgcctcggtcggcggtacaattggctgaggcgctgggccttgggaagcattccccgacgggattggtcgtcgctctcgcagagcccgcctcccgcagtacaagcggcccccgggtcgggtgggaggaggggactccgggaggaggaacatggcggtggcggacctcgctctcattcctgatgtggacatcgactccgacggcgtcttcaagtatgtgctgatccgagtccactcggctccccgctccggggctccggctgcagagagcaaggagatcgtgcgcggctacaagtgggctgagtaccatgcggacatctacgacaaagtgtcgggcgacatgcagaagcaaggctgcgactgtgagtgtctgggcggcgggcgcatctcccaccagagtcaggacaagaagattcacgtgtacggctattccatggcctatggtcctgcccagcacgccatttcaactgagaaaatcaaagccaagtaccccgactacgaggtcacctgggctaacgacggctactgagcactcccagcccggggcctgctgcctccagcagccacttcagagcccccgcctttgcctgcactcctcttgcagggctggccctgcctgctcctgcggcagcctctggtgacgtgctgtccaccaggccttggagacaggctagcctggccacagaattaaacgtgttgccacaaaaaaaaaaaaaaaaaaccacgagcaaatgatattaacacatgacaatcactacaagaacaaaaaagaggg

SEQ ID NO: 457036 - DNA, 1930 bp, Homo sapiens
tccccgtcggtccgcggggctctcgctggagcctccccgactccggtttcccctcgtccagaagcccgacgtaaccaaagcccagtctgtcactttaaacacgccccgccccgcctcccgcggctgtgttgcctcctcgctggagaacaccctggtcgacctctgtgcgtccgtgtgcgcgagcgcgtcccgccgaggcggtgggcagggcggacggtgcgcagtgcgttcccgctggtcggagccagcacactaaccacgccacgcgccctgccgtcccttcgcctccagccgctgcagtctgggccctgcaggagctgggaaaaaccgcagggaggtcttcaggccgatatgcaagtctcccagccgaaggggcaggggacctgaacaggggaagcagagcacctgggcctggccagagctgacacctggctaggagaggaaggaccaagggacggggcgttcccaggtgggagcctggagggcaaagcgtggtgcgagcaggtgagggagagagctagttggtaagcgtggaagcccacccgagggggcttgacctgtcccgagaggtccccgcacacccgctctggccgcacgccgtactgcgggcgtggaggcgcaagcccggcggcccggcctccacctgtcccccaagtgcaccctggtccgcgcccagagctctctggagggtggggtatgcgggagaggggtggaggccaaacgcaagggccctcctggagtccccagccctacttcggagccaggggagggggcaccaagtgagagaaattgggcacccccgcctccgctcctgctttcgcacccggcacgcccatctcgtccccgcgcgtctgcaccggccaggcgtcccgcttgcccacccgccgccgcgccccgcgccccctaccccagggcctctgcattcggccccacccctgagggccggccgggaacgcccctggaccggaataatttccagggggcaagagctttcgaaccaacctcgcgggccgcctaactgccccgttccaagggtgccaccggaccccgctggagaggaacttctccgttggctgatttcatcaccacccattcccgattccacgtttcctttaagcggggctggcggagccgcaaggcggcaaggaactggattgcgattggtcagcacgtgcctcggtcggcggtacaattggctgaggcgctgggccttgggaagcattccccgacgggattggtcgtcgctctcgcagagcccgcctcccgcagtacaagcggcccccgggtcgggtgggaggaggggactccgggaggaggaacatggcggtggcggacctcgctctcattcctgatgtggacatcgactccgacggcgtcttcaagtatgtgctgatccgagtccactcggctccccgctccggggctccggctgcagagagcaaggagatcgtgcgcggctacaagtgggctgagtaccatgcggacatctacgacaaagtgtcgggcgacatgcagaagcaaggctgcgactgtgagtgtctgggcggcgggcgcatctcccaccagagtcaggacaagaagattcacgtgtacggctattccatgagatgagacccacgtgcgtccctctgggcgcctcaggccccaggatccaccatcaaggcctatggtcctgcccagcacgccatttcaactgagaaaatcaaagccaagtaccccgactacgaggtcacctgggctaacgacggctactgagcactcccagcccggggcctgctgcctccagcagccacttcagagcccccgcctttgcctgcactcctcttgcagggctggccctgcctgctcctgcggcagcctctggtgacgtgctgtccaccaggccttggagacaggctagcctggccacagaattaaacgtgttgccaca

SEQ ID NO: 457037 - DNA, 1053 bp, Homo sapiens
ctgccctgcacccgccaggtggtgtttgaggcagtggccgcaggcgtggcacactcctacgtggctctggatgatctgctcctccaggacgggccctgccctcagccaggttcctgtgattttgagtctggcctgtgtggctggagccacctggcctggcccggcctgggcggatacagctgggactggggcgggggagccaccccctctcgttacccccagccccctgtggaccacaccctgggcacagaggcaggccactttgccttctttgaaactggcgtgctgggccccgggggccgggccgcctggctgcgcagcgagcctctgccggccaccccagcctcctgcctccgcttctggtaccacatgggttttcctgagcacttctacaagggggagctgaaggtactgctgcacagtgctcagggccagctggctgtgtggggcgcaggcgggcatcggcggcaccagtggctggaggcccaggtggaggtagccagtgccaaggagttccagatcgtgtttgaagccactctgggcggccagccagccctggggcccattgccctggatgacgtggagtatctggctgggcagcattgccagcagcctgcccccagcccggggaacacagccgcacccgggtctgtgccagctgtggttggcagtgccctcctattgctcatgctcctggtgctgctgggacttgggggacggcgctggctgcagaagaaggggagctgccccttccagagcaacacagaggccacagcccctggctttgacaacatccttttcaatgcggatggtgtcaccctcccggcatctgtcaccagtgatccgtagaccaccccagacaaggccccgcttcctcacgtgacatccagcacttggtcagaccctagccagggaccggacacctgccccgcccaggctgggacaggctgcaggtctcaggatatgctgaggcctgggcgttccctgccctgtgctgactctgttgctctgtgaataaacaccctggcccatgagggcagcccaaaaaaacag

SEQ ID NO: 457038 - DNA, 5074 bp, Homo sapiens
ggcggcggggctgaggcgctgaggcggccgtggcggcggcggcggcggcggcggcagcggcggccaagcggccaggttggcggccggggctccgggccgcgcgaggccacggccacgccgcgccgctgcgcacaaccaacgaggcagagcgccgcccggcgcgagactgcggccgaagcgtggggcgcgcgtgcggaggaccaggcgcggcgcggctgcggctgagagtggagcctttcaggctggcatggagagcttaaggggcaactgaaggagacacactggccaagcgcggagttctgcttacttcagtcctgctgagatactctctcagtccgctcgcaccgaaggaagctgccttgggatcagagcagacataaagctagaaaaatttcaagacagaaacagtctccgccagtcaagaaaccctcaaaagtattttgccatggatatagaagatgaagaaaacatgagttccagcagcactgatgtgaaggaaaaccgcaatctggacaacgtgtcccccaaggatggcagcacacctgggcctggcgagggctctcagctctccaatgggggtggtggtggccccggcagaaagcggcccctggaggagggcagcaatggccactccaagtaccgcctgaagaaaaggaggaaaacaccagggcccgtcctccccaagaacgccctgatgcagctgaatgagatcaagcctggtttgcagtacacactcctgtcccagactgggcccgtgcacgcgcctttgtttgtcatgtctgtggaggtgaatggccaggtttttgagggctctggtcccacaaagaaaaaggcaaaactccatgctgctgagaaggccttgaggtctttcgttcagtttcctaatgcctctgaggcccacctggccatggggaggaccctgtctgtcaacacggacttcacatctgaccaggccgacttccctgacacgctcttcaatggttttgaaactcctgacaaggcggagcctcccttttacgtgggctccaatggggatgactccttcagttccagcggggacctcagcttgtctgcttccccggtgcctgccagcctagcccagcctcctctccctgtcttaccaccattcccacccccgagtgggaagaatcccgtgatgatcttgaacgaactgcgcccaggactcaagtatgacttcctctccgagagcggggagagccatgccaagagcttcgtcatgtctgtggtcgtggatggtcagttctttgaaggctcggggagaaacaagaagcttgccaaggcccgggctgcgcagtctgccctggccgccatttttaacttgcacttggatcagacgccatctcgccagcctattcccagtgagggtcttcagctgcatttaccgcaggttttagctgacgctgtctcacgcctggtcctgggtaagtttggtgacctgaccgacaacttctcctcccctcacgctcgcagaaaagtgctggctggagtcgtcatgacaacaggcacagatgttaaagatgccaaggtgataagtgtttctacaggaacaaaatgtattaatggtgaatacatgagtgatcgtggccttgcattaaatgactgccatgcagaaataatatctcggagatccttgctcagatttctttatacacaacttgagctttacttaaataacaaagatgatcaaaaaagatccatctttcagaaatcagagcgaggggggtttaggctgaaggagaatgtccagtttcatctgtacatcagcacctctccctgtggagatgccagaatcttctcaccacatgagccaatcctggaagggtctcgctcttacacccaggctggagtgcagtggtgcaatcatggctcactgcagcctcgacctcctgggctcttaagcgatccttccacctcaaccttccaaggagctgggactacagaaccagcagatagacacccaaatcgtaaagcaagaggacagctacggaccaaaatagagtctggtgaggggacgattccagtgcgctccaatgcgagcatccaaacgtgggacggggtgctgcaaggggagcggctgctcaccatgtcctgcagtgacaagattgcacgctggaacgtggtgggcatccagggatccctgctcagcattttcgtggagcccatttacttctcgagcatcatcctgggcagcctttaccacggggaccacctttccagggccatgtaccagcggatctccaacatagaggacctgccacctctctacaccctcaacaagcctttgctcagtggcatcagcaatgcagaagcacggcagccagggaaggcccccaacttcagtgtcaactggacggtaggcgactccgctattgaggtcatcaacgccacgactgggaaggatgagctgggccgcgcgtcccgcctgtgtaagcacgcgttgtactgtcgctggatgcgtgtgcacggcaaggttccctcccacttactacgctccaagattaccaagcccaacgtgtaccatgagtccaagctggcggcaaaggagtaccaggccgccaaggcgcgtctgttcacagccttcatcaaggcggggctgggggcctgggtggagaagcccaccgagcaggaccagttctcactcacgccctgacccgggcagacatgatggggggtgcagggggctgtgggcatccagcgtcatcctccagaacctcacatctgaactgggggcaggtgcataccttggggagggagtagggggacacgggggaccaccaggtgtccacggttgtccccagcatctcacatcagacctggggcaggtgcgcagtgtggggaggggatggggtgcgtcagggcccagcatcgccgcctggcatctctctgccgcagcatttccccttctgaaccgtccagtgactgctttcaatctcggtttacgtttagaaattgagttctactgagtagggcttccttaagtttaggaaaatagaaattactttgtgtgaaattcttgaataaataatttattcagagctaggaatgtggtttataaaataggaagtaattgtgtcaggtcacttttatgccacattattttaattgcaaaaaagcatctatatatggaggagggtgggaaaatagaggtaggaaatagtagcctaaaggaaatcgccacacgtctgtctaaacttaggtctcttttctccgtaggtacctccctgggtagttccacacactaggttgtaacagtctctccctgaggagcagactcccagcatggtgtagcgtggccctgtcatgcacatggggtcccgcagcagtgactgtgtgtcctgcagaggcgtgacccaggcccctgtagccctcagcctcctctagaagcttctgtactccttgtaggatcagatcatggaaaacttttctcagtttacttctaagtaatcacagataatacatggccagtaatcccaggctggccattcattcaggttttttaaaggatatttaacttttatggactagaaggaatcacgagggctactgcacaatacatggcctaagttccctctgttccttcctctgaatcgaatggatgtgggtgaccgcccgaaggccttcacaggatggaagtagaatgatttcagtagatactcattcttggaaaatgccatagttttaaattattgtttccagctttatcaaagacatgtttgaaaaataaaaagcatccaagtgagagctggtgagaccacgtgctgctggcgtagtgtaggccagacattgacagtcctgacgggagctcagggctgcccagcgcccagcgtgcacgggacggccccacgacagagggagtcagcccgggaggtcaggagcgcggcgggcgagggccctgtgtggaccacctccaccaagctcagagatttgcaaccaggtgccttgttgcctccgctcaggatgaaagaggagctgagagaagtgctctgcctgccagtgcagtgcccagctccaaggctctagagggtgttcaggtacactgaggaggggacggctccgtcttcacattgtgcacagatctgaggatgggattagcgaagctgtggagactgcacatccggacctgcccatgtctcaaaacaaacacatgtacagtggctctttttccttctcaaacactttaccccagaagcaggtggtctgccccaggcataaagaaggaaaattggccatctttcccacctctaaattctgtaaaattatagacttgctcaaaagattcctttttatcatccccacgctgtgtaagtggaaagggcattgtgttccgtgtgtgtccagtttacagcgtctctgccccctagcgtgttttgtgacaatctccctgggtgaggagtgggtgcacccagccccgaggccagtggttgctcggggccttccgtgtgagttctagtgttcacttgatgccggggaatagaattagagaaaactctgacctgccgggttccagggactggtggaggtggatggcaggtccgactcgaccatgacttagttgtaagggtgtgtcggctttttcagtctcatgtgaaaatcctcctgtctctggcagcactgtctgcactttcttgtttactgtttgaagggacgagtaccaagccacaagaacacttcttttggccacagcataagctgatggtatgtaaggaaccgatgggccattaaacatgaactgaacggttaaaagcacagtctatggaacgctaatggagtcagcccctaaagctgtttgctttttcaggctttggattacatgcttttaatttgattttagaatctggacactttctatgaatgtaattcggctgagaaacatgttgctgagatgcaatcctcagtgttctctgtatgtaaatctgtgtatacaccacacgttacaactgcatgagcttcctctcgcacaagaccagctggaactgagcatgagacgctgtcaaatacagacaaaggatttgagatgttctcaataaaaagaaaatgtttcactaaaaaaaaa

SEQ ID NO: 457039 - DNA, 4954 bp, Homo sapiens
ggcggcggggctgaggcgctgaggcggccgtggcggcggcggcggcggcggcggcagcggcggccaagcggccaggttggcggccggggctccgggccgcgcgaggccacggccacgccgcgccgctgcgcacaaccaacgaggcagagcgccgcccggcgcgagactgcggccgaagcgtggggcgcgcgtgcggaggaccaggcgcggcgcggctgcggctgagagtggagcctttcaggctggcatggagagcttaaggggcaactgaaggagacacactggccaagcgcggagttctgcttacttcagtcctgctgagatactctctcagtccgctcgcaccgaaggaagctgccttgggatcagagcagacataaagctagaaaaatttcaagacagaaacagtctccgccagtcaagaaaccctcaaaagtattttgccatggatatagaagatgaagaaaacatgagttccagcagcactgatgtgaaggaaaaccgcaatctggacaacgtgtcccccaaggatggcagcacacctgggcctggcgagggctctcagctctccaatgggggtggtggtggccccggcagaaagcggcccctggaggagggcagcaatggccactccaagtaccgcctgaagaaaaggaggaaaacaccagggcccgtcctccccaagaacgccctgatgcagctgaatgagatcaagcctggtttgcagtacacactcctgtcccagactgggcccgtgcacgcgcctttgtttgtcatgtctgtggaggtgaatggccaggtttttgagggctctggtcccacaaagaaaaaggcaaaactccatgctgctgagaaggccttgaggtctttcgttcagtttcctaatgcctctgaggcccacctggccatggggaggaccctgtctgtcaacacggacttcacatctgaccaggccgacttccctgacacgctcttcaatggttttgaaactcctgacaaggcggagcctcccttttacgtgggctccaatggggatgactccttcagttccagcggggacctcagcttgtctgcttccccggtgcctgccagcctagcccagcctcctctccctgtcttaccaccattcccacccccgagtgggaagaatcccgtgatgatcttgaacgaactgcgcccaggactcaagtatgacttcctctccgagagcggggagagccatgccaagagcttcgtcatgtctgtggtcgtggatggtcagttctttgaaggctcggggagaaacaagaagcttgccaaggcccgggctgcgcagtctgccctggccgccatttttaacttgcacttggatcagacgccatctcgccagcctattcccagtgagggtcttcagctgcatttaccgcaggttttagctgacgctgtctcacgcctggtcctgggtaagtttggtgacctgaccgacaacttctcctcccctcacgctcgcagaaaagtgctggctggagtcgtcatgacaacaggcacagatgttaaagatgccaaggtgataagtgtttctacaggaacaaaatgtattaatggtgaatacatgagtgatcgtggccttgcattaaatgactgccatgcagaaataatatctcggagatccttgctcagatttctttatacacaacttgagctttacttaaataacaaagatgatcaaaaaagatccatctttcagaaatcagagcgaggggggtttaggctgaaggagaatgtccagtttcatctgtacatcagcacctctccctgtggagatgccagaatcttctcaccacatgagccaatcctggaagaaccagcagatagacacccaaatcgtaaagcaagaggacagctacggaccaaaatagagtctggtgaggggacgattccagtgcgctccaatgcgagcatccaaacgtgggacggggtgctgcaaggggagcggctgctcaccatgtcctgcagtgacaagattgcacgctggaacgtggtgggcatccagggatccctgctcagcattttcgtggagcccatttacttctcgagcatcatcctgggcagcctttaccacggggaccacctttccagggccatgtaccagcggatctccaacatagaggacctgccacctctctacaccctcaacaagcctttgctcagtggcatcagcaatgcagaagcacggcagccagggaaggcccccaacttcagtgtcaactggacggtaggcgactccgctattgaggtcatcaacgccacgactgggaaggatgagctgggccgcgcgtcccgcctgtgtaagcacgcgttgtactgtcgctggatgcgtgtgcacggcaaggttccctcccacttactacgctccaagattaccaagcccaacgtgtaccatgagtccaagctggcggcaaaggagtaccaggccgccaaggcgcgtctgttcacagccttcatcaaggcggggctgggggcctgggtggagaagcccaccgagcaggaccagttctcactcacgccctgacccgggcagacatgatggggggtgcagggggctgtgggcatccagcgtcatcctccagaacctcacatctgaactgggggcaggtgcataccttggggagggagtagggggacacgggggaccaccaggtgtccacggttgtccccagcatctcacatcagacctggggcaggtgcgcagtgtggggaggggatggggtgcgtcagggcccagcatcgccgcctggcatctctctgccgcagcatttccccttctgaaccgtccagtgactgctttcaatctcggtttacgtttagaaattgagttctactgagtagggcttccttaagtttaggaaaatagaaattactttgtgtgaaattcttgaataaataatttattcagagctaggaatgtggtttataaaataggaagtaattgtgtcaggtcacttttatgccacattattttaattgcaaaaaagcatctatatatggaggagggtgggaaaatagaggtaggaaatagtagcctaaaggaaatcgccacacgtctgtctaaacttaggtctcttttctccgtaggtacctccctgggtagttccacacactaggttgtaacagtctctccctgaggagcagactcccagcatggtgtagcgtggccctgtcatgcacatggggtcccgcagcagtgactgtgtgtcctgcagaggcgtgacccaggcccctgtagccctcagcctcctctagaagcttctgtactccttgtaggatcagatcatggaaaacttttctcagtttacttctaagtaatcacagataatacatggccagtaatcccaggctggccattcattcaggttttttaaaggatatttaacttttatggactagaaggaatcacgagggctactgcacaatacatggcctaagttccctctgttccttcctctgaatcgaatggatgtgggtgaccgcccgaaggccttcacaggatggaagtagaatgatttcagtagatactcattcttggaaaatgccatagttttaaattattgtttccagctttatcaaagacatgtttgaaaaataaaaagcatccaagtgagagctggtgagaccacgtgctgctggcgtagtgtaggccagacattgacagtcctgacgggagctcagggctgcccagcgcccagcgtgcacgggacggccccacgacagagggagtcagcccgggaggtcaggagcgcggcgggcgagggccctgtgtggaccacctccaccaagctcagagatttgcaaccaggtgccttgttgcctccgctcaggatgaaagaggagctgagagaagtgctctgcctgccagtgcagtgcccagctccaaggctctagagggtgttcaggtacactgaggaggggacggctccgtcttcacattgtgcacagatctgaggatgggattagcgaagctgtggagactgcacatccggacctgcccatgtctcaaaacaaacacatgtacagtggctctttttccttctcaaacactttaccccagaagcaggtggtctgccccaggcataaagaaggaaaattggccatctttcccacctctaaattctgtaaaattatagacttgctcaaaagattcctttttatcatccccacgctgtgtaagtggaaagggcattgtgttccgtgtgtgtccagtttacagcgtctctgccccctagcgtgttttgtgacaatctccctgggtgaggagtgggtgcacccagccccgaggccagtggttgctcggggccttccgtgtgagttctagtgttcacttgatgccggggaatagaattagagaaaactctgacctgccgggttccagggactggtggaggtggatggcaggtccgactcgaccatgacttagttgtaagggtgtgtcggctttttcagtctcatgtgaaaatcctcctgtctctggcagcactgtctgcactttcttgtttactgtttgaagggacgagtaccaagccacaagaacacttcttttggccacagcataagctgatggtatgtaaggaaccgatgggccattaaacatgaactgaacggttaaaagcacagtctatggaacgctaatggagtcagcccctaaagctgtttgctttttcaggctttggattacatgcttttaatttgattttagaatctggacactttctatgaatgtaattcggctgagaaacatgttgctgagatgcaatcctcagtgttctctgtatgtaaatctgtgtatacaccacacgttacaactgcatgagcttcctctcgcacaagaccagctggaactgagcatgagacgctgtcaaatacagacaaaggatttgagatgttctcaataaaaagaaaatgtttcactaaaaaaaaa

SEQ ID NO: 457040 - DNA, 1941 bp, Homo sapiens
gggagccctgggcggggtggctgtcagggggaactgggttccgggagccctgggccggggcagggggcggctgtaggaaggaactggtttcggggagccctgggcggggcggctgtggggaggaaggtgacgtgcaggggaccagaggctctgcactgctcctaggacagctcatctgtaatcagaaaaaaaataaacaaaatacagaacgctgactcctccgtgagacagatcggggaccttagcactttaatccctcccttctgagcgctcggtgtgcacttttagactatagctgtttcattgacgtgtcactctccatccagtgtccttgatgtggcttttagagacttagcagaaaattcgacacaagcaggaacttgattttttaagaaaaaatattacattttgaggacattttgacaagtaggggaagagagggcttctgttgttttgttttgttttgttaactaaacctgaagtattaattccacaaagacactgtccctcaggaccactcaggtacagctctgccagggacagagtcctgctagtgggaggtctcaggtggggcggtgtgttctgtgccatgaggcagcgacaggtccagatggatgtcgtcaccaccttcctcagctctcatcacctggtcgtacgccaggcccacctcttcccagcaagggacgccaaagaactgcagtttttattctgagtcttaatttaacttttcatcatcttttcctattttggagaattttttgtaattaaaagcaattattttaaaatgtgcaagccagtatctcacaaggcatggatttctgtggaatttatttttattcaaataaccatatttatctccaggctgtggaatcgccactttctttgtgaagacagtgtctctccttgtaatctcacacaggtacactgaggaggggacggctccgtcttcacattgtgcacagatctgaggatgggattagcgaagctgtggagactgcacatccggacctgcccatgtctcaaaacaaacacatgtacagtggctctttttccttctcaaacactttaccccagaagcaggtggtctgccccaggcataaagaaggaaaattggccatctttcccacctctaaattctgtaaaattatagacttgctcaaaagattcctttttatcatccccacgctgtgtaagtggaaagggcattgtgttccgtgtgtgtccagtttacagcgtctctgccccctagcgtgttttgtgacaatctccctgggtgaggagtgggtgcacccagccccgaggccagtggttgctcggggccttccgtgtgagttctagtgttcacttgatgccggggaatagaattagagaaaactctgacctgccgggttccagggactggtggaggtggatggcaggtccgactcgaccatgacttagttgtaagggtgtgtcggctttttcagtctcatgtgaaaatcctcctgtctctggcagcactgtctgcactttcttgtttactgtttgaagggacgagtaccaagccacaagaacacttcttttggccacagcataagctgatggtatgtaaggaaccgatgggccattaaacatgaactgaacggttaaaagcacagtctatggaacgctaatggagtcagcccctaaagctgtttgctttttcaggctttggattacatgcttttaatttgattttagaatctggacactttctatgaatgtaattcggctgagaaacatgttgctgagatgcaatcctcagtgttctctgtatgtaaatctgtgtatacaccacacgttacaactgcatgagcttcctctcgcacaagaccagctggaactgagcatgagacgctgtcaaatacagacaaaggatttgagatgttctcaataaaaagaaaatgtttcactaaaaaaaaa

SEQ ID NO: 457041 - DNA, 3597 bp, Homo sapiens
tgacaacaggtgaacaccacaacgactgaatagaatagttccctaggcacagatgttaaagatgccaaggtgataagtgtttctacaggaacaaaatgtattaatggtgaatacatgagtgatcgtggccttgcattaaatgactgccatgcagaaataatatctcggagatccttgctcagatttctttatacacaacttgagctttacttaaataacaaagatgatcaaaaaagatccatctttcagaaatcagagcgaggggggtttaggctgaaggagaatgtccagtttcatctgtacatcagcacctctccctgtggagatgccagaatcttctcaccacatgagccaatcctggaagggtctcgctcttacacccaggctggagtgcagtggtgcaatcatggctcactgcagcctcgacctcctgggctcttaagcgatccttccacctcaaccttccaaggagctgggactacagaaccagcagatagacacccaaatcgtaaagcaagaggacagctacggaccaaaatagagtctggtgaggggacgattccagtgcgctccaatgcgagcatccaaacgtgggacggggtgctgcaaggggagcggctgctcaccatgtcctgcagtgacaagattgcacgctggaacgtggtgggcatccagggatccctgctcagcattttcgtggagcccatttacttctcgagcatcatcctgggcagcctttaccacggggaccacctttccagggccatgtaccagcggatctccaacatagaggacctgccacctctctacaccctcaacaagcctttgctcagtggcatcagcaatgcagaagcacggcagccagggaaggcccccaacttcagtgtcaactggacggtaggcgactccgctattgaggtcatcaacgccacgactgggaaggatgagctgggccgcgcgtcccgcctgtgtaagcacgcgttgtactgtcgctggatgcgtgtgcacggcaaggttccctcccacttactacgctccaagattaccaagcccaacgtgtaccatgagtccaagctggcggcaaaggagtaccaggccgccaaggcgcgtctgttcacagccttcatcaaggcggggctgggggcctgggtggagaagcccaccgagcaggaccagttctcactcacgccctgacccgggcagacatgatggggggtgcagggggctgtgggcatccagcgtcatcctccagaacctcacatctgaactgggggcaggtgcataccttggggagggagtagggggacacgggggaccaccaggtgtccacggttgtccccagcatctcacatcagacctggggcaggtgcgcagtgtggggaggggatggggtgcgtcagggcccagcatcgccgcctggcatctctctgccgcagcatttccccttctgaaccgtccagtgactgctttcaatctcggtttacgtttagaaattgagttctactgagtagggcttccttaagtttaggaaaatagaaattactttgtgtgaaattcttgaataaataatttattcagagctaggaatgtggtttataaaataggaagtaattgtgtcaggtcacttttatgccacattattttaattgcaaaaaagcatctatatatggaggagggtgggaaaatagaggtaggaaatagtagcctaaaggaaatcgccacacgtctgtctaaacttaggtctcttttctccgtaggtacctccctgggtagttccacacactaggttgtaacagtctctccctgaggagcagactcccagcatggtgtagcgtggccctgtcatgcacatggggtcccgcagcagtgactgtgtgtcctgcagaggcgtgacccaggcccctgtagccctcagcctcctctagaagcttctgtactccttgtaggatcagatcatggaaaacttttctcagtttacttctaagtaatcacagataatacatggccagtaatcccaggctggccattcattcaggttttttaaaggatatttaacttttatggactagaaggaatcacgagggctactgcacaatacatggcctaagttccctctgttccttcctctgaatcgaatggatgtgggtgaccgcccgaaggccttcacaggatggaagtagaatgatttcagtagatactcattcttggaaaatgccatagttttaaattattgtttccagctttatcaaagacatgtttgaaaaataaaaagcatccaagtgagagctggtgagaccacgtgctgctggcgtagtgtaggccagacattgacagtcctgacgggagctcagggctgcccagcgcccagcgtgcacgggacggccccacgacagagggagtcagcccgggaggtcaggagcgcggcgggcgagggccctgtgtggaccacctccaccaagctcagagatttgcaaccaggtgccttgttgcctccgctcaggatgaaagaggagctgagagaagtgctctgcctgccagtgcagtgcccagctccaaggctctagagggtgttcaggtacactgaggaggggacggctccgtcttcacattgtgcacagatctgaggatgggattagcgaagctgtggagactgcacatccggacctgcccatgtctcaaaacaaacacatgtacagtggctctttttccttctcaaacactttaccccagaagcaggtggtctgccccaggcataaagaaggaaaattggccatctttcccacctctaaattctgtaaaattatagacttgctcaaaagattcctttttatcatccccacgctgtgtaagtggaaagggcattgtgttccgtgtgtgtccagtttacagcgtctctgccccctagcgtgttttgtgacaatctccctgggtgaggagtgggtgcacccagccccgaggccagtggttgctcggggccttccgtgtgagttctagtgttcacttgatgccggggaatagaattagagaaaactctgacctgccgggttccagggactggtggaggtggatggcaggtccgactcgaccatgacttagttgtaagggtgtgtcggctttttcagtctcatgtgaaaatcctcctgtctctggcagcactgtctgcactttcttgtttactgtttgaagggacgagtaccaagccacaagaacacttcttttggccacagcataagctgatggtatgtaaggaaccgatgggccattaaacatgaactgaacggttaaaagcacagtctatggaacgctaatggagtcagcccctaaagctgtttgctttttcaggctttggattacatgcttttaatttgattttagaatctggacactttctatgaatgtaattcggctgagaaacatgttgctgagatgcaatcctcagtgttctctgtatgtaaatctgtgtatacaccacacgttacaactgcatgagcttcctctcgcacaagaccagctggaactgagcatgagacgctgtcaaatacagacaaaggatttgagatgttctcaataaaaagaaaatgtttcactaaaaaaaaa

SEQ ID NO: 457042 - DNA, 602 bp, Homo sapiens
tgaacggttaaaagcacagtctatggaacgctaatggagtcagcccctaaagctgtttgctttttcaggctttggattacatgcttttaatttgattttagaatctggacactttgaatccagagagtctcatgtgaaaatcctcctgtctctggcagcactgtctgcactttcttgtttactgtttgaagggacgagtaccaagccacaagaacacttcttttggccacagcataagctgatggtatgtaaggaaccgatgggccattaaacatgaactgaacggttaaaagcacagtctatggaacgctaatggagtcagcccctaaagctgtttgctttttcaggctttggattacatgcttttaatttgattttagaatctggacactttctatgaatgtaattcggctgagaaacatgttgctgagatgcaatcctcagtgttctctgtatgtaaatctgtgtatacaccacacgttacaactgcatgagcttcctctcgcacaagaccagctggaactgagcatgagacgctgtcaaatacagacaaaggatttgagatgttctcaataaaaagaaaatgtttcactaaaaaaaaa

SEQ ID NO: 457043 - DNA, 994 bp, Homo sapiens
ggcggcggggctgaggcgctgaggcggccgtggcggcggcggcggcggcggcggcagcggcggccaagcggccaggttggcggccggggctccgggccgcgcgaggccacggccacgccgcgccgctgcgcacaaccaacgaggcagagcgccgcccggcgcgagactgcggccgaagcgtggggcgcgcgtgcggaggaccaggcgcggcgcggctgcggctgagcataattgatatactgtggttactctacctatttgtgtaggcctctcaggtcattgaaacaagatgttgtacaaattagcagatgacactggcgcatggaggaatgagtctagtgttgttaatgagaagttggatatccgtttgatccttgttctactgcaggtagtgtatattttgagaacagcgtgaggtttattctactaatggaaatttacaaaaataccagtttgaatgattgagaaatctaagttaaagaacccttgaatagaaatgtcgctgttcagtgcgttgatcgattctcacatctgaagccagctgtgtattcttgagtggagcctttcaggctggcatggagagcttaaggggcaactgaaggagacacactggccaagcgcggagttctgcttacttcagtcctgctgagatactctctcagtccgctcgcaccgaaggaagctgccttgggatcagagcagacataaagctagaaaaatttcaagatgaaattgaaatggccaatgagcacaccctcattcatccagcgagcattgaggaccccctagaggccaggcccatgagtgatgaagatcccgaggatgaagacgccttgccagccagacagaaacagtctccgccagtcaagaaaccctcaaaagtattttgccatggatatagaagatgaagaaaacatgagtaagatctaggcctatcacgtagtatcagatagctaattttatgttaacattttggtgtttttgcaaatgtatt

SEQ ID NO: 457044 - DNA, 567 bp, Homo sapiens
cctattctggtggccgtggaagagtgtgaggccactgccacggcagatgcacgctcaagtctgcgtatattcctcggcaggcagaattcccccaccacgcacttctgtggccatgtctgagcacagtgtgccgcccgtggctgctccctccctgggggtgaaagcgggcttcacaccaccttcctgtgtcttccgtttcaggcatcagcaatgcagaagcacggcagccagggaaggcccccaacttcagtgtcaactggacggtaggcgactccgctattgaggtcatcaacgccacgactgggaaggatgagctgggccgcgcgtcccgcctgtgtaagcacgcgttgtactgtcgctggatgcgtgtgcacggcaaggtactgaggcgccctcaccgcaatgcgccggctccacctccccaatagcttgtctgtcctcacacctactgttccttaagttgtttcatcatgtcatcatgcacagcttccgaaaacgatcacttggaatgattcttccttcagattgttttagcttagaagtgtggctacgtccctgaaaccttaa

SEQ ID NO: 457045 - DNA, 473 bp, Homo sapiens
acctgctataattaaatatgtaatttcctttctgatatttcccacagatttctcacaagaaacatatgtggctcattgattgtgggaaaacgtaatggtaaaaacaaacacagtgtaaaataacttttaagtagatttttgtctttgtgatcgtaagctgctaaatcagtctgttaactttttgttgcactccttcgtcagttggttgggatcctgcggaattgccagtgcatccctgtaaccacgcaggcttgggctgggctgcgtcgacactgagtccgagctccctgaagactgtgctttcttctccctccagctggaacgtggtgggcatccagggatccctgctcagcattttcgtggagcccatttacttctcgagcatcatcctgggcagcctttaccacggggaccacctttccagggccatgtaccagcggatctccaacatagaggacctgccacctctctac

SEQ ID NO: 457046 - DNA, 3603 bp, Homo sapiens
ggcggcggggctgaggcgctgaggcggccgtggcggcggcggcggcggcggcggcagcggcggccaagcggccaggttggcggccggggctccgggccgcgcgaggccacggccacgccgcgccgctgcgcacaaccaacgaggcagagcgccgcccggcgcgagactgcggccgaagcgtggggcgcgcgtgcggaggaccaggcgcggcgcggctgcggctgagagtggagcctttcaggctggcatggagagcttaaggggcaactgaaggagacacactggccaagcgcggagttctgcttacttcagtcctgctgagatactctctcagtccgctcgcaccgaaggaagctgccttgggatcagagcagacataaagctagaaaaatttcaagacagaaacagtctccgccagtcaagaaaccctcaaaagtattttgccatggatatagaagatgaagaaaacatgagttccagcagcactgatgtgaaggaaaaccgcaatctggacaacgtgtcccccaaggatggcagcacacctgggcctggcgagggctctcagctctccaatgggggtggtggtggccccggcagaaagcggcccctggaggagggcagcaatggccactccaagtaccgcctgaagaaaaggaggaaaacaccagggcccgtcctccccaagaacgccctgatgcagctgaatgagatcaagcctggtttgcagtacacactcctgtcccagactgggcccgtgcacgcgcctttgtttgtcatgtctgtggaggtgaatggccaggtttttgagggctctggtcccacaaagaaaaaggcaaaactccatgctgctgagaaggccttgaggtctttcgttcagtttcctaatgcctctgaggcccacctggccatggggaggaccctgtctgtcaacacggacttcacatctgaccaggccgacttccctgacacgctcttcaatggttttgaaactcctgacaaggcggagcctcccttttacgtgggctccaatggggatgactccttcagttccagcggggacctcagcttgtctgcttccccggtgcctgccagcctagcccagcctcctctccctgtcttaccaccattcccacccccgagtgggaagaatcccgtgatgatcttgaacgaactgcgcccaggactcaagtatgacttcctctccgagagcggggagagccatgccaagagcttcgtcatgtctgtggtcgtggatggtcagttctttgaaggctcggggagaaacaagaagcttgccaaggcccgggctgcgcagtctgccctggccgccatttttaacttgcacttggatcagacgccatctcgccagcctattcccagtgagggtcttcagctgcatttaccgcaggttttagctgacgctgtctcacgcctggtcctgggtaagtttggtgacctgaccgacaacttctcctcccctcacgctcgcagaaaagtgctggctggagtcgtcatgacaacaggcacagatgttaaagatgccaaggtgataagtgtttctacaggaacaaaatgtattaatggtgaatacatgagtgatcgtggccttgcattaaatgactgccatgcagaaataatatctcggagatccttgctcagatttctttatacacaacttgagctttacttaaataacaaagatgatcaaaaaagatccatctttcagaaatcagagcgaggggggtttaggctgaaggagaatgtccagtttcatctgtacatcagcacctctccctgtggagatgccagaatcttctcaccacatgagccaatcctggaagggtctcgctcttacacccaggctggagtgcagtggtgcaatcatggctcactgcagcctcgacctcctgggctcttaagcgatccttccacctcaaccttccaaggagctgggactacagaaccagcagatagacacccaaatcgtaaagcaagaggacagctacggaccaaaatagagtctggtgaggggacgattccagtgcgctccaatgcgagcatccaaacgtgggacggggtgctgcaaggggagcggctgctcaccatgtcctgcagtgacaagattgcacgctggaacgtggtgggcatccagggatccctgctcagcattttcgtggagcccatttacttctcgagcatcatcctgggcagcctttaccacggggaccacctttccagggccatgtaccagcggatctccaacatagaggacctgccacctctctacaccctcaacaagcctttgctcagtggcatcagcaatgcagaagcacggcagccagggaaggcccccaacttcagtgtcaactggacggtaggcgactccgctattgaggtcatcaacgccacgactgggaaggatgagctgggccgcgcgtcccgcctgtgtaagcacgcgttgtactgtcgctggatgcgtgtgcacggcaaggttccctcccacttactacgctccaagattaccaagcccaacgtgtaccatgagtccaagctggcggcaaaggagtaccaggccgccaaggtacactgaggaggggacggctccgtcttcacattgtgcacagatctgaggatgggattagcgaagctgtggagactgcacatccggacctgcccatgtctcaaaacaaacacatgtacagtggctctttttccttctcaaacactttaccccagaagcaggtggtctgccccaggcataaagaaggaaaattggccatctttcccacctctaaattctgtaaaattatagacttgctcaaaagattcctttttatcatccccacgctgtgtaagtggaaagggcattgtgttccgtgtgtgtccagtttacagcgtctctgccccctagcgtgttttgtgacaatctccctgggtgaggagtgggtgcacccagccccgaggccagtggttgctcggggccttccgtgtgagttctagtgttcacttgatgccggggaatagaattagagaaaactctgacctgccgggttccagggactggtggaggtggatggcaggtccgactcgaccatgacttagttgtaagggtgtgtcggctttttcagtctcatgtgaaaatcctcctgtctctggcagcactgtctgcactttcttgtttactgtttgaagggacgagtaccaagccacaagaacacttcttttggccacagcataagctgatggtatgtaaggaaccgatgggccattaaacatgaactgaacggttaaaagcacagtctatggaacgctaatggagtcagcccctaaagctgtttgctttttcaggctttggattacatgcttttaatttgattttagaatctggacactttctatgaatgtaattcggctgagaaacatgttgctgagatgcaatcctcagtgttctctgtatgtaaatctgtgtatacaccacacgttacaactgcatgagcttcctctcgcacaagaccagctggaactgagcatgagacgctgtcaaatacagacaaaggatttgagatgttctcaataaaaagaaaatgtttcactaaaaaaaaa

SEQ ID NO: 457047 - DNA, 5402 bp, Homo sapiens
ggcggcggggctgaggcgctgaggcggccgtggcggcggcggcggcggcggcggcagcggcggccaagcggccaggttggcggccggggctccgggccgcgcgaggccacggccacgccgcgccgctgcgcacaaccaacgaggcagagcgccgcccggcgcgagactgcggccgaagcgtggggcgcgcgtgcggaggaccaggcgcggcgcggctgcggctgagcataattgatatactgtggttactctacctatttgtgtaggcctctcaggtcattgaaacaagatgttgtacaaattagcagatgacactggcgcatggaggaatgagtctagtgttgttaatgagaagttggatatccgtttgatccttgttctactgcaggtagtgtatattttgagaacagcgtgaggtttattctactaatggaaatttacaaaaataccagtttgaatgattgagaaatctaagttaaagaacccttgaatagaaatgtcgctgttcagtgcgttgatcgattctcacatctgaagccagctgtgtattcttgagtggagcctttcaggctggcatggagagcttaaggggcaactgaaggagacacactggccaagcgcggagttctgcttacttcagtcctgctgagatactctctcagtccgctcgcaccgaaggaagctgccttgggatcagagcagacataaagctagaaaaatttcaagacagaaacagtctccgccagtcaagaaaccctcaaaagtattttgccatggatatagaagatgaagaaaacatgagttccagcagcactgatgtgaaggaaaaccgcaatctggacaacgtgtcccccaaggatggcagcacacctgggcctggcgagggctctcagctctccaatgggggtggtggtggccccggcagaaagcggcccctggaggagggcagcaatggccactccaagtaccgcctgaagaaaaggaggaaaacaccagggcccgtcctccccaagaacgccctgatgcagctgaatgagatcaagcctggtttgcagtacacactcctgtcccagactgggcccgtgcacgcgcctttgtttgtcatgtctgtggaggtgaatggccaggtttttgagggctctggtcccacaaagaaaaaggcaaaactccatgctgctgagaaggccttgaggtctttcgttcagtttcctaatgcctctgaggcccacctggccatggggaggaccctgtctgtcaacacggacttcacatctgaccaggccgacttccctgacacgctcttcaatggttttgaaactcctgacaaggcggagcctcccttttacgtgggctccaatggggatgactccttcagttccagcggggacctcagcttgtctgcttccccggtgcctgccagcctagcccagcctcctctccctgtcttaccaccattcccacccccgagtgggaagaatcccgtgatgatcttgaacgaactgcgcccaggactcaagtatgacttcctctccgagagcggggagagccatgccaagagcttcgtcatgtctgtggtcgtggatggtcagttctttgaaggctcggggagaaacaagaagcttgccaaggcccgggctgcgcagtctgccctggccgccatttttaacttgcacttggatcagacgccatctcgccagcctattcccagtgagggtcttcagctgcatttaccgcaggttttagctgacgctgtctcacgcctggtcctgggtaagtttggtgacctgaccgacaacttctcctcccctcacgctcgcagaaaagtgctggctggagtcgtcatgacaacaggcacagatgttaaagatgccaaggtgataagtgtttctacaggaacaaaatgtattaatggtgaatacatgagtgatcgtggccttgcattaaatgactgccatgcagaaataatatctcggagatccttgctcagatttctttatacacaacttgagctttacttaaataacaaagatgatcaaaaaagatccatctttcagaaatcagagcgaggggggtttaggctgaaggagaatgtccagtttcatctgtacatcagcacctctccctgtggagatgccagaatcttctcaccacatgagccaatcctggaagggtctcgctcttacacccaggctggagtgcagtggtgcaatcatggctcactgcagcctcgacctcctgggctcttaagcgatccttccacctcaaccttccaaggagctgggactacagaaccagcagatagacacccaaatcgtaaagcaagaggacagctacggaccaaaatagagtctggtgaggggacgattccagtgcgctccaatgcgagcatccaaacgtgggacggggtgctgcaaggggagcggctgctcaccatgtcctgcagtgacaagattgcacgctggaacgtggtgggcatccagggatccctgctcagcattttcgtggagcccatttacttctcgagcatcatcctgggcagcctttaccacggggaccacctttccagggccatgtaccagcggatctccaacatagaggacctgccacctctctacaccctcaacaagcctttgctcagtggcatcagcaatgcagaagcacggcagccagggaaggcccccaacttcagtgtcaactggacggtaggcgactccgctattgaggtcatcaacgccacgactgggaaggatgagctgggccgcgcgtcccgcctgtgtaagcacgcgttgtactgtcgctggatgcgtgtgcacggcaaggttccctcccacttactacgctccaagattaccaagcccaacgtgtaccatgagtccaagctggcggcaaaggagtaccaggccgccaaggcgcgtctgttcacagccttcatcaaggcggggctgggggcctgggtggagaagcccaccgagcaggaccagttctcactcacgccctgacccgggcagacatgatggggggtgcagggggctgtgggcatccagcgtcatcctccagaacctcacatctgaactgggggcaggtgcataccttggggagggagtagggggacacgggggaccaccaggtgtccacggttgtccccagcatctcacatcagacctggggcaggtgcgcagtgtggggaggggatggggtgcgtcagggcccagcatcgccgcctggcatctctctgccgcagcatttccccttctgaaccgtccagtgactgctttcaatctcggtttacgtttagaaattgagttctactgagtagggcttccttaagtttaggaaaatagaaattactttgtgtgaaattcttgaataaataatttattcagagctaggaatgtggtttataaaataggaagtaattgtgtcaggtcacttttatgccacattattttaattgcaaaaaagcatctatatatggaggagggtgggaaaatagaggtaggaaatagtagcctaaaggaaatcgccacacgtctgtctaaacttaggtctcttttctccgtaggtacctccctgggtagttccacacactaggttgtaacagtctctccctgaggagcagactcccagcatggtgtagcgtggccctgtcatgcacatggggtcccgcagcagtgactgtgtgtcctgcagaggcgtgacccaggcccctgtagccctcagcctcctctagaagcttctgtactccttgtaggatcagatcatggaaaacttttctcagtttacttctaagtaatcacagataatacatggccagtaatcccaggctggccattcattcaggttttttaaaggatatttaacttttatggactagaaggaatcacgagggctactgcacaatacatggcctaagttccctctgttccttcctctgaatcgaatggatgtgggtgaccgcccgaaggccttcacaggatggaagtagaatgatttcagtagatactcattcttggaaaatgccatagttttaaattattgtttccagctttatcaaagacatgtttgaaaaataaaaagcatccaagtgagagctggtgagaccacgtgctgctggcgtagtgtaggccagacattgacagtcctgacgggagctcagggctgcccagcgcccagcgtgcacgggacggccccacgacagagggagtcagcccgggaggtcaggagcgcggcgggcgagggccctgtgtggaccacctccaccaagctcagagatttgcaaccaggtgccttgttgcctccgctcaggatgaaagaggagctgagagaagtgctctgcctgccagtgcagtgcccagctccaaggctctagagggtgttcaggtacactgaggaggggacggctccgtcttcacattgtgcacagatctgaggatgggattagcgaagctgtggagactgcacatccggacctgcccatgtctcaaaacaaacacatgtacagtggctctttttccttctcaaacactttaccccagaagcaggtggtctgccccaggcataaagaaggaaaattggccatctttcccacctctaaattctgtaaaattatagacttgctcaaaagattcctttttatcatccccacgctgtgtaagtggaaagggcattgtgttccgtgtgtgtccagtttacagcgtctctgccccctagcgtgttttgtgacaatctccctgggtgaggagtgggtgcacccagccccgaggccagtggttgctcggggccttccgtgtgagttctagtgttcacttgatgccggggaatagaattagagaaaactctgacctgccgggttccagggactggtggaggtggatggcaggtccgactcgaccatgacttagttgtaagggtgtgtcggctttttcagtctcatgtgaaaatcctcctgtctctggcagcactgtctgcactttcttgtttactgtttgaagggacgagtaccaagccacaagaacacttcttttggccacagcataagctgatggtatgtaaggaaccgatgggccattaaacatgaactgaacggttaaaagcacagtctatggaacgctaatggagtcagcccctaaagctgtttgctttttcaggctttggattacatgcttttaatttgattttagaatctggacactttctatgaatgtaattcggctgagaaacatgttgctgagatgcaatcctcagtgttctctgtatgtaaatctgtgtatacaccacacgttacaactgcatgagcttcctctcgcacaagaccagctggaactgagcatgagacgctgtcaaatacagacaaaggatttgagatgttctcaataaaaagaaaatgtttcactaaaaaaaaa

SEQ ID NO: 457048 - DNA, 2958 bp, Homo sapiens
  misc_feature (2841)..(2841): n is a, c, g, or t
ggcggcggggctgaggcgctgaggcggccgtggcggcggcggcggcggcggcggcagcggcggccaagcggccaggttggcggccggggctccgggccgcgcgaggccacggccacgccgcgccgctgcgcacaaccaacgaggcagagcgccgcccggcgcgagactgcggccgaagcgtggggcgcgcgtgcggaggaccaggcgcggcgcggctgcggctgagcataattgatatactgtggttactctacctatttgtgtaggcctctcaggtcattgaaacaagatgttgtacaaattagcagatgacactggcgcatggaggaatgagtctagtgttgttaatgagaagttggatatccgtttgatccttgttctactgcaggtagtgtatattttgagaacagcgtgaggtttattctactaatggaaatttacaaaaataccagtttgaatgattgagaaatctaagttaaagaacccttgaatagaaatgtcgctgttcagtgcgttgatcgattctcacatctgaagccagctgtgtattcttgagtggagcctttcaggctggcatggagagcttaaggggcaactgaaggagacacactggccaagcgcggagttctgcttacttcagtcctgctgagatactctctcagtccgctcgcaccgaaggaagctgccttgggatcagagcagacataaagctagaaaaatttcaagacagaaacagtctccgccagtcaagaaaccctcaaaagtattttgccatggatatagaagatgaagaaaacatgagttccagcagcactgatgtgaaggaaaaccgcaatctggacaacgtgtcccccaaggatggcagcacacctgggcctggcgagggctctcagctctccaatgggggtggtggtggccccggcagaaagcggcccctggaggagggcagcaatggccactccaagtaccgcctgaagaaaaggaggaaaacaccagggcccgtcctccccaagaacgccctgatgcagctgaatgagatcaagcctggtttgcagtacacactcctgtcccagactgggcccgtgcacgcgcctttgtttgtcatgtctgtggaggtgaatggccaggtttttgagggctctggtcccacaaagaaaaaggcaaaactccatgctgctgagaaggccttgaggtctttcgttcagtttcctaatgcctctgaggcccacctggccatggggaggaccctgtctgtcaacacggacttcacatctgaccaggccgacttccctgacacgctcttcaatggttttgaaactcctgacaaggcggagcctcccttttacgtgggctccaatggggatgactccttcagttccagcggggacctcagcttgtctgcttccccggtgcctgccagcctagcccagcctcctctccctgtcttaccaccattcccacccccgagtgggaagaatcccgtgatgatcttgaacgaactgcgcccaggactcaagtatgacttcctctccgagagcggggagagccatgccaagagcttcgtcatgtctgtggtcgtggatggtcagttctttgaaggctcggggagaaacaagaagcttgccaaggcccgggctgcgcagtctgccctggccgccatttttaacttgcacttggatcagacgccatctcgccagcctattcccagtgagggtcttcagctgcatttaccgcaggttttagctgacgctgtctcacgcctggtcctgggtaagtttggtgacctgaccgacaacttctcctcccctcacgctcgcagaaaagtgctggctggagtcgtcatgacaacaggcacagatgttaaagatgccaaggtgataagtgtttctacaggaacaaaatgtattaatggtgaatacatgagtgatcgtggccttgcattaaatgactgccatgcagaaataatatctcggagatccttgctcagatttctttatacacaacttgagctttacttaaataacaaagatgatcaaaaaagatccatctttcagaaatcagagcgaggggggtttaggctgaaggagaatgtccagtttcatctgtacatcagcacctctccctgtggagatgccagaatcttctcaccacatgagccaatcctggaagggtctcgctcttacacccaggctggagtgcagtggtgcaatcatggctcactgcagcctcgacctcctgggctcttaagcgatccttccacctcaaccttccaaggagctgggactacagaaccagcagatagacacccaaatcgtaaagcaagaggacagctacggaccaaaatagagtctggtgaggggacgattccagtgcgctccaatgcgagcatccaaacgtgggacggggtgctgcaaggggagcggctgctcaccatgtcctgcagtgacaagattgcacgctggaacgtggtgggcatccagggatccctgctcagcattttcgtggagcccatttacttctcgagcatcatcctgggcagcctttaccacggggaccacctttccagggccatgtaccagcggatctccaacatagaggacctgccacctctctacaccctcaacaagcctttgctcagtggcatcagcaatgcagaagcacggcagccagggaaggcccccaacttcagtgtcaactggacggtaggcgactccgctattgaggtcatcaacgccacgactgggaaggatgagctgggccgcgcgtcccgcctgtgtaagcacgcgttgtactgtcgctggatgcgtgtgcacggcaagtgaagacggagccgtccccgtngacgcggccgcgaatctagtagtagttgtcgacccgggaattttcggaccgtgtccttgcaagcgtaccaattttttcctaatagtgagtctttaattagatgcttgatcgttatcc

SEQ ID NO: 457049 - DNA, 1435 bp, Homo sapiens
  misc_feature (1010)..(1010): n is a, c, g, or t
  misc_feature (1027)..(1027): n is a, c, g, or t
ttgggctggagccgccctgggtgtcagcggctcggctcccgcgcacgctccggccgtcgcgcagcctcggcacctgcaggtccgtgcgtcccgcggctggcgcccctgactccgtcccggccagggagggccatgatttccctcccggggcccctggtgaccaacttgctgcggtttttgttcctggggctgagtgccctcgcgcccccctcgcgggcccagctgcaactgcacttgcccgccaaccggttgcaggcggtggagggaggggaagtggtgcttccagcgtggtacaccttgcacggggaggtgtcttcatcccagccatgggaggtgccctttgtgatgtggttcttcaaacagaaagaaaaggaggatcaggtgttgtcctacatcaatggggtcacaacaagcaaacctggagtatccttggtctactccatgccctcccggaacctgtccctgcggctggagggtctccaggagaaagactctggcccctacagctgctccgtgaatgtgcaagacaaacaaggcaaatctaggggccacagcatcaaaaccttagaactcaatgtactggttcctccagctcctccatcctgccgtctccagggtgtgccccatgtgggggcaaacgtgaccctgagctgccagtctccaaggagtaagcccgctgtccaataccagtgggatcggcagcttccatccttccagactttctttgcaccagcattagatgtcatccgtgggtctttaagcctcaccaacctttcgtcttccatggctggagtctatgtctgcaaggcccacaatgaggtgggcactgcccaatgtaatgtgacgctggaagtgagcacagggcctggagctgcagtggttgctggagctgttgtgggtaccctggttggactggggttgctggctgggctggtcctcttgtaccaccgccggggcaaggccctggaggagccagccaatgatatcaagaggatgcattgctcccgganctgcctggccaagagtnagacaaatctcaagatgggacctttctctgtcactcgcacgagcctcggcacccatggcctccaggctggtgatgacccacgcagttctcagcaggcattgcttcaccaacaattggccacagaaaccatggaggccaaccatcaaaaaaaaaaaccagtcctaggcggcagtccatacaccggacctgagcggaacggtataactggcccaagcgacgaggcggacaaaaaacaaccgccacacagaaaatagacaccccaaccacagcacacaggaaggggaagaacaacacaaagagcccacaaaagcgacagcgaaggcaaagacaacgctagaccgaaagacgcacacacaaacgagaaagcaacaacaatgctgcagaagcacgagcaaacggacaacacaa

SEQ ID NO: 457050 - DNA, 448 bp, Homo sapiens
aagggtgcagggcagagggagaggatctgtgggtctcctgggtgtggttttaatctgtctccccctgcccagttcctccagctcctccatcctgccgtctccagggtgtgccccatgtgggggcaaacgtgaccctgagctgccagtctccaaggagtaagcccgctgtccaataccagtgggatcggcagcttccatccttccagactttctttgcaccagcattaggtgaggacactactggaaacagtggacactgtggctggggaaggggaaagatgagagtcccactccagctccctgtattgatataacctgtcaggctggcttggttaggttttactggggcagaggatagggaatctcttattaaaactaacatgaaatatgtgttgttttcatttgcaaatttaaataaagatacataatgtttgtatgagataagaaa

SEQ ID NO: 457051 - DNA, 2102 bp, Homo sapiens
  misc_feature (2010)..(2010): n is a, c, g, or t
ttgggctggagccgccctgggtgtcagcggctcggctcccgcgcacgctccggccgtcgcgcagcctcggcacctgcaggtccgtgcgtcccgcggctggcgcccctgactccgtcccggccagggagggccatgatttccctcccggggcccctggtgaccaacttgctgcggtttttgttcctggggctgagtgccctcgcgcccccctcgcgggcccagctgcaactgcacttgcccgccaaccggttgcaggcggtggagggaggggaagtggtgcttccagcgtggtacaccttgcacggggaggtgtcttcatcccagccatgggaggtgccctttgtgatgtggttcttcaaacagaaagaaaaggaggatcaggtgttgtcctacatcaatggggtcacaacaagcaaacctggagtatccttggtctactccatgccctcccggaacctgtccctgcggctggagggtctccaggagaaagactctggcccctacagctgctccgtgaatgtgcaagacaaacaaggcaaatctaggggccacagcatcaaaaccttagaactcaatgtactggttcctccagctcctccatcctgccgtctccagggtgtgccccatgtgggggcaaacgtgaccctgagctgccagtctccaaggagtaagcccgctgtccaataccagtgggatcggcagcttccatccttccagactttctttgcaccagcattagatgtcatccgtgggtctttaagcctcaccaacctttcgtcttccatggctggagtctatgtctgcaaggcccacaatgaggtgggcactgcccaatgtaatgtgacgctggaagtgagcacagggcctggagctgcagtggttgctggagctgttgtgggtaccctggttggactggggttgctggctgggctggtcctcttgtaccaccgccggggcaaggccctggaggagccagccaatgatatcaaggaggatgccattgctccccggaccctgccctggcccaagagctcagacacaatctccaagaatgggaccctttcctctgtcacctccgcacgagccctccggccaccccatggccctcccaggcctggtgcattgacccccacgcccagtctctccagccaggccctgccctcaccaagactgcccacgacagatggggcccaccctcaaccaatatcccccatccctggtggggtttcttcctctggcttgagccgcatgggtgctgtgcctgtgatggtgcctgcccagagtcaagctggctctctggtatgatgaccccaccactcattggctaaaggatttggggtctctccttcctataagggtcacctctagcacagaggcctgagtcatgggaaagagtcacactcctgacccttagtactctgcccccacctctctttactgtgggaaaaccatctcagtaagacctaagtgtccaggagacagaaggagaagaggaagtggatctggaattgggaggagcctccacccacccctgactcctccttatgaagccagctgctgaaattagctactcaccaagagtgaggggcagagacttccagtcactgagtctcccaggcccccttgatctgtaccccacccctatctaacaccacccttggctcccactccagctccctgtattgatataacctgtcaggctggcttggttaggttttactggggcagaggatagggaatctcttattaaaactaacatgaaatatgtgttgttttcatttgcaaatttaaataaagatacataatgtttgtatgagataagaaaaaaaaacaaaaaaaaaaaaaaaaaaaaacaaacaagcacaagacaaaacaacaaaaaaaaaaaagggggggcccccacacaaatcccacccccgcggccccccgtcaccccccctccccgcccggccaccccgcgagcccccggcgccgcgcacccctcaccaacgctcctcccctccctccccntccgcctccgcgcccccccccccggcccccgccgcaccctcccccccgtcccctcccgccgccgctcccccgccctcccctccgccccctca

SEQ ID NO: 457052 - DNA, 1596 bp, Homo sapiens
ttgggctggagccgccctgggtgtcagcggctcggctcccgcgcacgctccggccgtcgcgcagcctcggcacctgcaggtccgtgcgtcccgcggctggcgcccctgactccgtcccggccagggagggccatgatttccctcccggggcccctggtgaccaacttgctgcggtttttgttcctggggctgagtgccctcgcgcccccctcgcgggcccagctgcaactgcacttgcccgccaaccggttgcaggcggtggagggaggggaagtggtgcttccagcgtggtacaccttgcacggggaggtgtcttcatcccagccatgggaggtgccctttgtgatgtggttcttcaaacagaaagaaaaggaggatcaggtgttgtcctacatcaatggggtcacaacaagcaaacctggagtatccttggtctactccatgccctcccggaacctgtccctgcggctggagggtctccaggagaaagactctggcccctacagctgctccgtgaatgtgcaagacaaacaaggcaaatctaggggccacagcatcaaaaccttagaactcaatgtactggttcctccagctcctccatcctgccgtctccagggtgtgccccatgtgggggcaaacgtgaccctgagctgccagtctccaaggagtaagcccgctgtccaataccagtgggatcggcagcttccatccttccagactttctttgcaccagcattagatgtcatccgtgggtctttaagcctcaccaacctttcgtcttccatggctggagtctatgtctgcaaggcccacaatgaggtgggcactgcccaatgtaatgtgacgctggaagtgagcacagggcctggagctgcagtggttgctggagctgttgtgggtaccctggttggactggggttgctggctgggctggtcctcttgtacccacgacagatggggcccaccctcaaccaatatcccccatccctggtggggtttcttcctctggcttgagccgcatgggtgctgtgcctgtgatggtgcctgcccagagtcaagctggctctctggtatgatgaccccaccactcattggctaaaggatttggggtctctccttcctataagggtcacctctagcacagaggcctgagtcatgggaaagagtcacactcctgacccttagtactctgcccccacctctctttactgtgggaaaaccatctcagtaagacctaagtgtccaggagacagaaggagaagaggaagtggatctggaattgggaggagcctccacccacccctgactcctccttatgaagccagctgctgaaattagctactcaccaagagtgaggggcagagacttccagtcactgagtctcccaggcccccttgatctgtaccccacccctatctaacaccacccttggctcccactccagctccctgtattgatataacctgtcaggctggcttggttaggttttactggggcagaggatagggaatctcttattaaaactaacatgaaatatgtgttgttttcatttgcaaatttaaataaagatacataatgtttgtatgagataagaaa

SEQ ID NO: 457053 - DNA, 1400 bp, Homo sapiens
  misc_feature (23)..(23): n is a, c, g, or t
  misc_feature (34)..(34): n is a, c, g, or t
  misc_feature (43)..(43): n is a, c, g, or t
gcaggcagactgtagatagagcnccccccaccgnctgatgcgnttggcgggtctccaggagaaagactctggcccctacagctgctccgtgaatgtgcaagacaaacaaggcaaatctaggggccacagcatcaaaaccttagaactcaatgtactggttcctccagctcctccatcctgccgtctccagggtgtgccccatgtgggggcaaacgtgaccctgagctgccagtctccaaggagtaagcccgctgtccaataccagtgggatcggcagcttccatccttccagactttctttgcaccagcattagatgtcatccgtgggtctttaagcctcaccaacctttcgtcttccatggctggagtctatgtctgcaaggcccacaatgaggtgggcactgcccaatgtaatgtgacgctggaagtgagcacagggcctggagctgcagtggttgctggagctgttgtgggtaccctggttggactggggttgctggctgggctggtcctcttgtaccaccgccggggcaaggccctggaggagccagccaatgatatcaaggaggatgccattgctccccggaccctgccctggcccaagagctcagacacaatctccaagaatgggaccctttcctctgtcacctccgcacgagccctccggccaccccatggccctcccaggcctggtgcattgacccccacgcccagtctctccagccaggccctgccctcaccaagactgcccacgacagatggggcccaccctcaaccaatatcccccatccctggtggggtttcttcctctggcttgagccgcatgggtgctgtgcctgtgatggtgcctgcccagagtcaagctggctctctggtatgatgaccccaccactcattggctaaaggatttggggtctctccttcctataagggtcacctctagcacagaggcctgagtcatgggaaagagtcacactcctgacccttagtactctgcccccacctctctttactgtgggaaaaccatctcagtaagacctaagtgtccaggagacagaaggagaagaggaagtggatctggaattgggaggagcctccacccacccctgactcctccttatgaagccagctgctgaaattagctactcaccaagagtgaggggcagagacttccagtcactgagtctcccaggcccccttgatctgtaccccacccctatctaacaccacccttggctcccactccagctccctgtattgatataacctgtcaggctggcttggttaggttttactggggcagaggatagggaatctcttattaaaactaacatgaaatatgtgttgttttcatttgcaaatttaaataaagatacataatgtttgtatgagataagaaa

SEQ ID NO: 457054 - DNA, 1466 bp, Homo sapiens
ttgggctggagccgccctgggtgtcagcggctcggctcccgcgcacgctccggccgtcgcgcagcctcggcacctgcaggtccgtgcgtcccgcggctggcgcccctgactccgtcccggccagggagggccatgatttccctcccggggcccctggtgaccaacttgctgcggtttttgttcctggggctgagtgccctcgcgcccccctcgcgggcccagctgcaactgcacttgcccgccaaccggttgcaggcggtggagggaggggaagtggtgcttccagcgtggtacaccttgcacggggaggtgtcttcatcccagccatgggaggtgccctttgtgatgtggttcttcaaacagaaagaaaaggaggatcaggtgttgtcctacatcaatggggtcacaacaagcaaacctggagtatccttggtctactccatgccctcccggaacctgtccctgcggctggagggtctccaggagaaagactctggcccctacagctgctccgtgaatgtgcaagacaaacaaggcaaatctaggggccacagcatcaaaaccttagaactcaatgtactggttcctccagctcctccatcctgccgtctccagggtgtgccccatgtgggggcaaacgtgaccctgagctgccagtctccaaggagtaagcccgctgtccaataccagtgggatcggcagcttccatccttccagactttctttgcaccagcattagatgtcatccgtgggtctttaagcctcaccaacctttcgtcttccatggctggagtctatgtctgcaaggcccacaatgaggtgggcactgcccaatgtaatgtgacgctggaagtgagcacagggcctggagctgcagtggttgctggagctgttgtgggtaccctggttggactggggttgctggctgggctggtcctcttgtaccaccgccggggcaaggccctggaggagccagccaatgatatcaaggaggatgccattgctccccggaccctgccctggcccaagagctcagacacactcctgacccttagtactctgcccccacctctctttactgtgggaaaaccatctcagtaagacctaagtgtccaggagacagaaggagaagaggaagtggatctggaattgggaggagcctccacccacccctgactcctccttatgaagccagctgctgaaattagctactcaccaagagtgaggggcagagacttccagtcactgagtctcccaggcccccttgatctgtaccccacccctatctaacaccacccttggctcccactccagctccctgtattgatataacctgtcaggctggcttggttaggttttactggggcagaggatagggaatctcttattaaaactaacatgaaatatgtgttgttttcatttgcaaatttaaataaagatacataatgtttgtatgagataagaaa

SEQ ID NO: 457055 - DNA, 1125 bp, Homo sapiens
ttgggctggagccgccctgggtgtcagcggctcggctcccgcgcacgctccggccgtcgcgcagcctcggcacctgcaggtccgtgcgtcccgcggctggcgcccctgactccgtcccggccagggagggccatgatttccctcccggggcccctggtgaccaacttgctgcggtttttgttcctggggctgagtgccctcgcgcccccctcgcgggcccagctgcaactgcacttgcccgccaaccggttgcaggcggtggagggaggggaagtggtgcttccagcgtggtacaccttgcacggggaggtgtcttcatcccagccatgggaggtgccctttgtgatgtggttcttcaaacagaaagaaaaggaggatcaggtgttgtcctacatcaatggggtcacaacaagcaaacctggagtatccttggtctactccatgccctcccggaacctgtccctgcggctggagggtctccaggagaaagactctggcccctacagctgctccgtgaatgtgcaagacaaacaaggcaaatctaggggccacagcatcaaaaccttagaactcaatgtactggttcctccagctcctccatcctgccgtctccagggtgtgccccatgtgggggcaaacgtgaccctgagctgccagtctccaaggagtaagcccgctgtccaataccagtgggatcggcagcttccatccttccagactttctttgcaccagcattagatgtcatccgtgggtctttaagcctcaccaacctttcgtcttccatggctggagtctatgtctgcaaggcccacaatgaggtgggcactgcccaatgtaatgtgacgctggaagtgagcacagggcctggagctgcagtggttgctggagctgttgtgggtaccctggttggactggggttgctggctgggctggtcctcttgtaccaccgccggggcaaggccctggaggagccagccaatgatatcaaggaggatgccattgctccccggaccctgccctggcccaagagctcagacacctcttattaaaactaacatgaaatatgtgttgttttcatttgcaaatttaaataaagatacataatgtttgtatgagataagaaa

SEQ ID NO: 457056 - DNA, 296 bp, Homo sapiens
tctcccagctctcctcacagaggctgggaattcaggcagctctcatctattgggatggggtcagtggctgaaacatcattcctatgggcaggttttaagggagagggaaaggagtactgaagtgtgcaggcagaggtggtatataagaccaagcaggtagaaactctctcctccttcccccacccacttctgacctcttgttatttctttgatgactagggaggatgccattgctccccggaccctgccctggcccaagagctcagacacaatctccaagaatgggaccctttcct

SEQ ID NO: 457057 - DNA, 333 bp, Homo sapiens
tttaatgggaaagagggtccctggactgatggctaaattgtgtccacagatgtcatccgtgggtctttaagcctcaccaacctttcgtcttccatggctggagtctatgtctgcaaggcccacaatgaggtgggcactgcccaatgtaatgtgacgctggaagtgagcacagagtgaggggtaagtgtggttaagaagagtggtcaatggtgggggaggggttgcaagtggggaggaggcctgtctgctgaggcctgtctctgtagcagggcacggagcttcccctgatcaaatgtttgtacaaatggttggtcagtgactggtcatttcctg

SEQ ID NO: 457058 - DNA, 1825 bp, Homo sapiens
ttgggctggagccgccctgggtgtcagcggctcggctcccgcgcacgctccggccgtcgcgcagcctcggcacctgcaggtccgtgcgtcccgcggctggcgcccctgactccgtcccggccagggagggccatgatttccctcccggggcccctggtgaccaacttgctgcggtttttgttcctggggctgagtgccctcgcgcccccctcgcgggcccagctgcaactgcacttgcccgccaaccggttgcaggcggtggagggaggggaagtggtgcttccagcgtggtacaccttgcacggggaggtgtcttcatcccagccatgggaggtgccctttgtgatgtggttcttcaaacagaaagaaaaggaggatcaggtgttgtcctacatcaatggggtcacaacaagcaaacctggagtatccttggtctactccatgccctcccggaacctgtccctgcggctggagggtctccaggagaaagactctggcccctacagctgctccgtgaatgtgcaagacaaacaaggcaaatctaggggccacagcatcaaaaccttagaactcaatgtactggttcctccagctcctccatcctgccgtctccagggtgtgccccatgtgggggcaaacgtgaccctgagctgccagtctccaaggagtaagcccgctgtccaataccagtgggatcggcagcttccatccttccagactttctttgcaccagcattagatgtcatccgtgggtctttaagcctcaccaacctttcgtcttccatggctggagtctatgtctgcaaggcccacaatgaggtgggcactgcccaatgtaatgtgacgctggaagtgagcacagggcctggagctgcagtggttgctggagctgttgtgggtaccctggttggactggggttgctggctgggctggtcctcttgtaccaccgccggggcaaggccctggaggagccagccaatgatatcaaggaggatgccattgctccccggaccctgccctggcccaagagctcagacacaatctccaagaatgggaccctttcctctgtcacctccgcacgagccctccggccaccccatggccctcccaggcctggtgcattgacccccacgcccagtctctccagccaggccctgccctcaccaagactgcccacgacagatggggcccaccctcaaccaatatcccccatccctggtggggtttcttcctctggcttgagccgcatgggtgctgtgcctgtgatggtgcctgcccagagtcaagctggctctctggtatgatgaccccaccactcattggctaaaggatttggggtctctccttcctataagggtcacctctagcacagaggcctgagtcatgggaaagagtcacactcctgacccttagtactctgcccccacctctctttactgtgggaaaaccatctcagtaagacctaagtgtccaggagacagaaggagaagaggaagtggatctggaattgggaggagcctccacccacccctgactcctccttatgaagccagctgctgaaattagctactcaccaagagtgaggggcagagacttccagtcactgagtctcccaggcccccttgatctgtaccccacccctatctaacaccacccttggctcccactccagctccctgtattgatataacctgtcaggctggcttggttaggttttactggggcagaggatagggaatctcttattaaaactaacatgaaatatgtgttgttttcatttgcaaatttaaataaagatacataatgtttgtatgagataagaaa

SEQ ID NO: 457059 - DNA, 1764 bp, Homo sapiens
ttgggctggagccgccctgggtgtcagcggctcggctcccgcgcacgctccggccgtcgcgcagcctcggcacctgcaggtccgtgcgtcccgcggctggcgcccctgactccgtcccggccagggagggccatgatttccctcccggggcccctggtgaccaacttgctgcggtttttgttcctggggctgagtgccctcgcgcccccctcgcgggcccagctgcaactgcacttgcccgccaaccggttgcaggcggtggagggaggggaagtggtgcttccagcgtggtacaccttgcacggggaggtgtcttcatcccagccatgggaggtgccctttgtgatgtggttcttcaaacagaaagaaaaggaggatcaggtgttgtcctacatcaatggggtcacaacaagcaaacctggagtatccttggtctactccatgccctcccggaacctgtccctgcggctggagggtctccaggagaaagactctggcccctacagctgctccgtgaatgtgcaagacaaacaaggcaaatctaggggccacagcatcaaaaccttagaactcaatgtactggttcctccagctcctccatcctgccgtctccagggtgtgccccatgtgggggcaaacgtgaccctgagctgccagtctccaaggagtaagcccgctgtccaataccagtgggatcggcagcttccatccttccagactttctttgcaccagcattagatgtcatccgtgggtctttaagcctcaccaacctttcgtcttccatggctggagtctatgtctgcaaggcccacaatgaggtgggcactgcccaatgtaatgtgacgctggaagtgagcacagggcctggagctgcagtggttgctggagctgttgtgggtaccctggttggactggggttgctggctgggctggtcctcttgtaccaccgccggggcaaggccctggaggagccagccaatgatatcaaggaggatgccattgctccccggaccctgccctggcccaagagctcagacacaatctccaagaatgggaccctttcctctgtcacctccgcacgagccctccggccaccccatggccctcccaggcctggtgcattgacccccacgcccagtctctccagccaggccctgccctcaccaagactgcccacgacagatggggcccaccctcaaccaatatcccccatccctggtggggtttcttcctctggcttgagccgcatgggtgctgtgcctgtgatggtgcctgcccagagtcaagctggctctctggtatgatgaccccaccactcattggctaaaggatttggggtctctccttcctataagggtcacctctagcacagaggcctgagtcatgggaaagagtcacactcctgacccttagtactctgcccccacctctctttactgtgggaaaaccatctcagtaagacctaagtgtccaggagacagaaggagaagaggaagtggatctggaattgggaggagcctccacccacccctgactcctccttatgaagccagctgctgaaattagctactcaccaagagtgaggggcagagacttccagtcactgagtctcccaggcccccttgatctgtaccccacccctatctaacaccacccttggctcccactccagctccctgtattgatataacctgtcaggctggcttggttaggttttactggggcagaggatagggaatctcttattaaaactaacatgaaat

SEQ ID NO: 457060 - DNA, 1444 bp, Homo sapiens
ttgggctggagccgccctgggtgtcagcggctcggctcccgcgcacgctccggccgtcgcgcagcctcggcacctgcaggtccgtgcgtcccgcggctggcgcccctgactccgtcccggccagggagggccatgatttccctcccggggcccctggtgaccaacttgctgcggtttttgttcctggggctgagtgccctcgttcctccagctcctccatcctgccgtctccagggtgtgccccatgtgggggcaaacgtgaccctgagctgccagtctccaaggagtaagcccgctgtccaataccagtgggatcggcagcttccatccttccagactttctttgcaccagcattagatgtcatccgtgggtctttaagcctcaccaacctttcgtcttccatggctggagtctatgtctgcaaggcccacaatgaggtgggcactgcccaatgtaatgtgacgctggaagtgagcacagggcctggagctgcagtggttgctggagctgttgtgggtaccctggttggactggggttgctggctgggctggtcctcttgtaccaccgccggggcaaggccctggaggagccagccaatgatatcaaggaggatgccattgctccccggaccctgccctggcccaagagctcagacacaatctccaagaatgggaccctttcctctgtcacctccgcacgagccctccggccaccccatggccctcccaggcctggtgcattgacccccacgcccagtctctccagccaggccctgccctcaccaagactgcccacgacagatggggcccaccctcaaccaatatcccccatccctggtggggtttcttcctctggcttgagccgcatgggtgctgtgcctgtgatggtgcctgcccagagtcaagctggctctctggtatgatgaccccaccactcattggctaaaggatttggggtctctccttcctataagggtcacctctagcacagaggcctgagtcatgggaaagagtcacactcctgacccttagtactctgcccccacctctctttactgtgggaaaaccatctcagtaagacctaagtgtccaggagacagaaggagaagaggaagtggatctggaattgggaggagcctccacccacccctgactcctccttatgaagccagctgctgaaattagctactcaccaagagtgaggggcagagacttccagtcactgagtctcccaggcccccttgatctgtaccccacccctatctaacaccacccttggctcccactccagctccctgtattgatataacctgtcaggctggcttggttaggttttactggggcagaggatagggaatctcttattaaaactaacatgaaatatgtgttgttttcatttgcaaatttaaataaagatacataatgtttgtatgagataagaaa

SEQ ID NO: 457061 - DNA, 1314 bp, Homo sapiens
aagggtgcagggcagagggagaggatctgtgggtctcctgggtgtggttttaatctgtctccccctgcccagttcctccagctcctccatcctgccgtctccagggtgtgccccatgtgggggcaaacgtgaccctgagctgccagtctccaaggagtaagcccgctgtccaataccagtgggatcggcagcttccatccttccagactttctttgcaccagcattagatgtcatccgtgggtctttaagcctcaccaacctttcgtcttccatggctggagtctatgtctgcaaggcccacaatgaggtgggcactgcccaatgtaatgtgacgctggaagtgagcacagggcctggagctgcagtggttgctggagctgttgtgggtaccctggttggactggggttgctggctgggctggtcctcttgtaccaccgccggggcaaggccctggaggagccagccaatgatatcaaggaggatgccattgctccccggaccctgccctggcccaagagctcagacacaatctccaagaatgggaccctttcctctgtcacctccgcacgagccctccggccaccccatggccctcccaggcctggtgcattgacccccacgcccagtctctccagccaggccctgccctcaccaagactgcccacgacagatggggcccaccctcaaccaatatcccccatccctggtggggtttcttcctctggcttgagccgcatgggtgctgtgcctgtgatggtgcctgcccagagtcaagctggctctctggtatgatgaccccaccactcattggctaaaggatttggggtctctccttcctataagggtcacctctagcacagaggcctgagtcatgggaaagagtcacactcctgacccttagtactctgcccccacctctctttactgtgggaaaaccatctcagtaagacctaagtgtccaggagacagaaggagaagaggaagtggatctggaattgggaggagcctccacccacccctgactcctccttatgaagccagctgctgaaattagctactcaccaagagtgaggggcagagacttccagtcactgagtctcccaggcccccttgatctgtaccccacccctatctaacaccacccttggctcccactccagctccctgtattgatataacctgtcaggctggcttggttaggttttactggggcagaggatagggaatctcttattaaaactaacatgaaatatgtgttgttttcatttgcaaatttaaataaagatacataatgtttgtatgagataagaaa

SEQ ID NO: 457062 - DNA, 286 bp, Homo sapiens
tgctggtaccggtccggaagtccttatggatctcagactcctctgcgtggagagggtgggtgcaggaggcagaccctccccccaaagccccctggggagatcttcctctctctatttaactgtaactgagggggatcccaggtctggggatgggggacaccttgggccacaggatactggttgcttcaggggtacccatgccccctgccctcgcctggaatcagtgttactgcatctgattaaatgtctccagaaataaagaataataattctgccaaaaaagcct

SEQ ID NO: 457063 - DNA, 3094 bp, Homo sapiens
agggcggcagcaaggctcccagacctgtccccagcccagccatcagcaggggagagaaagcgaaaccctttcaggggtctccttgtgactctccttcatgcctcccgacgtcccccgggccgctttggtttagctgtggtcgccaggacccccccagagccaagaccttctccagaaggtgacccttcccccccaccaccaccaatgtcagccctggtccccgacactcccccggacacccctcctgccatgaagaatgccactagctctaagcagctcccactggaaccagagagcccctcagggcaggtcgggcctaggccagcccccccgcaggaagagtccccttcctctgaagcaaagagcagaggacccaccccaccagccatgggcccacgggatgccagacctcctcgaaggagcagccagccatctccaacagcagtgccagcctccgacagccctcccaccaagcaagaggtgaagaaggcaggagagagacacaagctggcaaaggagcggcgagaagagcgggccaagtacctggcggccaagaaggcagtgtggctggagaaggaggagaaggccaaggcgctgcgggagaagcagctccaggagcgccggcgccggctggaggagcaacgtcttaaagccgagcaacgccgtgcagccctggaggaacggcagcggcagaagctcgagaaaaacaaggagcgctatgaagcagccatccaacggtcagtgaagaagacgtgggccgaaatccggcagcagcgctggtcctgggcaggggccctgcaccacagctctccaggacataagaccagtgggagcaggtgctccgtgtcggcagttaacctgcccaaacacgtggactctataatcaacaagcggctctcaaagtcctctgccacgctctggaactcccccagtagaaatcgcagcctgcagctgagcgcatgggagagcagcatcgtggatcgtctgatgacgcccactctctccttccttgctcggagtcgcagcgcggtcacactgccccgcaacggccgggaccaccgtgccggtgtgcccgcgctcggcctccgccagccccctgacgccgtgcagcgtcacccgaagcgtgcaccgctgcgcccccgccggtgagcgcggggagcgccgcaagcccaacgccgggggcagccccgctccggtgcgccgccggccggaggcctcgccggtgcagaaaaaggagaagaaggacaaggagcgggaaaacgagaaggagaagagtgccctagcccgggagcgcagcctcaagaagcgccagtcgctgcccgcctccccacgtgcccgcctctctgccagcaccgcctctgagctcagccccaaatccaaggccaggccatcctctccctccacatcctggcacaggcctgcctccccctgccccagcccagggccaggccacactctgcctccaaagccaccgtccccccgaggcaccactgcatcccccaaggggcgggttcggaggaaggaggaggcaaaggagagccccagcgccgcagggcccgaggacaagagccagagcaagcgcagggccagtaacgagaaggagtcagcagccccagcctcaccggcaccttcgccggcgccctcgcccaccccagccccgccccagaaggagcagccccccgcggagacccctacagacgctgctgtcttgacctcacccccagcccctgctcccccggtgacccctagcaaaccaatggccggcaccacagaccgagaagaagccactcggctcttggctgagaagcggcgccaggcccgggagcagcgggagcgcgaggagcaggagcggaggctgcaggcagaaagggacaagcgaatgcgagaggagcagctggcacgggaggccgaggcccgggcggagcgggaggcggaggcccggaggcgggaggagcaggaggcacgagagaaggcgcaggccgagcaggaggagcaggagcggctgcagaagcagaaagaggaggccgaagctcggtcgcgggaagaggcggagcggcagcgtctggagcgggaaaagcacttccagcagcaggagcaagagcggcaagagcgcagaaagcgtctggaggagatcatgaagaggactcggaagtcagaagtttctgaaaccaagaagcaggacagcaaggaggccaacgccaacggttccagcccagagcctgtgaaagctgtggaggctcggtccccagggctgcagaaggaggctgtgcagaaagaggagcccatcccacaggagcctcagtggagtctcccaagcaaggagttgccagcgtccctggtgaatggcctgcagcctctcccagcacaccaggagaatggcttctccaccaacggaccctctggggacaagagtctgagccgaacaccagagacactcctgccctttgcagaggcagaagccttcctcaagaaagctgtggtgcagtccccgcaggtcacagaagtcctttaagagggtttgccttggatccgggcacagttgtgagggctcctctgcatcacctaccaggatgtctggaggagaaaaagacagaacaaagatggaagtggcctgggcccctgggggtgggtcctctctgttgtttttaatctgcaccttatagactgatgtctctttggccggagccagatctgcccctcagtgcattcgtgtgctcgcacgcgcagacatcccttctcccccatacacacatatacactcacagcctctctggcctcttcccttggggaggggccacctgtagtatttgccttgatttggtggggtacagtggatgtgaatactgtaaatagcttgtgctcagactcctctgcgtggagagggtgggtgcaggaggcagaccctccccccaaagccccctggggagatcttcctctctctatttaactgtaactgagggggatcccaggtctggggatgggggacaccttgggccacaggatactggttgcttcaggggtacccatgccccctgccctcgcctggaatcagtgttactgcatctgattaaatgtctccagaaataaagaataa

SEQ ID NO: 457064 - DNA, 3898 bp, Homo sapiens
agggcggcagcaaggctcccagacctgtccccagcccagccatcagcaggggagagaaagcgaaaccctttcaggggtctccttgtgactctccttcatgcctcccgacgtcccccgggccgctttggtttaggtgggtttgagcgagaatttggactcgaagctgccctctcagccccagtgccagagcccccaaactccagggtgggaaaggggagtcccagccctgctccccctctcccccagtccccgcggcgggtgagtcacccgagcgctccctacttagtcctcaggcgctgcggcgcgtaccaagacgcggacgcagggggaggcagctagcgcggcgaactcctggagccgtggagcccgctcggccgtggccgtgggagaggcgccgggaggctgcgggcgcggggctccggggcgggggcggcgcgaacggcgcggacggcgcgggcgcggggggctgggtcccggggcgctgctggggtggacccccccgcctcgaacttggtacgcgccagcgagaggccaggcccagcccgggcggtacaatagggttgggccgaggccgggactgggccggcgccgggcggggaacgggttcgcgaccgcagccgagagaccccgggcgaccggcacctccgagactcgcgggccacctgcctcgaccttccccggagcgcccccgcctccgagtcgctacttgccgggccgggccgggccgggcgtgatgcgccgcgggacccctgtcctggccactggccgccgccgccgccgccgctgagaccccgagacccccagtgacgccgcagccatggagagcggcccgcgtgcggagctgggggcgggcgcacccccagctgtggtcgccaggacccccccagagccaagaccttctccagaaggtgacccttcccccccaccaccaccaatgtcagccctggtccccgacactcccccggacacccctcctgccatgaagaatgccactagctctaagcagctcccactggaaccagagagcccctcagggcaggtcgggcctaggccagcccccccgcaggaagagtccccttcctctgaagcaaagagcagaggacccaccccaccagccatgggcccacgggatgccagacctcctcgaaggagcagccagccatctccaacagcagtgccagcctccgacagccctcccaccaagcaagaggtgaagaaggcaggagagagacacaagctggcaaaggagcggcgagaagagcgggccaagtacctggcggccaagaaggcagtgtggctggagaaggaggagaaggccaaggcgctgcgggagaagcagctccaggagcgccggcgccggctggaggagcaacgtcttaaagccgagcaacgccgtgcagccctggaggaacggcagcggcagaagctcgagaaaaacaaggagcgctatgaagcagccatccaacggtcagtgaagaagacgtgggccgaaatccggcagcagcgctggtcctgggcaggggccctgcaccacagctctccaggacataagaccagtgggagcaggtgctccgtgtcggcagttaacctgcccaaacacgtggactctataatcaacaagcggctctcaaagtcctctgccacgctctggaactcccccagtagaaatcgcagcctgcagctgagcgcatgggagagcagcatcgtggatcgtctgatgacgcccactctctccttccttgctcggagtcgcagcgcggtcacactgccccgcaacggccgggaccaaggccccacgtggggccgggcaggggccagcctggcgcgcgggccgcaacccgaccgcactcatccctctgcagccgtgccggtgtgcccgcgctcggcctccgccagccccctgacgccgtgcagcgtcacccgaagcgtgcaccgctgcgcccccgccggtgagcgcggggagcgccgcaagcccaacgccgggggcagccccgctccggtgcgccgccggccggaggcctcgccggtgcagaaaaaggagaagaaggacaaggagcgggaaaacgagaaggagaagagtgccctagcccgggagcgcagcctcaagaagcgccagtcgctgcccgcctccccacgtgcccgcctctctgccagcaccgcctctgagctcagccccaaatccaaggccaggccatcctctccctccacatcctggcacaggcctgcctccccctgccccagcccagggccaggccacactctgcctccaaagccaccgtccccccgaggcaccactgcatcccccaaggggcgggttcggaggaaggaggaggcaaaggagagccccagcgccgcagggcccgaggacaagagccagagcaagcgcagggccagtaacgagaaggagtcagcagccccagcctcaccggcaccttcgccggcgccctcgcccaccccagccccgccccagaaggagcagccccccgcggagacccctacagacgctgctgtcttgacctcacccccagcccctgctcccccggtgacccctagcaaaccaatggccggcaccacagaccgagaagaagccactcggctcttggctgagaagcggcgccaggcccgggagcagcgggagcgcgaggagcaggagcggaggctgcaggcagaaagggacaagcgaatgcgagaggagcagctggcacgggaggccgaggcccgggcggagcgggaggcggaggcccggaggcgggaggagcaggaggcacgagagaaggcgcaggccgagcaggaggagcaggagcggctgcagaagcagaaagaggaggccgaagctcggtcgcgggaagaggcggagcggcagcgtctggagcgggaaaagcacttccagcagcaggagcaagagcggcaagagcgcagaaagcgtctggaggagatcatgaagaggactcggaagtcagaagtttctgaaaccaagaagcaggacagcaaggaggccaacgccaacggttccagcccagagcctgtgaaagctgtggaggctcggtccccagggctgcagaaggaggctgtgcagaaagaggagcccatcccacaggagcctcagtggagtctcccaagcaaggagttgccagcgtccctggtgaatggcctgcagcctctcccagcacaccaggagaatggcttctccaccaacggaccctctggggacaagagtctgagccgaacaccagagacactcctgccctttgcagaggcagaagccttcctcaagaaagctgtggtgcagtccccgcaggtcacagaagtcctttaagagggtttgccttggatccgggcacagttgtgagggctcctctgcatcacctaccaggatgtctggaggagaaaaagacagaacaaagatggaagtggcctgggcccctgggggtgggtcctctctgttgtttttaatctgcaccttatagactgatgtctctttggccggagccagatctgcccctcagtgcattcgtgtgctcgcacgcgcagacatcccttctcccccatacacacatatacactcacagcctctctggcctcttcccttggggaggggccacctgtagtatttgccttgatttggtggggtacagtggatgtgaatactgtaaatagcttgtgctcagactcctctgcgtggagagggtgggtgcaggaggcagaccctccccccaaagccccctggggagatcttcctctctctatttaactgtaactgagggggatcccaggtctggggatgggggacaccttgggccacaggatactggttgcttcaggggtacccatgccccctgccctcgcctggaatcagtgttactgcatctgattaaatgtctccagaaataaagaataa

SEQ ID NO: 457065 - DNA, 3713 bp, Homo sapiens
agggcggcagcaaggctcccagacctgtccccagcccagccatcagcaggggagagaaagcgaaaccctttcaggggtctccttgtgactctccttcatgcctcccgacgtcccccgggccgctttggtttaggtgggtttgagcgagaatttggactcgaagctgccctctcagccccagtgccagagcccccaaactccagggtgggaaaggggagtcccagccctgctccccctctcccccagtccccgcggcgggtgagtcacccgagcgctccctacttagtcctcaggcgctgcggcgcgtaccaagacgcggacgcagggggaggcagctagcgcggcgaactcctggagccgtggagcccgctcggccgtggccgtgggagaggcgccgggaggctgcgggcgcggggctccggggcgggggcggcgcgaacggcgcggacggcgcgggcgcggggggctgggtcccggggcgctgctggggtggacccccccgcctcgaacttggtacgcgccagcgagaggccaggcccagcccgggcggtacaatagggttgggccgaggccgggactgggccggcgccgggcggggaacgggttcgcgaccgcagccgagagaccccgggcgaccggcacctccgagactcgcgggccacctgcctcgaccttccccggagcgcccccgcctccgagtcgctacttgccgggccgggccgggccgggcgtgatgcgccgcgggacccctgtcctggccactggccgccgccgccgccgccgctgagaccccgagacccccagtgacgccgcagccatggagagcggcccgcgtgcggagctgggggcgggcgcacccccagctgtggtcgccaggacccccccagagccaagaccttctccagaaggtgacccttcccccccaccaccaccaatgtcagccctggtccccgacactcccccggacacccctcctgccatgaagaatgccactagctctaagcagctcccactggaaccagagagcccctcagggcaggtcgggcctaggccagcccccccgcaggaagagtccccttcctctgaagcaaagagcagaggacccaccccaccagccatgggcccacgggatgccagacctcctcgaaggagcagccagccatctccaacagcagtgccagcctccgacagccctcccaccaagcaagaggtgaagaaggcaggagagagacacaagctggcaaaggagcggcgagaagagcgggccaagtacctggcggccaagaaggcagtgtggctggagaaggaggagaaggccaaggcgctgcgggagaagcagctccaggagcgccggcgccggctggaggagcaacgtcttaaagccgagcaacgccgtgcagccctggaggaacggcagcggcagaagctcgagaaaaacaaggagcgctatgaagcagccatccaacggtcagtgaagaagacgtgggccgaaatccggcagcagcgctggtcctgggcaggggccctgcaccacagctctccaggacataagaccaatcgcagcctgcagctgagcgcatgggagagcagcatcgtggatcgtctgatgacgcccactctctccttccttgctcggagtcgcagcgcggtcacactgccccgcaacggccgggaccaccgtgccggtgtgcccgcgctcggcctccgccagccccctgacgccgtgcagcgtcacccgaagcgtgcaccgctgcgcccccgccggtgagcgcggggagcgccgcaagcccaacgccgggggcagccccgctccggtgcgccgccggccggaggcctcgccggtgcagaaaaaggagaagaaggacaaggagcgggaaaacgagaaggagaagagtgccctagcccgggagcgcagcctcaagaagcgccagtcgctgcccgcctccccacgtgcccgcctctctgccagcaccgcctctgagctcagccccaaatccaaggccaggccatcctctccctccacatcctggcacaggcctgcctccccctgccccagcccagggccaggccacactctgcctccaaagccaccgtccccccgaggcaccactgcatcccccaaggggcgggttcggaggaaggaggaggcaaaggagagccccagcgccgcagggcccgaggacaagagccagagcaagcgcagggccagtaacgagaaggagtcagcagccccagcctcaccggcaccttcgccggcgccctcgcccaccccagccccgccccagaaggagcagccccccgcggagacccctacagacgctgctgtcttgacctcacccccagcccctgctcccccggtgacccctagcaaaccaatggccggcaccacagaccgagaagaagccactcggctcttggctgagaagcggcgccaggcccgggagcagcgggagcgcgaggagcaggagcggaggctgcaggcagaaagggacaagcgaatgcgagaggagcagctggcacgggaggccgaggcccgggcggagcgggaggcggaggcccggaggcgggaggagcaggaggcacgagagaaggcgcaggccgagcaggaggagcaggagcggctgcagaagcagaaagaggaggccgaagctcggtcgcgggaagaggcggagcggcagcgtctggagcgggaaaagcacttccagcagcaggagcaagagcggcaagagcgcagaaagcgtctggaggagatcatgaagaggactcggaagtcagaagtttctgaaaccaagaagcaggacagcaaggaggccaacgccaacggttccagcccagagcctgtgaaagctgtggaggctcggtccccagggctgcagaaggaggctgtgcagaaagaggagcccatcccacaggagcctcagtggagtctcccaagcaaggagttgccagcgtccctggtgaatggcctgcagcctctcccagcacaccaggagaatggcttctccaccaacggaccctctggggacaagagtctgagccgaacaccagagacactcctgccctttgcagaggcagaagccttcctcaagaaagctgtggtgcagtccccgcaggtcacagaagtcctttaagagggtttgccttggatccgggcacagttgtgagggctcctctgcatcacctaccaggatgtctggaggagaaaaagacagaacaaagatggaagtggcctgggcccctgggggtgggtcctctctgttgtttttaatctgcaccttatagactgatgtctctttggccggagccagatctgcccctcagtgcattcgtgtgctcgcacgcgcagacatcccttctcccccatacacacatatacactcacagcctctctggcctcttcccttggggaggggccacctgtagtatttgccttgatttggtggggtacagtggatgtgaatactgtaaatagcttgtgctcagactcctctgcgtggagagggtgggtgcaggaggcagaccctccccccaaagccccctggggagatcttcctctctctatttaactgtaactgagggggatcccaggtctggggatgggggacaccttgggccacaggatactggttgcttcaggggtacccatgccccctgccctcgcctggaatcagtgttactgcatctgattaaatgtctccagaaataaagaataa

SEQ ID NO: 457066 - DNA, 2821 bp, Homo sapiens
accaaatcagctgctgtaccaaccccacctgactgaggcttaaaaatagcccagcagctgaggggacagagcagggtggcctagggcaggcaggcaccctagcagcctctccctggcacaggactgctaaaagctgggtcagaggagcacaaggaccctcactgtcctgaatccatgggacagcctcggctgggtcagccctctgacagcaggaggggcaagaccttacactgggacatggcagagggcaattgggttttcttccaatcctggatggctccttcctatatgcgccgttcagggccccttcacctggggagcgttgtaggcggggaccctcatccgatgcaggatgttgccctgggaagtgtctggttgcctgggtctgtagtggaagtccagatcatagggaggacaagtgtggccccggtgtgattgtggggagaggactcccgggtgagaagccttggccttggcatggggatggtgcctggtctgctcccttgcctcttcctgcctcctacggcccccacggtgaccggcttcgcctggccttctacccccagatcgcagcctgcagctgagcgcatgggagagcagcatcgtggatcgtctgatgacgcccactctctccttccttgctcggagtcgcagcgcggtcacactgccccgcaacggccgggaccagggtaggggctgcgaccctgggagaggccccacgtggggccgggcaggggccagcctggcgcgcgggccgcaacccgaccgcactcatccctctgcagccgtgccggtgtgcccgcgctcggcctccgccagccccctgacgccgtgcagcgtcacccgaagcgtgcaccgctgcgcccccgccggtgagcgcggggagcgccgcaagcccaacgccgggggcagccccgctccggtgcgccgccggccggaggcctcgccggtgcagaaaaaggagaagaaggacaaggagcgggaaaacgagaaggagaagagtgccctagcccgggagcgcagcctcaagaagcgccagtcgctgcccgcctccccacgtgcccgcctctctgccagcaccgcctctgagctcagccccaaatccaaggccaggccatcctctccctccacatcctggcacaggcctgcctccccctgccccagcccagggccaggccacactctgcctccaaagccaccgtccccccgaggcaccactgcatcccccaaggggcgggttcggaggaaggaggaggcaaaggagagccccagcgccgcagggcccgaggacaagagccagagcaagcgcagggccagtaacgagaaggagtcagcagccccagcctcaccggcaccttcgccggcgccctcgcccaccccagccccgccccagaaggagcagccccccgcggagacccctacagacgctgctgtcttgacctcacccccagcccctgctcccccggtgacccctagcaaaccaatggccggcaccacagaccgagaagaagccactcggctcttggctgagaagcggcgccaggcccgggagcagcgggagcgcgaggagcaggagcggaggctgcaggcagaaagggacaagcgaatgcgagaggagcagctggcacgggaggccgaggcccgggcggagcgggaggcggaggcccggaggcgggaggagcaggaggcacgagagaaggcgcaggccgagcaggaggagcaggagcggctgcagaagcagaaagaggaggccgaagctcggtcgcgggaagaggcggagcggcagcgtctggagcgggaaaagcacttccagcagcaggagcaagagcggcaagagcgcagaaagcgtctggaggagatcatgaagaggactcggaagtcagaagtttctgaaaccaagaagcaggacagcaaggaggccaacgccaacggttccagcccagagcctgtgaaagctgtggaggctcggtccccagggctgcagaaggaggctgtgcagaaagaggagcccatcccacaggagcctcagtggagtctcccaagcaaggagttgccagcgtccctggtgaatggcctgcagcctctcccagcacaccaggagaatggcttctccaccaacggaccctctggggacaagagtctgagccgaacaccagagacactcctgccctttgcagaggcagaagccttcctcaagaaagctgtggtgcagtccccgcaggtcacagaagtcctttaagagggtttgccttggatccgggcacagttgtgagggctcctctgcatcacctaccaggatgtctggaggagaaaaagacagaacaaagatggaagtggcctgggcccctgggggtgggtcctctctgttgtttttaatctgcaccttatagactgatgtctctttggccggagccagatctgcccctcagtgcattcgtgtgctcgcacgcgcagacatcccttctcccccatacacacatatacactcacagcctctctggcctcttcccttggggaggggccacctgtagtatttgccttgatttggtggggtacagtggatgtgaatactgtaaatagcttgtgctcagactcctctgcgtggagagggtgggtgcaggaggcagaccctccccccaaagccccctggggagatcttcctctctctatttaactgtaactgagggggatcccaggtctggggatgggggacaccttgggccacaggatactggttgcttcaggggtacccatgccccctgccctcgcctggaatcagtgttactgcatctgattaaatgtctccagaaataaagaataa

SEQ ID NO: 457067 - DNA, 3895 bp, Homo sapiens
agggcggcagcaaggctcccagacctgtccccagcccagccatcagcaggggagagaaagcgaaaccctttcaggggtctccttgtgactctccttcatgcctcccgacgtcccccgggccgctttggtttaggtgggtttgagcgagaatttggactcgaagctgccctctcagccccagtgccagagcccccaaactccagggtgggaaaggggagtcccagccctgctccccctctcccccagtccccgcggcgggtgagtcacccgagcgctccctacttagtcctcaggcgctgcggcgcgtaccaagacgcggacgcagggggaggcagctagcgcggcgaactcctggagccgtggagcccgctcggccgtggccgtgggagaggcgccgggaggctgcgggcgcggggctccggggcgggggcggcgcgaacggcgcggacggcgcgggcgcggggggctgggtcccggggcgctgctggggtggacccccccgcctcgaacttggtacgcgccagcgagaggccaggcccagcccgggcggtacaatagggttgggccgaggccgggactgggccggcgccgggcggggaacgggttcgcgaccgcagccgagagaccccgggcgaccggcacctccgagactcgcgggccacctgcctcgaccttccccggagcgcccccgcctccgagtcgctacttgccgggccgggccgggccgggcgtgatgcgccgcgggacccctgtcctggccactggccgccgccgccgccgccgctgagaccccgagacccccagtgacgccgcagccatggagagcggcccgcgtgcggagctgggggcgggcgcacccccagctgtggtcgccaggacccccccagagccaagaccttctccagaaggtgacccttcccccccaccaccaccaatgtcagccctggtccccgacactcccccggacacccctcctgccatgaagaatgccactagctctaagcagctcccactggaaccagagagcccctcagggcaggtcgggcctaggccagcccccccgcaggaagagtccccttcctctgaagcaaagagcagaggacccaccccaccagccatgggcccacgggatgccagacctcctcgaaggagcagccagccatctccaacagcagtgccagcctccgacagccctcccaccaagcaagaggtgaagaaggcaggagagagacacaagctggcaaaggagcggcgagaagagcgggccaagtacctggcggccaagaaggcagtgtggctggagaaggaggagaaggccaaggcgctgcgggagaagcagctccaggagcgccggcgccggctggaggagcaacgtcttaaagccgagcaacgccgtgcagccctggaggaacggcagcggcagaagctcgagaaaaacaaggagcgctatgaagcagccatccaacggtcagtgaagaagacgtgggccgaaatccggcagcagcgctggtcctgggcaggggccctgcaccacagctctccaggacataagaccagtgggagcaggtgctccgtgtcggcagttaacctgcccaaacacgtggactctataatcaacaagcggctctcaaagtcctctgccacgctctggaactcccccagtagaaatcgcagcctgcagctgagcgcatgggagagcagcatcgtggatcgtctgatgacgcccactctctccttccttgctcggagtcgcagcgcggtcacactgccccgcaacggccgggaccagggtaggggctgcgaccctgggagaggccccacgtggggccgggcaggggccagcctggcgcgcgggccgcaacccgaccgcactcatccctctgcagccgtgccggtgtgcccgcgctcggcctccgccagccccctgacgccgtgcagcgtcacccgaagcgtgcaccgctgcgcccccgccggtgagcgcggggagcgccgcaagcccaacgccgggggcagccccgctccggtgcgccgccggccggaggcctcgccggtgcagaaaaaggagaagaaggacaaggagcgggaaaacgagaaggagaagagtgccctagcccgggagcgcagcctcaagaagcgccagtcgctgcccgcctccccacgtgcccgcctctctgccagcaccgcctctgagctcagccccaaatccaaggccaggccatcctctccctccacatcctggcacaggcctgcctccccctgccccagcccagggccaggccacactctgcctccaaagccaccgtccccccgaggcaccactgcatcccccaaggggcgggttcggaggaaggaggaggcaaaggagagccccagcgccgcagggcccgaggacaagagccagagcaagcgcagggccagtaacgagaaggagtcagcagccccagcctcaccggcaccttcgccggcgccctcgcccaccccagccccgccccagaaggagcagccccccgcggagacccctacagcccctgctcccccggtgacccctagcaaaccaatggccggcaccacagaccgagaagaagccactcggctcttggctgagaagcggcgccaggcccgggagcagcgggagcgcgaggagcaggagcggaggctgcaggcagaaagggacaagcgaatgcgagaggagcagctggcacgggaggccgaggcccgggcggagcgggaggcggaggcccggaggcgggaggagcaggaggcacgagagaaggcgcaggccgagcaggaggagcaggagcggctgcagaagcagaaagaggaggccgaagctcggtcgcgggaagaggcggagcggcagcgtctggagcgggaaaagcacttccagcagcaggagcaagagcggcaagagcgcagaaagcgtctggaggagatcatgaagaggactcggaagtcagaagtttctgaaaccaagaagcaggacagcaaggaggccaacgccaacggttccagcccagagcctgtgaaagctgtggaggctcggtccccagggctgcagaaggaggctgtgcagaaagaggagcccatcccacaggagcctcagtggagtctcccaagcaaggagttgccagcgtccctggtgaatggcctgcagcctctcccagcacaccaggagaatggcttctccaccaacggaccctctggggacaagagtctgagccgaacaccagagacactcctgccctttgcagaggcagaagccttcctcaagaaagctgtggtgcagtccccgcaggtcacagaagtcctttaagagggtttgccttggatccgggcacagttgtgagggctcctctgcatcacctaccaggatgtctggaggagaaaaagacagaacaaagatggaagtggcctgggcccctgggggtgggtcctctctgttgtttttaatctgcaccttatagactgatgtctctttggccggagccagatctgcccctcagtgcattcgtgtgctcgcacgcgcagacatcccttctcccccatacacacatatacactcacagcctctctggcctcttcccttggggaggggccacctgtagtatttgccttgatttggtggggtacagtggatgtgaatactgtaaatagcttgtgctcagactcctctgcgtggagagggtgggtgcaggaggcagaccctccccccaaagccccctggggagatcttcctctctctatttaactgtaactgagggggatcccaggtctggggatgggggacaccttgggccacaggatactggttgcttcaggggtacccatgccccctgccctcgcctggaatcagtgttactgcatctgattaaatgtctccagaaataaagaataa

SEQ ID NO: 457068 - DNA, 4357 bp, Homo sapiens
agggcggcagcaaggctcccagacctgtccccagcccagccatcagcaggggagagaaagcgaaaccctttcaggggtctccttgtgactctccttcatgcctcccgacgtcccccgggccgctttggtttaggtgggtttgagcgagaatttggactcgaagctgccctctcagccccagtgccagagcccccaaactccagggtgggaaaggggagtcccagccctgctccccctctcccccagtccccgcggcgggtgagtcacccgagcgctccctacttagtcctcaggcgctgcggcgcgtaccaagacgcggacgcagggggaggcagctagcgcggcgaactcctggagccgtggagcccgctcggccgtggccgtgggagaggcgccgggaggctgcgggcgcggggctccggggcgggggcggcgcgaacggcgcggacggcgcgggcgcggggggctgggtcccggggcgctgctggggtggacccccccgcctcgaacttggtacgcgccagcgagaggccaggcccagcccgggcggtacaatagggttgggccgaggccgggactgggccggcgccgggcggggaacgggttcgcgaccgcagccgagagaccccgggcgaccggcacctccgagactcgcgggccacctgcctcgaccttccccggagcgcccccgcctccgagtcgctacttgccgggccgggccgggccgggcgtgatgcgccgcgggacccctgtcctggccactggccgccgccgccgccgccgctgagaccccgagacccccagtgacgccgcagccatggagagcggcccgcgtgcggagctgggggcgggcgcacccccagctgtggtcgccaggacccccccagagccaagaccttctccagaaggtgacccttcccccccaccaccaccaatgtcagccctggtccccgacactcccccggacacccctcctgccatgaagaatgccactagctctaagcagctcccactggaaccagagagcccctcagggcaggtcgggcctaggccagcccccccgcaggaagagtccccttcctctgaagcaaagagcagaggacccaccccaccagccatgggcccacgggatgccagacctcctcgaaggagcagccagccatctccaacagcagtgccagcctccgacagccctcccaccaagcaagaggtgaagaaggcaggagagagacacaagctggcaaaggagcggcgagaagagcgggccaagtacctggcggccaagaaggcagtgtggctggagaaggaggagaaggccaaggcgctgcgggagaagcagctccaggagcgccggcgccggctggaggagcaacgtcttaaagccgagcaacgccgtgcagccctggaggaacggcagcggcagaagctcgagaaaaacaaggagcgctatgaagcagccatccaacggtcagtgaagaagacgtgggccgaaatccggcagcagcgctggtcctgggcaggggccctgcaccacagctctccaggacataagaccagtgggagcaggtgctccgtgtcggcagttaacctgcccaaacacgtggactctataatcaacaagcggctctcaaagtcctctgccacgctctggaactcccccagtagaaatcgcagcctgcagctgagcgcatgggagagcagcatcgtggatcgtctgatgacgcccactctctccttccttgctcggagtcgcagcgcggtcacactgccccgcaacggccgggaccagggtaggggctgcgaccctgggagaggccccacgtggggccgggcaggggccagcctggcgcgcgggccgcaacccgaccgcactcatccctctgcagccgtgccggtgtgcccgcgctcggcctccgccagccccctgacgccgtgcagcgtcacccgaagcgtgcaccgctgcgcccccgccggtgagcgcggggagcgccgcaagcccaacgccgggggcagccccgctccggtgcgccgccggccggaggcctcgccggtgcagaaaaaggagaagaaggacaaggagcgggaaaacgagaaggagaagagtgccctagcccgggagcgcagcctcaagaagcgccagtcgctgcccgcctccccacgtgcccgcctctctgccagcaccgcctctgagctcagccccaaatccaaggccaggccatcctctccctccacatcctggcacaggcctgcctccccctgccccagcccagggccaggccacactctgcctccaaagccaccgtccccccgaggcaccactgcatcccccaaggggcgggttcggaggaaggaggaggcaaaggagagccccagcgccgcagggcccgaggacaagagccagagcaagcgcagggccagtaacgagaaggagtcagcagccccagcctcaccggcaccttcgccggcgccctcgcccaccccagccccgccccagaaggagcagccccccgcggagacccctacagacgctgctgtcttgacctcacccccagcccctgctcccccggtgacccctagcaaaccaatggccggcaccacagaccgagaagaagccactcggctcttggctgagaagcggcgccaggcccgggagcagcgggagcgcgaggagcaggagcggaggctgcaggcagaaagggacaagcgaatgcgagaggagcagctggcacgggaggccgaggcccgggcggagcgggaggcggaggcccggaggcgggaggagcaggaggcacgagagaaggcgcaggccgagcaggaggagcaggagcggctgcagaagcagaaagaggaggccgaagctcggtcgcgggaagaggcggagcggcagcgtctggagcgggaaaagcacttccagcagcaggagcaagagcggcaagagcgcagaaaggtgtgcggacctgggcggggatttgtgggcggggcctgggcagggcgggccaggtgggcggggcctgggcttagagcggacaggacgggaaagcgctggggcaaattccagttcctgtcctggagagggctgctatgagctgggaggccctaagactccgaggccgggtctggctggtgggaggtttaggattaggggcggggctcgagcctaactgatctgcggcctccaaacagcgtctggaggagatcatgaagaggactcggaagtcagaagtttctgaaaccaaggtcagaattcccccgaagggcagtgctgggcgtggggggcagggtgtgaaaaggaggctgcggaaaggcatccatggccacggagagcgaggctgtcagggaggccgctgcggcccgggcaaggggagggccgaactcagtccgaagtggctggggccggctgtcccttgagcctgactgctcttcctcttcaaagcagaagcaggacagcaaggaggccaacgccaacggttccagcccagagcctgtgaaagctgtggaggctcggtccccagggctgcagaaggaggctgtgcagaaagaggagcccatcccacaggagcctcagtggagtctcccaagcaaggagttgccagcgtccctggtgaatggcctgcagcctctcccagcacaccaggagaatggcttctccaccaacggaccctctggggacaagagtctgagccgaacaccagagacactcctgccctttgcagaggcagaagccttcctcaagaaagctgtggtgcagtccccgcaggtcacagaagtcctttaagagggtttgccttggatccgggcacagttgtgagggctcctctgcatcacctaccaggatgtctggaggagaaaaagacagaacaaagatggaagtggcctgggcccctgggggtgggtcctctctgttgtttttaatctgcaccttatagactgatgtctctttggccggagccagatctgcccctcagtgcattcgtgtgctcgcacgcgcagacatcccttctcccccatacacacatatacactcacagcctctctggcctcttcccttggggaggggccacctgtagtatttgccttgatttggtggggtacagtggatgtgaatactgtaaatagcttgtgctcagactcctctgcgtggagagggtgggtgcaggaggcagaccctccccccaaagccccctggggagatcttcctctctctatttaactgtaactgagggggatcccaggtctggggatgggggacaccttgggccacaggatactggttgcttcaggggtacccatgccccctgccctcgcctggaatcagtgttactgcatctgattaaatgtctccagaaataaagaataa

SEQ ID NO: 457069 - DNA, 1147 bp, Homo sapiens
aggtcacctagaggatccccactttgcgcaggccgagcaggaggagcaggagcggctgcagaagcagaaagaggaggccgaagctcggtcgcgggaagaggcggagcggcagcgtctggagcgggaaaagcacttccagcagcaggagcaagagcggcaagagcgcagaaagcgtctggaggagatcatgaagaggactcggaagtcagaagtttctgaaaccaagaagcaggacagcaaggaggccaacgccaacggttccagcccagagcctgtgaaagctgtggaggctcggtccccagggctgcagaaggaggctgtgcagaaagaggagcccatcccacaggagcctcagtggagtctcccaagcaaggagttgccagcgtccctggtgaatggcctgcagcctctcccagcacaccaggagaatggcttctccaccaacggaccctctggggacaagagtctgagccgaacaccagagacactcctgccctttgcagaggcagaagccttcctcaagaaagctgtggtgcagtccccgcaggtcacagaagtcctttaagagggtttgccttggatccgggcacagttgtgagggctcctctgcatcacctaccaggatgtctggaggagaaaaagacagaacaaagatggaagtggcctgggcccctgggggtgggtcctctctgttgtttttaatctgcaccttatagactgatgtctctttggccggagccagatctgcccctcagtgcattcgtgtgctcgcacgcgcagacatcccttctcccccatacacacatatacactcacagcctctctggcctcttcccttggggaggggccacctgtagtatttgccttgatttggtggggtacagtggatgtgaatactgtaaatagcttgtgctcagactcctctgcgtggagagggtgggtgcaggaggcagaccctccccccaaagccccctggggagatcttcctctctctatttaactgtaactgagggggatcccaggtctggggatgggggacaccttgggccacaggatactggttgcttcaggggtacccatgccccctgccctcgcctggaatcagtgttactgcatctgattaaatgtctccagaaataaagaataa

SEQ ID NO: 457070 - DNA, 4003 bp, Homo sapiens
agggcggcagcaaggctcccagacctgtccccagcccagccatcagcaggggagagaaagcgaaaccctttcaggggtctccttgtgactctccttcatgcctcccgacgtcccccgggccgctttggtttaggtgggtttgagcgagaatttggactcgaagctgccctctcagccccagtgccagagcccccaaactccagggtgggaaaggggagtcccagccctgctccccctctcccccagtccccgcggcgggtgagtcacccgagcgctccctacttagtcctcaggcgctgcggcgcgtaccaagacgcggacgcagggggaggcagctagcgcggcgaactcctggagccgtggagcccgctcggccgtggccgtgggagaggcgccgggaggctgcgggcgcggggctccggggcgggggcggcgcgaacggcgcggacggcgcgggcgcggggggctgggtcccggggcgctgctggggtggacccccccgcctcgaacttggtacgcgccagcgagaggccaggcccagcccgggcggtacaatagggttgggccgaggccgggactgggccggcgccgggcggggaacgggttcgcgaccgcagccgagagaccccgggcgaccggcacctccgagactcgcgggccacctgcctcgaccttccccggagcgcccccgcctccgagtcgctacttgccgggccgggccgggccgggcgtgatgcgccgcgggacccctgtcctggccactggccgccgccgccgccgccgctgagaccccgagacccccagtgacgccgcagccatggagagcggcccgcgtgcggagctgggggcgggcgcacccccagctgtggtcgccaggacccccccagagccaagaccttctccagaaggtgacccttcccccccaccaccaccaatgtcagccctggtccccgacactcccccggacacccctcctgccatgaagaatgccactagctctaagcagctcccactggaaccagagagcccctcagggcaggtcgggcctaggccagcccccccgcaggaagagtccccttcctctgaagcaaagagcagaggacccaccccaccagccatgggcccacgggatgccagacctcctcgaaggagcagccagccatctccaacagcagtgccagcctccgacagccctcccaccaagcaagaggtgaagaaggcaggagagagacacaagctggcaaaggagcggcgagaagagcgggccaagtacctggcggccaagaaggcagtgtggctggagaaggaggagaaggccaaggcgctgcgggagaagcagctccaggagcgccggcgccggctggaggagcaacgtcttaaagccgagcaacgccgtgcagccctggaggaacggcagcggcagaagctcgagaaaaacaaggagcgctatgaagcagccatccaacggtcagtgaagaagacgtgggccgaaatccggcagcagcgctggtcctgggcaggggccctgcaccacagctctccaggacataagaccagtgggagcaggtgctccgtgtcggcagttaacctgcccaaacacgtggactctataatcaacaagcggctctcaaagtcctctgccacgctctggaactcccccagtagaaatcgcagcctgcagctgagcgcatgggagagcagcatcgtggatcgtctgatgacgcccactctctccttccttgctcggagtcgcagcgcggtcacactgccccgcaacggccgggaccagggtaggggctgcgaccctgggagaggccccacgtggggccgggcaggggccagcctggcgcgcgggccgcaacccgaccgcactcatccctctgcagccgtgccggtgtgcccgcgctcggcctccgccagccccctgacgccgtgcagcgtcacccgaagcgtgcaccgctgcgcccccgccggtgagcgcggggagcgccgcaagcccaacgccgggggcagccccgctccggtgcgccgccggccggaggcctcgccggtgcagaaaaaggagaagaaggacaaggagcgggaaaacgagaaggagaagagtgccctagcccgggagcgcagcctcaagaagcgccagtcgctgcccgcctccccacgtgcccgcctctctgccagcaccgcctctgagctcagccccaaatccaaggccaggccatcctctccctccacatcctggcacaggcctgcctccccctgccccagcccagggccaggccacactctgcctccaaagccaccgtccccccgaggcaccactgcatcccccaaggggcgggttcggaggaaggaggaggcaaaggagagccccagcgccgcagggcccgaggacaagagccagagcaagcgcagggccagtaacgagaaggagtcagcagccccagcctcaccggcaccttcgccggcgccctcgcccaccccagccccgccccagaaggagcagccccccgcggagacccctacagacgctgctgtcttgacctcacccccagcccctgctcccccggtgacccctagcaaaccaatggccggcaccacagaccgagaagaagccactcggctcttggctgagaagcggcgccaggcccgggagcagcgggagcgcgaggagcaggagcggaggctgcaggcagaaagggacaagcgaatgcgagaggagcagctggcacgggaggccgaggcccgggcggagcgggaggcggaggcccggaggcgggaggagcaggaggcacgagagaaggcgcaggccgagcaggaggagcaggagcggctgcagaagcagaaagaggaggccgaagctcggtcgcgggaagaggcggagcggcagcgtctggagcgggaaaagcacttccagcagcaggagcaagagcggcaagagcgcagaaagcgtctggaggagatcatgaagaggactcggaagtcagaagtttctgaaaccaagaagcaggacagcaaggaggccaacgccaacggttccagcccagagcctgtgaaagctgtggaggctcggtccccagggctgcagaaggaggctgtgcagaaagaggagcccatcccacaggagcctcagtggagtctcccaagcaaggagttgccagcgtccctggtgaatggcctgcagcctctcccagcacaccaggagaatggcttctccaccaacggaccctctggggacaagagtctgagccgaacaccagagacactcctgccctttgcagaggcagaagccttcctcaagaaagctgtggtgcagtccccgcaggtcacagaagtcctttaagagggtttgccttggatccgggcacagttgtgagggctcctctgcatcacctaccaggatgtctggaggagaaaaagacagaacaaagatggaagtggcctgggcccctgggggtgggtcctctctgttgtttttaatctgcaccttatagactgatgtctctttggccggagccagatctgcccctcagtgcattcgtgtgctcgcacgcgcagacatcccttctcccccatacacacatatacactcacagcctctctggcctcttcccttggggaggggccacctgtagtatttgccttgatttggtggggtacagtggatgtgaatactgtaaatagcttgtgctcagactcctctgcgtggagagggtgggtgcaggaggcagaccctccccccaaagccccctggggagatcttcctctctctatttaactgtaactgagggggatcccaggtctggggatgggggacaccttgggccacaggatactggttgcttcaggggtacccatgccccctgccctcgcctggaatcagtgttactgcatctgattaaatgtctccagaaataaagaataaataaaaaaaaaaacacaaaaaaaacaacacaaaacacacaaacaaaaaacaataaagaaaaaaaaaaacaaaaaaaaaaaa

SEQ ID NO: 457071 - DNA, 3942 bp, Homo sapiens
agggcggcagcaaggctcccagacctgtccccagcccagccatcagcaggggagagaaagcgaaaccctttcaggggtctccttgtgactctccttcatgcctcccgacgtcccccgggccgctttggtttaggtgggtttgagcgagaatttggactcgaagctgccctctcagccccagtgccagagcccccaaactccagggtgggaaaggggagtcccagccctgctccccctctcccccagtccccgcggcgggtgagtcacccgagcgctccctacttagtcctcaggcgctgcggcgcgtaccaagacgcggacgcagggggaggcagctagcgcggcgaactcctggagccgtggagcccgctcggccgtggccgtgggagaggcgccgggaggctgcgggcgcggggctccggggcgggggcggcgcgaacggcgcggacggcgcgggcgcggggggctgggtcccggggcgctgctggggtggacccccccgcctcgaacttggtacgcgccagcgagaggccaggcccagcccgggcggtacaatagggttgggccgaggccgggactgggccggcgccgggcggggaacgggttcgcgaccgcagccgagagaccccgggcgaccggcacctccgagactcgcgggccacctgcctcgaccttccccggagcgcccccgcctccgagtcgctacttgccgggccgggccgggccgggcgtgatgcgccgcgggacccctgtcctggccactggccgccgccgccgccgccgctgagaccccgagacccccagtgacgccgcagccatggagagcggcccgcgtgcggagctgggggcgggcgcacccccagctgtggtcgccaggacccccccagagccaagaccttctccagaaggtgacccttcccccccaccaccaccaatgtcagccctggtccccgacactcccccggacacccctcctgccatgaagaatgccactagctctaagcagctcccactggaaccagagagcccctcagggcaggtcgggcctaggccagcccccccgcaggaagagtccccttcctctgaagcaaagagcagaggacccaccccaccagccatgggcccacgggatgccagacctcctcgaaggagcagccagccatctccaacagcagtgccagcctccgacagccctcccaccaagcaagaggtgaagaaggcaggagagagacacaagctggcaaaggagcggcgagaagagcgggccaagtacctggcggccaagaaggcagtgtggctggagaaggaggagaaggccaaggcgctgcgggagaagcagctccaggagcgccggcgccggctggaggagcaacgtcttaaagccgagcaacgccgtgcagccctggaggaacggcagcggcagaagctcgagaaaaacaaggagcgctatgaagcagccatccaacggtcagtgaagaagacgtgggccgaaatccggcagcagcgctggtcctgggcaggggccctgcaccacagctctccaggacataagaccagtgggagcaggtgctccgtgtcggcagttaacctgcccaaacacgtggactctataatcaacaagcggctctcaaagtcctctgccacgctctggaactcccccagtagaaatcgcagcctgcagctgagcgcatgggagagcagcatcgtggatcgtctgatgacgcccactctctccttccttgctcggagtcgcagcgcggtcacactgccccgcaacggccgggaccagggtaggggctgcgaccctgggagaggccccacgtggggccgggcaggggccagcctggcgcgcgggccgcaacccgaccgcactcatccctctgcagccgtgccggtgtgcccgcgctcggcctccgccagccccctgacgccgtgcagcgtcacccgaagcgtgcaccgctgcgcccccgccggtgagcgcggggagcgccgcaagcccaacgccgggggcagccccgctccggtgcgccgccggccggaggcctcgccggtgcagaaaaaggagaagaaggacaaggagcgggaaaacgagaaggagaagagtgccctagcccgggagcgcagcctcaagaagcgccagtcgctgcccgcctccccacgtgcccgcctctctgccagcaccgcctctgagctcagccccaaatccaaggccaggccatcctctccctccacatcctggcacaggcctgcctccccctgccccagcccagggccaggccacactctgcctccaaagccaccgtccccccgaggcaccactgcatcccccaaggggcgggttcggaggaaggaggaggcaaaggagagccccagcgccgcagggcccgaggacaagagccagagcaagcgcagggccagtaacgagaaggagtcagcagccccagcctcaccggcaccttcgccggcgccctcgcccaccccagccccgccccagaaggagcagccccccgcggagacccctacagacgctgctgtcttgacctcacccccagcccctgctcccccggtgacccctagcaaaccaatggccggcaccacagaccgagaagaagccactcggctcttggctgagaagcggcgccaggcccgggagcagcgggagcgcgaggagcaggagcggaggctgcaggcagaaagggacaagcgaatgcgagaggagcagctggcacgggaggccgaggcccgggcggagcgggaggcggaggcccggaggcgggaggagcaggaggcacgagagaaggcgcaggccgagcaggaggagcaggagcggctgcagaagcagaaagaggaggccgaagctcggtcgcgggaagaggcggagcggcagcgtctggagcgggaaaagcacttccagcagcaggagcaagagcggcaagagcgcagaaagcgtctggaggagatcatgaagaggactcggaagtcagaagtttctgaaaccaagaagcaggacagcaaggaggccaacgccaacggttccagcccagagcctgtgaaagctgtggaggctcggtccccagggctgcagaaggaggctgtgcagaaagaggagcccatcccacaggagcctcagtggagtctcccaagcaaggagttgccagcgtccctggtgaatggcctgcagcctctcccagcacaccaggagaatggcttctccaccaacggaccctctggggacaagagtctgagccgaacaccagagacactcctgccctttgcagaggcagaagccttcctcaagaaagctgtggtgcagtccccgcaggtcacagaagtcctttaagagggtttgccttggatccgggcacagttgtgagggctcctctgcatcacctaccaggatgtctggaggagaaaaagacagaacaaagatggaagtggcctgggcccctgggggtgggtcctctctgttgtttttaatctgcaccttatagactgatgtctctttggccggagccagatctgcccctcagtgcattcgtgtgctcgcacgcgcagacatcccttctcccccatacacacatatacactcacagcctctctggcctcttcccttggggaggggccacctgtagtatttgccttgatttggtggggtacagtggatgtgaatactgtaaatagcttgtgctcagactcctctgcgtggagagggtgggtgcaggaggcagaccctccccccaaagccccctggggagatcttcctctctctatttaactgtaactgagggggatcccaggtctggggatgggggacaccttgggccacaggatactggttgcttcaggggtacccatgccccctgccctcgcctggaatcagtgttactgcatctgattaaatgtctccagaaataaagaataataattctgccaaaaaagcct

SEQ ID NO: 457072 - DNA, 3827 bp, Homo sapiens
  misc_feature (3772)..(3772): n is a, c, g, or t
  misc_feature (3791)..(3791): n is a, c, g, or t
  misc_feature (3797)..(3797): n is a, c, g, or t
agggcggcagcaaggctcccagacctgtccccagcccagccatcagcaggggagagaaagcgaaaccctttcaggggtctccttgtgactctccttcatgcctcccgacgtcccccgggccgctttggtttaggtgggtttgagcgagaatttggactcgaagctgccctctcagccccagtgccagagcccccaaactccagggtgggaaaggggagtcccagccctgctccccctctcccccagtccccgcggcgggtgagtcacccgagcgctccctacttagtcctcaggcgctgcggcgcgtaccaagacgcggacgcagggggaggcagctagcgcggcgaactcctggagccgtggagcccgctcggccgtggccgtgggagaggcgccgggaggctgcgggcgcggggctccggggcgggggcggcgcgaacggcgcggacggcgcgggcgcggggggctgggtcccggggcgctgctggggtggacccccccgcctcgaacttggtacgcgccagcgagaggccaggcccagcccgggcggtacaatagggttgggccgaggccgggactgggccggcgccgggcggggaacgggttcgcgaccgcagccgagagaccccgggcgaccggcacctccgagactcgcgggccacctgcctcgaccttccccggagcgcccccgcctccgagtcgctacttgccgggccgggccgggccgggcgtgatgcgccgcgggacccctgtcctggccactggccgccgccgccgccgccgctgagaccccgagacccccagtgacgccgcagccatggagagcggcccgcgtgcggagctgggggcgggcgcacccccagctgtggtcgccaggacccccccagagccaagaccttctccagaaggtgacccttcccccccaccaccaccaatgtcagccctggtccccgacactcccccggacacccctcctgccatgaagaatgccactagctctaagcagctcccactggaaccagagagcccctcagggcaggtcgggcctaggccagcccccccgcaggaagagtccccttcctctgaagcaaagagcagaggacccaccccaccagccatgggcccacgggatgccagacctcctcgaaggagcagccagccatctccaacagcagtgccagcctccgacagccctcccaccaagcaagaggtgaagaaggcaggagagagacacaagctggcaaaggagcggcgagaagagcgggccaagtacctggcggccaagaaggcagtgtggctggagaaggaggagaaggccaaggcgctgcgggagaagcagctccaggagcgccggcgccggctggaggagcaacgtcttaaagccgagcaacgccgtgcagccctggaggaacggcagcggcagaagctcgagaaaaacaaggagcgctatgaagcagccatccaacggtcagtgaagaagacgtgggccgaaatccggcagcagcgctggtcctgggcaggggccctgcaccacagctctccaggacataagaccagtgggagcaggtgctccgtgtcggcagttaacctgcccaaacacgtggactctataatcaacaagcggctctcaaagtcctctgccacgctctggaactcccccagtagaaatcgcagcctgcagctgagcgcatgggagagcagcatcgtggatcgtctgatgacgcccactctctccttccttgctcggagtcgcagcgcggtcacactgccccgcaacggccgggaccagggtaggggctgcgaccctgggagaggccccacgtggggccgggcaggggccagcctggcgcgcgggccgcaacccgaccgcactcatccctctgcagccgtgccggtgtgcccgcgctcggcctccgccagccccctgacgccgtgcagcgtcacccgaagcgtgcaccgctgcgcccccgccggtgagcgcggggagcgccgcaagcccaacgccgggggcagccccgctccggtgcgccgccggccggaggcctcgccggtgcagaaaaaggagaagaaggacaaggagcgggaaaacgagaaggagaagagtgccctagcccgggagcgcagcctcaagaagcgccagtcgctgcccgcctccccacgtgcccgcctctctgccagcaccgcctctgagctcagccccaaatccaaggccaggccatcctctccctccacatcctggcacaggcctgcctccccctgccccagcccagggccaggccacactctgcctccaaagccaccgtccccccgaggcaccactgcatcccccaaggggcgggttcggaggaaggaggaggcaaaggagagccccagcgccgcagggcccgaggacaagagccagagcaagcgcagggccagtaacgagaaggagtcagcagccccagcctcaccggcaccttcgccggcgccctcgcccaccccagccccgccccagaaggagcagccccccgcggagacccctacagacgctgctgtcttgacctcacccccagcccctgctcccccggtgacccctagcaaaccaatggccggcaccacagaccgagaagaagccactcggctcttggctgagaagcggcgccaggcccgggagcagcgggagcgcgaggagcaggagcggaggctgcaggcagaaagggacaagcgaatgcgagaggagcagctggcacgggaggccgaggcccgggcggagcgggaggcggaggcccggaggcgggaggagcaggaggcacgagagaaggcgcaggccgagcaggaggagcaggagcggctgcagaagcagaaagaggaggccgaagctcggtcgcgggaagaggcggagcggcagcgtctggagcgggaaaagcacttccagcagcaggagcaagagcggcaagagcgcagaaagcgtctggaggagatcatgaagaggactcggaagtcagaagtttctgaaaccaagaagcaggacagcaaggaggccaacgccaacggttccagcccagagcctgtgaaagctgtggaggctcggtccccagggctgcagaaggaggctgtgcagaaagaggagcccatcccacaggagcctcagtggagtctcccaagcaaggagttgccagcgtccctggtgaatggcctgcagcctctcccagcacaccaggagaatggcttctccaccaacggaccctctggggacaagagtctgagccgaacaccagagacactcctgccctttgcagaggcagaagccttcctcaagaaagctgtggtgcagtccccgcaggtcacagaagtcctttaagagggtttgccttggatccgggcacagttgtgagggctcctctgcatcacctaccaggatgtctggaggagaaaaagacagaacaaagatggaagtggcctgggcccctgggggtgggtcctctctgttgtttttaatctgcaccttatagactgatgtctctttggccggagccagatctgcccctcagtgcattcgtgtgctcgcacgcgcagacatcccttctcccccatacacacatatacactcacagcctctctggcctcttcccttggggaggggccacctgtagtatttgccttgatttggtggggtacagtggatgtgaatactgtaaatagcttgtgctcagactcctctgcgtggagagggtgggtgcaggaggcagaccctcccccatccccagacctggatccccctcagttacagttnaatagagagaggaagatgntcccanggggctttggggggagggtctggtcgacgc

SEQ ID NO: 457073 - DNA, 501 bp, Homo sapiens
ctactactactaaattcgcggccgcgtcgacggaaggtcctctctgttgtttttaatctgcaccttatagactgatgtctctttggccggagccagatctgcccctcagtgcattcgtgtgctcgcacgcgcagacatcccttctcccccatacacacatatacactcacagcctctctggcctcttcccttggggaggggccacctgtagtatttgccttgatttggtggggtacagtggatgtgaatactgtaaatagcttgtgctcagactcctctgcgtggagagggtgggtgcaggaggcagaccctccccccaaagccccctggggagatcttcctctctctatttaactgtaactgagggggatcccaggtctggggatgggggacaccttgggccacaggatactggttgcttcaggggtacccatgccccctgccctcgcctggaatcagtgttactgcatctgattaaatgtctccagaaataaagaataa

SEQ ID NO: 457074 - DNA, 502 bp, Homo sapiens
  misc_feature (21)..(21): n is a, c, g, or t
  misc_feature (36)..(36): n is a, c, g, or t
cgggcctaggcagcctccccncagaaagagtccccnggtcctctctgttgtttttaatctgcaccttatagactgatgtctctttggccggagccagatctgcccctcagtgcattcgtgtgctcgcacgcgcagacatcccttctcccccatacacacatatacactcacagcctctctggcctcttcccttggggaggggccacctgtagtatttgccttgatttggtggggtacagtggatgtgaatactgtaaatagcttgtgctcagactcctctgcgtggagagggtgggtgcaggaggcagaccctccccccaaagccccctggggagatcttcctctctctatttaactgtaactgagggggatcccaggtctggggatgggggacaccttgggccacaggatactggttgcttcaggggtacccatgccccctgccctcgcctggaatcagtgttactgcatctgattaaatgtctccagaaataaagaataa

SEQ ID NO: 457075 - DNA, 3604 bp, Homo sapiens
agggcggcagcaaggctcccagacctgtccccagcccagccatcagcaggggagagaaagcgaaaccctttcaggggtctccttgtgactctccttcatgcctcccgacgtcccccgggccgctttggtttaggtgggtttgagcgagaatttggactcgaagctgccctctcagccccagtgccagagcccccaaactccagggtgggaaaggggagtcccagccctgctccccctctcccccagtccccgcggcgggtgagtcacccgagcgctccctacttagtcctcaggcgctgcggcgcgtaccaagacgcggacgcagggggaggcagctagcgcggcgaactcctggagccgtggagcccgctcggccgtggccgtgggagaggcgccgggaggctgcgggcgcggggctccggggcgggggcggcgcgaacggcgcggacggcgcgggcgcggggggctgggtcccggggcgctgctggggtggacccccccgcctcgaacttggtacgcgccagcgagaggccaggcccagcccgggcggtacaatagggttgggccgaggccgggactgggccggcgccgggcggggaacgggttcgcgaccgcagccgagagaccccgggcgaccggcacctccgagactcgcgggccacctgcctcgaccttccccggagcgcccccgcctccgagtcgctacttgccgggccgggccgggccgggcgtgatgcgccgcgggacccctgtcctggccactggccgccgccgccgccgccgctgagaccccgagacccccagtgacgccgcagccatggagagcggcccgcgtgcggagctgggggcgggcgcacccccagctgtggtcgccaggacccccccagagccaagaccttctccagaaggtgacccttcccccccaccaccaccaatgtcagccctggtccccgacactcccccggacacccctcctgccatgaagaatgccactagctctaagcagctcccactggaaccagagagcccctcagggcaggtcgggcctaggccagcccccccgcaggaagagtccccttcctctgaagcaaagagcagaggacccaccccaccagccatgggcccacgggatgccagacctcctcgaaggagcagccagccatctccaacagcagtgccagcctccgacagccctcccaccaagcaagaggtgaagaaggcaggagagagacacaagctggcaaaggagcggcgagaagagcgggccaagtacctggcggccaagaaggcagtgtggctggagaaggaggagaaggccaaggcgctgcgggagaagcagctccaggagcgccggcgccggctggaggagcaacgtcttaaagccgagcaacgccgtgcagccctggaggaacggcagcggcagaagctcgagaaaaacaaggagcgctatgaagcagccatccaacggtcagtgaagaagacgtgggccgaaatccggcagcagcgctggtcctgggcaggggccctgcaccacagctctccaggacataagaccagtgggagcaggtgctccgtgtcggcagttaacctgcccaaacacgtggactctataatcaacaagcggctctcaaagtcctctgccacgctctggaactcccccagtagaaatcgcagcctgcagctgagcgcatgggagagcagcatcgtggatcgtctgatgacgcccactctctccttccttgctcggagtcgcagcgcggtcacactgccccgcaacggccgggaccagggtaggggctgcgaccctgggagaggccccacgtggggccgggcaggggccagcctggcgcgcgggccgcaacccgaccgcactcatccctctgcagccgtgccggtgtgcccgcgctcggcctccgccagccccctgacgccgtgcagcgtcacccgaagcgtgcaccgctgcgcccccgccggtgagcgcggggagcgccgcaagcccaacgccgggggcagccccgctccggtgcgccgccggccggaggcctcgccggtgcagaaaaaggagaagaaggacaaggagcgggaaaacgagaaggagaagagtgccctagcccgggagcgcagcctcaagaagcgccagtcgctgcccgcctccccacgtgcccgcctctctgccagcaccgcctctgagctcagccccaaatccaaggccaggccatcctctccctccacatcctggcacaggcctgcctccccctgccccagcccagggccaggccacactctgcctccaaagccaccgtccccccgaggcaccactgcatcccccaaggggcgggttcggaggaaggaggaggcaaaggagagccccagcgccgcagggcccgaggacaagagccagagcaagcgcagggccagtaacgagaaggagtcagcagccccagcctcaccggcaccttcgccggcgccctcgcccaccccagccccgccccagaaggagcagccccccgcggagacccctacagacgctgctgtcttgacctcacccccagcccctgctcccccggtgacccctagcaaaccaatggccggcaccacagaccgagaagaagccactcggctcttggctgagaagcggcgccaggcccgggagcagcgggagcgcgaggagcaggagcggaggctgcaggcagaaagggacaagcgaatgcgagaggagcagctggcacgggaggccgaggcccgggcggagcgggaggcggaggcccggaggcgggaggagcaggaggcacgagagaaggcgcaggccgagcaggaggagcaggagcggctgcagaagcagaaagaggaggccgaagctcggtcgcgggaagaggcggagcggcagcgtctggagcgggaaaagcacttccagcagcaggagcaagagcggcaagagcgcagaaagcgtctggaggagatcatgaagaggactcggaagtcagaagtttctgaaaccaagaagcaggacagcaaggaggccaacgccaacggttccagcccagagcctgtgaaagctgtggaggctcggtccccagggctgcagaaggaggctgtgcagaaagaggagcccatcccacaggagcctcagtggagtctcccaagcaaggagttgccagcgtccctggtgaatggcctgcagcctctcccagcacaccaggagaatggcttctccaccaacggaccctctggggacaagagtctgagccgaacaccagagacactcctgccctttgcagaggcagaagccttcctcaagaaagctgtggtgcagtccccgcaggtcacagaagtcctttaagagggtttgccttggatccgggcacagttgtgagggctcctctgcatcacctaccaggatgtctggaggagaaaaagacagaacaaagatggaagtggcctgggcccctgggggtgggtcctctctgttgtttttaatctgccctctggccgccggtactcaccaacaccaccaggcctggccggtccttccctgtcctccagtccttctcgcctcagttcccaacacaactggggacttcactgtacagctgtgaaatgtgag

SEQ ID NO: 457076 - DNA, 1409 bp, Homo sapiens
agggcggcagcaaggctcccagacctgtccccagcccagccatcagcaggggagagaaagcgaaaccctttcaggggtctccttgtgactctccttcatgcctcccgacgtcccccgggccgctttggtttaggtgggtttgagcgagaatttggactcgaagctgccctctcagccccagtgccagagcccccaaactccagggtgggaaaggggagtcccagccctgctccccctctcccccagtccccgcggcgggtgagtcacccgagcgctccctacttagtcctcaggcgctgcggcgcgtaccaagacgcggacgcagggggaggcagctagcgcggcgaactcctggagccgtggagcccgctcggccgtggccgtgggagaggcgccgggaggctgcgggcgcggggctccggggcgggggcggcgcgaacggcgcggacggcgcgggcgcggggggctgggtcccggggcgctgctggggtggacccccccgcctcgaacttggtacgcgccagcgagaggccaggcccagcccgggcggtacaatagggttgggccgaggccgggactgggccggcgccgggcggggaacgggttcgcgaccgcagccgagagaccccgggcgaccggcacctccgagactcgcgggccacctgcctcgaccttccccggagcgcccccgcctccgagtcgctacttgccgggccgggccgggccgggcgtgatgcgccgcgggacccctgtcctggccactggccgccgccgccgccgccgctgagaccccgagacccccagtgacgccgcagccatggagagcggcccgcgtgcggagctgggggcgggcgcacccccagctgtggtcgccaggacccccccagagccaagaccttctccagaaggtgacccttcccccccaccaccaccaatgtcagccctggtccccgacactcccccggacacccctcctgccatgaagaatgccactagctctaagcagctcccactggaaccagagagcccctcagggcaggtcgggcctaggccagcccccccgcaggaagagtccccttcctctgaagcaaagagcagaggacccaccccaccagccatgggcccacgggatgccagacctcctcgaaggagcagccagccatctccaacagcagtgccagcctccgacagccctcccaccaagcaagaggtgaagaaggcaggagagagacacaagctggcaaaggagcggcgagaagagcgggccaagtacctgggtgagtgagcaggaagcctcatcatcttcttcatcgtcatcatcggccttcagagtgtcttgtgtctattcttataaggacactaattctaccagatcttggacccaccttatttaacttaattatttcttt

SEQ ID NO: 457077 - DNA, 163 bp, Homo sapiens
gtgcgggatgggtctccgtgaatccatgtacacgtgtgctcaccgtctgcatactggtgcagtgtgtacacacatccatgttcacggctctgccttatctgtgtctatgtggtcctatttgtgttcacatctacagttgtgtccctgtgttagaatatctggg

SEQ ID NO: 457078 - DNA, 398 bp, Homo sapiens
ccctctcctgctccaccctgaagacccccagctatctgggcttgagtgctgtttgccctgactgtttcccttcctgtttttccccagaagtcctttaagagggtttgccttggatccgggcacagttgtgagggctcctctgcatcacctaccaggatgtctggaggagaaaaagacagaacaaagatggaagtggcctgggcccctgggggtgggtcctctctgttgtttttaatctgcaccttatagactgatgtctctttggccggagccagatctgcccctcagtgcattcgtgtgctcgcacgcgcagacatcccttctcccccatacacacatatacactcacagcctctctggcctcttcccttggggaggggccacctgtagtatttgcc

SEQ ID NO: 457079 - DNA, 287 bp, Homo sapiens
atcatggctattttctcaccattatatcatgagtatctggaacagggcccggcacatagaaataactcaaacataagtgaatgaagaagtcggttgaacaagggagagggccacatatggggctgatggcacagatgagcaatctgacctctctcctctcttgtgttggtctttcagctgtggtcgccaggacccccccagagccaagaccttctccagaaggtgacccttcccccccaccaccaccaatgtcagccctggtccccgacactcccccggacacccct

SEQ ID NO: 457080 - DNA, 3824 bp, Homo sapiens
agggcggcagcaaggctcccagacctgtccccagcccagccatcagcaggggagagaaagcgaaaccctttcaggggtctccttgtgactctccttcatgcctcccgacgtcccccgggccgctttggtttaggtgggtttgagcgagaatttggactcgaagctgccctctcagccccagtgccagagcccccaaactccagggtgggaaaggggagtcccagccctgctccccctctcccccagtccccgcggcgggtgagtcacccgagcgctccctacttagtcctcaggcgctgcggcgcgtaccaagacgcggacgcagggggaggcagctagcgcggcgaactcctggagccgtggagcccgctcggccgtggccgtgggagaggcgccgggaggctgcgggcgcggggctccggggcgggggcggcgcgaacggcgcggacggcgcgggcgcggggggctgggtcccggggcgctgctggggtggacccccccgcctcgaacttggtacgcgccagcgagaggccaggcccagcccgggcggtacaatagggttgggccgaggccgggactgggccggcgccgggcggggaacgggttcgcgaccgcagccgagagaccccgggcgaccggcacctccgagactcgcgggccacctgcctcgaccttccccggagcgcccccgcctccgagtcgctacttgccgggccgggccgggccgggcgtgatgcgccgcgggacccctgtcctggccactggccgccgccgccgccgccgctgagaccccgagacccccagtgacgccgcagccatggagagcggcccgcgtgcggagctgggggcgggcgcacccccagctgtggtcgccaggacccccccagagccaagaccttctccagaaggtgacccttcccccccaccaccaccaatgtcagccctggtccccgacactcccccggacacccctcctgccatgaagaatgccactagctctaagcagctcccactggaaccagagagcccctcagggcaggtcgggcctaggccagcccccccgcaggaagagtccccttcctctgaagcaaagagcagaggacccaccccaccagccatgggcccacgggatgccagacctcctcgaaggagcagccagccatctccaacagcagtgccagcctccgacagccctcccaccaagcaagaggtgaagaaggcaggagagagacacaagctggcaaaggagcggcgagaagagcgggccaagtacctggcggccaagaaggcagtgtggctggagaaggaggagaaggccaaggcgctgcgggagaagcagctccaggagcgccggcgccggctggaggagcaacgtcttaaagccgagcaacgccgtgcagccctggaggaacggcagcggcagaagctcgagaaaaacaaggagcgctatgaagcagccatccaacggtcagtgaagaagacgtgggccgaaatccggcagcagcgctggtcctgggcaggggccctgcaccacagctctccaggacataagaccagtgggagcaggtgctccgtgtcggcagttaacctgcccaaacacgtggactctataatcaacaagcggctctcaaagtcctctgccacgctctggaactcccccagtagaaatcgcagcctgcagctgagcgcatgggagagcagcatcgtggatcgtctgatgacgcccactctctccttccttgctcggagtcgcagcgcggtcacactgccccgcaacggccgggaccaccgtgccggtgtgcccgcgctcggcctccgccagccccctgacgccgtgcagcgtcacccgaagcgtgcaccgctgcgcccccgccggtgagcgcggggagcgccgcaagcccaacgccgggggcagccccgctccggtgcgccgccggccggaggcctcgccggtgcagaaaaaggagaagaaggacaaggagcgggaaaacgagaaggagaagagtgccctagcccgggagcgcagcctcaagaagcgccagtcgctgcccgcctccccacgtgcccgcctctctgccagcaccgcctctgagctcagccccaaatccaaggccaggccatcctctccctccacatcctggcacaggcctgcctccccctgccccagcccagggccaggccacactctgcctccaaagccaccgtccccccgaggcaccactgcatcccccaaggggcgggttcggaggaaggaggaggcaaaggagagccccagcgccgcagggcccgaggacaagagccagagcaagcgcagggccagtaacgagaaggagtcagcagccccagcctcaccggcaccttcgccggcgccctcgcccaccccagccccgccccagaaggagcagccccccgcggagacccctacagacgctgctgtcttgacctcacccccagcccctgctcccccggtgacccctagcaaaccaatggccggcaccacagaccgagaagaagccactcggctcttggctgagaagcggcgccaggcccgggagcagcgggagcgcgaggagcaggagcggaggctgcaggcagaaagggacaagcgaatgcgagaggagcagctggcacgggaggccgaggcccgggcggagcgggaggcggaggcccggaggcgggaggagcaggaggcacgagagaaggcgcaggccgagcaggaggagcaggagcggctgcagaagcagaaagaggaggccgaagctcggtcgcgggaagaggcggagcggcagcgtctggagcgggaaaagcacttccagcagcaggagcaagagcggcaagagcgcagaaagcgtctggaggagatcatgaagaggactcggaagtcagaagtttctgaaaccaagaagcaggacagcaaggaggccaacgccaacggttccagcccagagcctgtgaaagctgtggaggctcggtccccagggctgcagaaggaggctgtgcagaaagaggagcccatcccacaggagcctcagtggagtctcccaagcaaggagttgccagcgtccctggtgaatggcctgcagcctctcccagcacaccaggagaatggcttctccaccaacggaccctctggggacaagagtctgagccgaacaccagagacactcctgccctttgcagaggcagaagccttcctcaagaaagctgtggtgcagtccccgcaggtcacagaagtcctttaagagggtttgccttggatccgggcacagttgtgagggctcctctgcatcacctaccaggatgtctggaggagaaaaagacagaacaaagatggaagtggcctgggcccctgggggtgggtcctctctgttgtttttaatctgcaccttatagactgatgtctctttggccggagccagatctgcccctcagtgcattcgtgtgctcgcacgcgcagacatcccttctcccccatacacacatatacactcacagcctctctggcctcttcccttggggaggggccacctgtagtatttgccttgatttggtggggtacagtggatgtgaatactgtaaatagcttgtgctcagactcctctgcgtggagagggtgggtgcaggaggcagaccctccccccaaagccccctggggagatcttcctctctctatttaactgtaactgagggggatcccaggtctggggatgggggacaccttgggccacaggatactggttgcttcaggggtacccatgccccctgccctcgcctggaatcagtgttactgcatctgattaaatgtctccagaaataaagaataa

SEQ ID NO: 457081 - DNA, 3922 bp, Homo sapiens
agggcggcagcaaggctcccagacctgtccccagcccagccatcagcaggggagagaaagcgaaaccctttcaggggtctccttgtgactctccttcatgcctcccgacgtcccccgggccgctttggtttaggtgggtttgagcgagaatttggactcgaagctgccctctcagccccagtgccagagcccccaaactccagggtgggaaaggggagtcccagccctgctccccctctcccccagtccccgcggcgggtgagtcacccgagcgctccctacttagtcctcaggcgctgcggcgcgtaccaagacgcggacgcagggggaggcagctagcgcggcgaactcctggagccgtggagcccgctcggccgtggccgtgggagaggcgccgggaggctgcgggcgcggggctccggggcgggggcggcgcgaacggcgcggacggcgcgggcgcggggggctgggtcccggggcgctgctggggtggacccccccgcctcgaacttggtacgcgccagcgagaggccaggcccagcccgggcggtacaatagggttgggccgaggccgggactgggccggcgccgggcggggaacgggttcgcgaccgcagccgagagaccccgggcgaccggcacctccgagactcgcgggccacctgcctcgaccttccccggagcgcccccgcctccgagtcgctacttgccgggccgggccgggccgggcgtgatgcgccgcgggacccctgtcctggccactggccgccgccgccgccgccgctgagaccccgagacccccagtgacgccgcagccatggagagcggcccgcgtgcggagctgggggcgggcgcacccccagctgtggtcgccaggacccccccagagccaagaccttctccagaaggtgacccttcccccccaccaccaccaatgtcagccctggtccccgacactcccccggacacccctcctgccatgaagaatgccactagctctaagcagctcccactggaaccagagagcccctcagggcaggtcgggcctaggccagcccccccgcaggaagagtccccttcctctgaagcaaagagcagaggacccaccccaccagccatgggcccacgggatgccagacctcctcgaaggagcagccagccatctccaacagcagtgccagcctccgacagccctcccaccaagcaagaggtgaagaaggcaggagagagacacaagctggcaaaggagcggcgagaagagcgggccaagtacctggcggccaagaaggcagtgtggctggagaaggaggagaaggccaaggcgctgcgggagaagcagctccaggagcgccggcgccggctggaggagcaacgtcttaaagccgagcaacgccgtgcagccctggaggaacggcagcggcagaagctcgagaaaaacaaggagcgctatgaagcagccatccaacggtcagtgaagaagacgtgggccgaaatccggcagcagcgctggtcctgggcaggggccctgcaccacagctctccaggacataagaccagtgggagcaggtgctccgtgtcggcagttaacctgcccaaacacgtggactctataatcaacaagcggctctcaaagtcctctgccacgctctggaactcccccagtagaaatcgcagcctgcagctgagcgcatgggagagcagcatcgtggatcgtctgatgacgcccactctctccttccttgctcggagtcgcagcgcggtcacactgccccgcaacggccgggaccagggtaggggctgcgaccctgggagaggccccacgtggggccgggcaggggccagcctggcgcgcgggccgcaacccgaccgcactcatccctctgcagccgtgccggtgtgcccgcgctcggcctccgccagccccctgacgccgtgcagcgtcacccgaagcgtgcaccgctgcgcccccgccggtgagcgcggggagcgccgcaagcccaacgccgggggcagccccgctccggtgcgccgccggccggaggcctcgccggtgcagaaaaaggagaagaaggacaaggagcgggaaaacgagaaggagaagagtgccctagcccgggagcgcagcctcaagaagcgccagtcgctgcccgcctccccacgtgcccgcctctctgccagcaccgcctctgagctcagccccaaatccaaggccaggccatcctctccctccacatcctggcacaggcctgcctccccctgccccagcccagggccaggccacactctgcctccaaagccaccgtccccccgaggcaccactgcatcccccaaggggcgggttcggaggaaggaggaggcaaaggagagccccagcgccgcagggcccgaggacaagagccagagcaagcgcagggccagtaacgagaaggagtcagcagccccagcctcaccggcaccttcgccggcgccctcgcccaccccagccccgccccagaaggagcagccccccgcggagacccctacagacgctgctgtcttgacctcacccccagcccctgctcccccggtgacccctagcaaaccaatggccggcaccacagaccgagaagaagccactcggctcttggctgagaagcggcgccaggcccgggagcagcgggagcgcgaggagcaggagcggaggctgcaggcagaaagggacaagcgaatgcgagaggagcagctggcacgggaggccgaggcccgggcggagcgggaggcggaggcccggaggcgggaggagcaggaggcacgagagaaggcgcaggccgagcaggaggagcaggagcggctgcagaagcagaaagaggaggccgaagctcggtcgcgggaagaggcggagcggcagcgtctggagcgggaaaagcacttccagcagcaggagcaagagcggcaagagcgcagaaagcgtctggaggagatcatgaagaggactcggaagtcagaagtttctgaaaccaagaagcaggacagcaaggaggccaacgccaacggttccagcccagagcctgtgaaagctgtggaggctcggtccccagggctgcagaaggaggctgtgcagaaagaggagcccatcccacaggagcctcagtggagtctcccaagcaaggagttgccagcgtccctggtgaatggcctgcagcctctcccagcacaccaggagaatggcttctccaccaacggaccctctggggacaagagtctgagccgaacaccagagacactcctgccctttgcagaggcagaagccttcctcaagaaagctgtggtgcagtccccgcaggtcacagaagtcctttaagagggtttgccttggatccgggcacagttgtgagggctcctctgcatcacctaccaggatgtctggaggagaaaaagacagaacaaagatggaagtggcctgggcccctgggggtgggtcctctctgttgtttttaatctgcaccttatagactgatgtctctttggccggagccagatctgcccctcagtgcattcgtgtgctcgcacgcgcagacatcccttctcccccatacacacatatacactcacagcctctctggcctcttcccttggggaggggccacctgtagtatttgccttgatttggtggggtacagtggatgtgaatactgtaaatagcttgtgctcagactcctctgcgtggagagggtgggtgcaggaggcagaccctccccccaaagccccctggggagatcttcctctctctatttaactgtaactgagggggatcccaggtctggggatgggggacaccttgggccacaggatactggttgcttcaggggtacccatgccccctgccctcgcctggaatcagtgttactgcatctgattaaatgtctccagaaataaagaataa

SEQ ID NO: 457082 - DNA, 3141 bp, Homo sapiens
ctgcaacacttaattatgtgcactgtgctaagagcaggacacacatctaatttaatcctcaacccattttgaggaggaaacagaggctcagagagatgaaatcatttgcttaagccacacagctagtagagtagctgacattcagacccagaagcctcctgccaccccaaatcccatgctcttaatcacagtatgtggacatctgtctggtaggccccccaggtcagatggggatcttgcactcaagcattcatttctccttcagccctgagagcccataaggccaatggaggagaaataggcctctcctgagtcctgtcttcagtaagcctctcaatttgagggggttgtctcagactgaaagctccacctaagcaggcgggagaaagacccacccagggcatgggtagcagggctggccacttggaggaaatgtccttggcccaggccttctgcagaacccttcacacacgccactgggctcctttgtccacagcggccaagaaggcagtgtggctggagaaggaggagaaggccaaggcgctgcgggagaagcagctccaggagcgccggcgccggctggaggagcaacgtcttaaagccgagcaacgccgtgcagccctggaggaacggcagcggcagaagctcgagaaaaacaaggagcgctatgaagcagccatccaacggtcagtgaagaagacgtgggccgaaatccggcagcagcgctggtcctgggcaggggccctgcaccacagctctccaggacataagaccagtgggagcaggtgctccgtgtcggcagttaacctgcccaaacacgtggactctataatcaacaagcggctctcaaagtcctctgccacgctctggaactcccccagtagaaatcgcagcctgcagctgagcgcatgggagagcagcatcgtggatcgtctgatgacgcccactctctccttccttgctcggagtcgcagcgcggtcacactgccccgcaacggccgggaccagggtaggggctgcgaccctgggagaggccccacgtggggccgggcaggggccagcctggcgcgcgggccgcaacccgaccgcactcatccctctgcagccgtgccggtgtgcccgcgctcggcctccgccagccccctgacgccgtgcagcgtcacccgaagcgtgcaccgctgcgcccccgccggtgagcgcggggagcgccgcaagcccaacgccgggggcagccccgctccggtgcgccgccggccggaggcctcgccggtgcagaaaaaggagaagaaggacaaggagcgggaaaacgagaaggagaagagtgccctagcccgggagcgcagcctcaagaagcgccagtcgctgcccgcctccccacgtgcccgcctctctgccagcaccgcctctgagctcagccccaaatccaaggccaggccatcctctccctccacatcctggcacaggcctgcctccccctgccccagcccagggccaggccacactctgcctccaaagccaccgtccccccgaggcaccactgcatcccccaaggggcgggttcggaggaaggaggaggcaaaggagagccccagcgccgcagggcccgaggacaagagccagagcaagcgcagggccagtaacgagaaggagtcagcagccccagcctcaccggcaccttcgccggcgccctcgcccaccccagccccgccccagaaggagcagccccccgcggagacccctacagacgctgctgtcttgacctcacccccagcccctgctcccccggtgacccctagcaaaccaatggccggcaccacagaccgagaagaagccactcggctcttggctgagaagcggcgccaggcccgggagcagcgggagcgcgaggagcaggagcggaggctgcaggcagaaagggacaagcgaatgcgagaggagcagctggcacgggaggccgaggcccgggcggagcgggaggcggaggcccggaggcgggaggagcaggaggcacgagagaaggcgcaggccgagcaggaggagcaggagcggctgcagaagcagaaagaggaggccgaagctcggtcgcgggaagaggcggagcggcagcgtctggagcgggaaaagcacttccagcagcaggagcaagagcggcaagagcgcagaaagcgtctggaggagatcatgaagaggactcggaagtcagaagtttctgaaaccaagaagcaggacagcaaggaggccaacgccaacggttccagcccagagcctgtgaaagctgtggaggctcggtccccagggctgcagaaggaggctgtgcagaaagaggagcccatcccacaggagcctcagtggagtctcccaagcaaggagttgccagcgtccctggtgaatggcctgcagcctctcccagcacaccaggagaatggcttctccaccaacggaccctctggggacaagagtctgagccgaacaccagagacactcctgccctttgcagaggcagaagccttcctcaagaaagctgtggtgcagtccccgcaggtcacagaagtcctttaagagggtttgccttggatccgggcacagttgtgagggctcctctgcatcacctaccaggatgtctggaggagaaaaagacagaacaaagatggaagtggcctgggcccctgggggtgggtcctctctgttgtttttaatctgcaccttatagactgatgtctctttggccggagccagatctgcccctcagtgcattcgtgtgctcgcacgcgcagacatcccttctcccccatacacacatatacactcacagcctctctggcctcttcccttggggaggggccacctgtagtatttgccttgatttggtggggtacagtggatgtgaatactgtaaatagcttgtgctcagactcctctgcgtggagagggtgggtgcaggaggcagaccctccccccaaagccccctggggagatcttcctctctctatttaactgtaactgagggggatcccaggtctggggatgggggacaccttgggccacaggatactggttgcttcaggggtacccatgccccctgccctcgcctggaatcagtgttactgcatctgattaaatgtctccagaaataaagaataa

SEQ ID NO: 457083 - DNA, 3833 bp, Homo sapiens
agggcggcagcaaggctcccagacctgtccccagcccagccatcagcaggggagagaaagcgaaaccctttcaggggtctccttgtgactctccttcatgcctcccgacgtcccccgggccgctttggtttaggtgggtttgagcgagaatttggactcgaagctgccctctcagccccagtgccagagcccccaaactccagggtgggaaaggggagtcccagccctgctccccctctcccccagtccccgcggcgggtgagtcacccgagcgctccctacttagtcctcaggcgctgcggcgcgtaccaagacgcggacgcagggggaggcagctagcgcggcgaactcctggagccgtggagcccgctcggccgtggccgtgggagaggcgccgggaggctgcgggcgcggggctccggggcgggggcggcgcgaacggcgcggacggcgcgggcgcggggggctgggtcccggggcgctgctggggtggacccccccgcctcgaacttggtacgcgccagcgagaggccaggcccagcccgggcggtacaatagggttgggccgaggccgggactgggccggcgccgggcggggaacgggttcgcgaccgcagccgagagaccccgggcgaccggcacctccgagactcgcgggccacctgcctcgaccttccccggagcgcccccgcctccgagtcgctacttgccgggccgggccgggccgggcgtgatgcgccgcgggacccctgtcctggccactggccgccgccgccgccgccgctgagaccccgagacccccagtgacgccgcagccatggagagcggcccgcgtgcggagctgggggcgggcgcacccccagctgtggtcgccaggacccccccagagccaagaccttctccagaaggtgacccttcccccccaccaccaccaatgtcagccctggtccccgacactcccccggacacccctcctgccatgaagaatgccactagctctaagcagctcccactggaaccagagagcccctcagggcaggtcgggcctaggccagcccccccgcaggaagagtccccttcctctgaagcaaagagcagaggacccaccccaccagccatgggcccacgggatgccagacctcctcgaaggagcagccagccatctccaacagcagtgccagcctccgacagccctcccaccaagcaagaggtgaagaaggcaggagagagacacaagctggcaaaggagcggcgagaagagcgggccaagtacctggcggccaagaaggcagtgtggctggagaaggaggagaaggccaaggcgctgcgggagaagcagctccaggagcgccggcgccggctggaggagcaacgtcttaaagccgagcaacgccgtgcagccctggaggaacggcagcggcagaagctcgagaaaaacaaggagcgctatgaagcagccatccaacggtcagtgaagaagacgtgggccgaaatccggcagcagcgctggtcctgggcaggggccctgcaccacagctctccaggacataagaccagtgggagcaggtgctccgtgtcggcagttaacctgcccaaacacgtggactctataatcaacaagcggctctcaaagtcctctgccacgctctggaactcccccagtagaaatcgcagcctgcagctgagcgcatgggagagcagcatcgtggatcgtctgatgacgcccactctctccttccttgctcggagtcgcagcgcggtcacactgccccgcaacggccgggaccagggtaggggctgcgaccctgggagaggccccacgtggggccgggcaggggccagcctggcgcgcgggccgcaacccgaccgcactcatccctctgcagccgtgccggtgtgcccgcgctcggcctccgccagccccctgacgccgtgcagcgtcacccgaagcgtgcaccgctgcgcccccgccggtgagcgcggggagcgccgcaagcccaacgccgggggcagccccgctccggtgcgccgccggccggaggcctcgccggtgcagaaaaaggagaagaaggacaaggagcgggaaaacgagaaggagaagagtgccctagcccgggagcgcagcctcaagaagcgccagtcgctgcccgcctccccacgtgcccgcctctctgccagcaccgcctctgagctcagccccaaatccaaggccaggccatcctctccctccacatcctggcacaggcctgcctccccctgccccagcccagggccaggccacactctgcctccaaagccaccgtccccccgaggcaccactgcatcccccaaggggcgggttcggaggaaggaggaggcaaaggagagccccagcgccgcagggcccgaggacaagagccagagcaagcgcagggccagtaacgagaaggagtcagcagccccagcctcaccggcaccttcgccggcgccctcgcccaccccagccccgccccagaaggagcagccccccgcggagacccctacagacgctgctgtcttgacctcacccccagcccctgctcccccggtgacccctagcaaaccaatggccggcaccacagaccgagaagaagccactcggctcttggctgagaagcggcgccaggcccgggagcagcgggagccgggaggcggaggcccggaggcgggaggagcaggaggcacgagagaaggcgcaggccgagcaggaggagcaggagcggctgcagaagcagaaagaggaggccgaagctcggtcgcgggaagaggcggagcggcagcgtctggagcgggaaaagcacttccagcagcaggagcaagagcggcaagagcgcagaaagcgtctggaggagatcatgaagaggactcggaagtcagaagtttctgaaaccaagaagcaggacagcaaggaggccaacgccaacggttccagcccagagcctgtgaaagctgtggaggctcggtccccagggctgcagaaggaggctgtgcagaaagaggagcccatcccacaggagcctcagtggagtctcccaagcaaggagttgccagcgtccctggtgaatggcctgcagcctctcccagcacaccaggagaatggcttctccaccaacggaccctctggggacaagagtctgagccgaacaccagagacactcctgccctttgcagaggcagaagccttcctcaagaaagctgtggtgcagtccccgcaggtcacagaagtcctttaagagggtttgccttggatccgggcacagttgtgagggctcctctgcatcacctaccaggatgtctggaggagaaaaagacagaacaaagatggaagtggcctgggcccctgggggtgggtcctctctgttgtttttaatctgcaccttatagactgatgtctctttggccggagccagatctgcccctcagtgcattcgtgtgctcgcacgcgcagacatcccttctcccccatacacacatatacactcacagcctctctggcctcttcccttggggaggggccacctgtagtatttgccttgatttggtggggtacagtggatgtgaatactgtaaatagcttgtgctcagactcctctgcgtggagagggtgggtgcaggaggcagaccctccccccaaagccccctggggagatcttcctctctctatttaactgtaactgagggggatcccaggtctggggatgggggacaccttgggccacaggatactggttgcttcaggggtacccatgccccctgccctcgcctggaatcagtgttactgcatctgattaaatgtctccagaaataaagaataa

SEQ ID NO: 457084 - DNA, 4158 bp, Homo sapiens
agggcggcagcaaggctcccagacctgtccccagcccagccatcagcaggggagagaaagcgaaaccctttcaggggtctccttgtgactctccttcatgcctcccgacgtcccccgggccgctttggtttaggtgggtttgagcgagaatttggactcgaagctgccctctcagccccagtgccagagcccccaaactccagggtgggaaaggggagtcccagccctgctccccctctcccccagtccccgcggcgggtgagtcacccgagcgctccctacttagtcctcaggcgctgcggcgcgtaccaagacgcggacgcagggggaggcagctagcgcggcgaactcctggagccgtggagcccgctcggccgtggccgtgggagaggcgccgggaggctgcgggcgcggggctccggggcgggggcggcgcgaacggcgcggacggcgcgggcgcggggggctgggtcccggggcgctgctggggtggacccccccgcctcgaacttggtacgcgccagcgagaggccaggcccagcccgggcggtacaatagggttgggccgaggccgggactgggccggcgccgggcggggaacgggttcgcgaccgcagccgagagaccccgggcgaccggcacctccgagactcgcgggccacctgcctcgaccttccccggagcgcccccgcctccgagtcgctacttgccgggccgggccgggccgggcgtgatgcgccgcgggacccctgtcctggccactggccgccgccgccgccgccgctgagaccccgagacccccagtgacgccgcagccatggagagcggcccgcgtgcggagctgggggcgggcgcacccccagctgtggtcgccaggacccccccagagccaagaccttctccagaaggtgacccttcccccccaccaccaccaatgtcagccctggtccccgacactcccccggacacccctcctgccatgaagaatgccactagctctaagcagctcccactggaaccagagagcccctcagggcaggtcgggcctaggccagcccccccgcaggaagagtccccttcctctgaagcaaagagcagaggacccaccccaccagccatgggcccacgggatgccagacctcctcgaaggagcagccagccatctccaacagcagtgccagcctccgacagccctcccaccaagcaagaggtgaagaaggcaggagagagacacaagctggcaaaggagcggcgagaagagcgggccaagtacctggcggccaagaaggcagtgtggctggagaaggaggagaaggccaaggcgctgcgggagaagcagctccaggagcgccggcgccggctggaggagcaacgtcttaaagccgagcaacgccgtgcagccctggaggaacggcagcggcagaagctcgagaaaaacaaggagcgctatgaagcagccatccaacggtcagtgaagaagacgtgggccgaaatccggcagcagcgctggtcctgggcaggggccctgcaccacagctctccaggacataagaccagtgggagcaggtgctccgtgtcggcagttaacctgcccaaacacgtggactctataatcaacaagcggctctcaaagtcctctgccacgctctggaactcccccagtagaaatcgcagcctgcagctgagcgcatgggagagcagcatcgtggatcgtctgatgacgcccactctctccttccttgctcggagtcgcagcgcggtcacactgccccgcaacggccgggaccagggtaggggctgcgaccctgggagaggccccacgtggggccgggcaggggccagcctggcgcgcgggccgcaacccgaccgcactcatccctctgcagccgtgccggtgtgcccgcgctcggcctccgccagccccctgacgccgtgcagcgtcacccgaagcgtgcaccgctgcgcccccgccggtgagcgcggggagcgccgcaagcccaacgccgggggcagccccgctccggtgcgccgccggccggaggcctcgccggtgcagaaaaaggagaagaaggacaaggagcgggaaaacgagaaggagaagagtgccctagcccgggagcgcagcctcaagaagcgccagtcgctgcccgcctccccacgtgcccgcctctctgccagcaccgcctctgagctcagccccaaatccaaggccaggccatcctctccctccacatcctggcacaggcctgcctccccctgccccagcccagggccaggccacactctgcctccaaagccaccgtccccccgaggcaccactgcatcccccaaggggcgggttcggaggaaggaggaggcaaaggagagccccagcgccgcagggcccgaggacaagagccagagcaagcgcagggccagtaacgagaaggagtcagcagccccagcctcaccggcaccttcgccggcgccctcgcccaccccagccccgccccagaaggagcagccccccgcggagacccctacagacgctgctgtcttgacctcacccccagcccctgctcccccggtgacccctagcaaaccaatggccggcaccacagaccgagaagaagccactcggctcttggctgagaagcggcgccaggcccgggagcagcgggagcgcgaggagcaggagcggaggctgcaggcagaaagggacaagcgaatgcgagaggagcagctggcacgggaggccgaggcccgggcggagcgggaggcggaggcccggaggcgggaggagcaggaggcacgagagaaggcgcaggccgagcaggaggagcaggagcggctgcagaagcagaaagaggaggccgaagctcggtcgcgggaagaggcggagcggcagcgtctggagcgggaaaagcacttccagcagcaggagcaagagcggcaagagcgcagaaaggtgtgcggacctgggcggggatttgtgggcggggcctgggcagggcgggccaggtgggcggggcctgggcttagagcggacaggacgggaaagcgctggggcaaattccagttcctgtcctggagagggctgctatgagctgggaggccctaagactccgaggccgggtctggctggtgggaggtttaggattaggggcggggctcgagcctaactgatctgcggcctccaaacagcgtctggaggagatcatgaagaggactcggaagtcagaagtttctgaaaccaagaagcaggacagcaaggaggccaacgccaacggttccagcccagagcctgtgaaagctgtggaggctcggtccccagggctgcagaaggaggctgtgcagaaagaggagcccatcccacaggagcctcagtggagtctcccaagcaaggagttgccagcgtccctggtgaatggcctgcagcctctcccagcacaccaggagaatggcttctccaccaacggaccctctggggacaagagtctgagccgaacaccagagacactcctgccctttgcagaggcagaagccttcctcaagaaagctgtggtgcagtccccgcaggtcacagaagtcctttaagagggtttgccttggatccgggcacagttgtgagggctcctctgcatcacctaccaggatgtctggaggagaaaaagacagaacaaagatggaagtggcctgggcccctgggggtgggtcctctctgttgtttttaatctgcaccttatagactgatgtctctttggccggagccagatctgcccctcagtgcattcgtgtgctcgcacgcgcagacatcccttctcccccatacacacatatacactcacagcctctctggcctcttcccttggggaggggccacctgtagtatttgccttgatttggtggggtacagtggatgtgaatactgtaaatagcttgtgctcagactcctctgcgtggagagggtgggtgcaggaggcagaccctccccccaaagccccctggggagatcttcctctctctatttaactgtaactgagggggatcccaggtctggggatgggggacaccttgggccacaggatactggttgcttcaggggtacccatgccccctgccctcgcctggaatcagtgttactgcatctgattaaatgtctccagaaataaagaataa

SEQ ID NO: 457085 - DNA, 4152 bp, Homo sapiens
agggcggcagcaaggctcccagacctgtccccagcccagccatcagcaggggagagaaagcgaaaccctttcaggggtctccttgtgactctccttcatgcctcccgacgtcccccgggccgctttggtttaggtgggtttgagcgagaatttggactcgaagctgccctctcagccccagtgccagagcccccaaactccagggtgggaaaggggagtcccagccctgctccccctctcccccagtccccgcggcgggtgagtcacccgagcgctccctacttagtcctcaggcgctgcggcgcgtaccaagacgcggacgcagggggaggcagctagcgcggcgaactcctggagccgtggagcccgctcggccgtggccgtgggagaggcgccgggaggctgcgggcgcggggctccggggcgggggcggcgcgaacggcgcggacggcgcgggcgcggggggctgggtcccggggcgctgctggggtggacccccccgcctcgaacttggtacgcgccagcgagaggccaggcccagcccgggcggtacaatagggttgggccgaggccgggactgggccggcgccgggcggggaacgggttcgcgaccgcagccgagagaccccgggcgaccggcacctccgagactcgcgggccacctgcctcgaccttccccggagcgcccccgcctccgagtcgctacttgccgggccgggccgggccgggcgtgatgcgccgcgggacccctgtcctggccactggccgccgccgccgccgccgctgagaccccgagacccccagtgacgccgcagccatggagagcggcccgcgtgcggagctgggggcgggcgcacccccagctgtggtcgccaggacccccccagagccaagaccttctccagaaggtgacccttcccccccaccaccaccaatgtcagccctggtccccgacactcccccggacacccctcctgccatgaagaatgccactagctctaagcagctcccactggaaccagagagcccctcagggcaggtcgggcctaggccagcccccccgcaggaagagtccccttcctctgaagcaaagagcagaggacccaccccaccagccatgggcccacgggatgccagacctcctcgaaggagcagccagccatctccaacagcagtgccagcctccgacagccctcccaccaagcaagaggtgaagaaggcaggagagagacacaagctggcaaaggagcggcgagaagagcgggccaagtacctggcggccaagaaggcagtgtggctggagaaggaggagaaggccaaggcgctgcgggagaagcagctccaggagcgccggcgccggctggaggagcaacgtcttaaagccgagcaacgccgtgcagccctggaggaacggcagcggcagaagctcgagaaaaacaaggagcgctatgaagcagccatccaacggtcagtgaagaagacgtgggccgaaatccggcagcagcgctggtcctgggcaggggccctgcaccacagctctccaggacataagaccagtgggagcaggtgctccgtgtcggcagttaacctgcccaaacacgtggactctataatcaacaagcggctctcaaagtcctctgccacgctctggaactcccccagtagaaatcgcagcctgcagctgagcgcatgggagagcagcatcgtggatcgtctgatgacgcccactctctccttccttgctcggagtcgcagcgcggtcacactgccccgcaacggccgggaccagggtaggggctgcgaccctgggagaggccccacgtggggccgggcaggggccagcctggcgcgcgggccgcaacccgaccgcactcatccctctgcagccgtgccggtgtgcccgcgctcggcctccgccagccccctgacgccgtgcagcgtcacccgaagcgtgcaccgctgcgcccccgccggtgagcgcggggagcgccgcaagcccaacgccgggggcagccccgctccggtgcgccgccggccggaggcctcgccggtgcagaaaaaggagaagaaggacaaggagcgggaaaacgagaaggagaagagtgccctagcccgggagcgcagcctcaagaagcgccagtcgctgcccgcctccccacgtgcccgcctctctgccagcaccgcctctgagctcagccccaaatccaaggccaggccatcctctccctccacatcctggcacaggcctgcctccccctgccccagcccagggccaggccacactctgcctccaaagccaccgtccccccgaggcaccactgcatcccccaaggggcgggttcggaggaaggaggaggcaaaggagagccccagcgccgcagggcccgaggacaagagccagagcaagcgcagggccagtaacgagaaggagtcagcagccccagcctcaccggcaccttcgccggcgccctcgcccaccccagccccgccccagaaggagcagccccccgcggagacccctacagacgctgctgtcttgacctcacccccagcccctgctcccccggtgacccctagcaaaccaatggccggcaccacagaccgagaagaagccactcggctcttggctgagaagcggcgccaggcccgggagcagcgggagcgcgaggagcaggagcggaggctgcaggcagaaagggacaagcgaatgcgagaggagcagctggcacgggaggccgaggcccgggcggagcgggaggcggaggcccggaggcgggaggagcaggaggcacgagagaaggcgcaggccgagcaggaggagcaggagcggctgcagaagcagaaagaggaggccgaagctcggtcgcgggaagaggcggagcggcagcgtctggagcgggaaaagcacttccagcagcaggagcaagagcggcaagagcgcagaaagcgtctggaggagatcatgaagaggactcggaagtcagaagtttctgaaaccaagaagcaggacagcaaggaggccaacgccaacggttccagcccagagcctgtgaaagctgtggaggctcggtccccagggctgcagaaggaggctgtgcagaaagaggagcccatcccacaggagcctcagtggagtctcccaagcaaggagttgccagcgtccctggtgaatggcctgcagcctctcccagcacaccaggagaatggcttctccaccaacggaccctctggggacaagagtctgagccgaacaccagagacactcctgccctttgcagaggcagaagccttcctcaagaaagctgtggtgcagtccccgcaggtcacagaagtcctttaagagggtttgccttggatccgggcacagttgtgagggctcctctgcatcacctaccaggatgtctggaggagaaaaagacagaacaaagatggaagtggcctgggcccctgggggtgggtcctctctgttgtttttaatctgcaccttatagactgatgtctctttggccggagccagatctgcccctcagtgcattcgtgtgctcgcacgcgcagacatcccttctcccccatacacacatatacactcacagcctctctggcctcttcccttggggaggggccacctgtagtatttgccttgatttggtggggtacagtggatgtgaatactgtaaatagcttgtgctcagactcctctgcgtggagagggtgggtgcaggaggcagaccctccccccaaagccccctggggagatcttcctctctctatttaactgtaactgagggggatcccaggtctggggatgggggacaccttgggccacaggatactggttgcttcaggggtacccatgccccctgccctcgcctggaatcagtgttactgcatctgattaaatgtctccagaaataaagaataaaaaaaaaaaaaaagggcggccgcccttttttttttcttctattgcctctgagagcatcaggcctagaggcctgactgccaagccatgggtagcctgggtgtaaacctggagatggtggatgatccccacgccacagcccttttgtctctgcaaactgccttcttcggaaagaagaaggtgggaggatgtgaattgttagtttctgagttttaccaaataaagtagaatat

SEQ ID NO: 457086 - DNA, 3943 bp, Homo sapiens
agggcggcagcaaggctcccagacctgtccccagcccagccatcagcaggggagagaaagcgaaaccctttcaggggtctccttgtgactctccttcatgcctcccgacgtcccccgggccgctttggtttaggtgggtttgagcgagaatttggactcgaagctgccctctcagccccagtgccagagcccccaaactccagggtgggaaaggggagtcccagccctgctccccctctcccccagtccccgcggcgggtgagtcacccgagcgctccctacttagtcctcaggcgctgcggcgcgtaccaagacgcggacgcagggggaggcagctagcgcggcgaactcctggagccgtggagcccgctcggccgtggccgtgggagaggcgccgggaggctgcgggcgcggggctccggggcgggggcggcgcgaacggcgcggacggcgcgggcgcggggggctgggtcccggggcgctgctggggtggacccccccgcctcgaacttggtacgcgccagcgagaggccaggcccagcccgggcggtacaatagggttgggccgaggccgggactgggccggcgccgggcggggaacgggttcgcgaccgcagccgagagaccccgggcgaccggcacctccgagactcgcgggccacctgcctcgaccttccccggagcgcccccgcctccgagtcgctacttgccgggccgggccgggccgggcgtgatgcgccgcgggacccctgtcctggccactggccgccgccgccgccgccgctgagaccccgagacccccagtgacgccgcagccatggagagcggcccgcgtgcggagctgggggcgggcgcacccccagctgtggtcgccaggacccccccagagccaagaccttctccagaaggtgacccttcccccccaccaccaccaatgtcagccctggtccccgacactcccccggacacccctcctgccatgaagaatgccactagctctaagcagctcccactggaaccagagagcccctcagggcaggtcgggcctaggccagcccccccgcaggaagagtccccttcctctgaagcaaagagcagaggacccaccccaccagccatgggcccacgggatgccagacctcctcgaaggagcagccagccatctccaacagcagtgccagcctccgacagccctcccaccaagcaagaggtgaagaaggcaggagagagacacaagctggcaaaggagcggcgagaagagcgggccaagtacctggcggccaagaaggcagtgtggctggagaaggaggagaaggccaaggcgctgcgggagaagcagctccaggagcgccggcgccggctggaggagcaacgtcttaaagccgagcaacgccgtgcagccctggaggaacggcagcggcagaagctcgagaaaaacaaggagcgctatgaagcagccatccaacggtcagtgaagaagacgtgggccgaaatccggcagcagcgctggtcctgggcaggggccctgcaccacagctctccaggacataagaccagtgggagcaggtgctccgtgtcggcagttaacctgcccaaacacgtggactctataatcaacaagcggctctcaaagtcctctgccacgctctggaactcccccagtagaaatcgcagcctgcagctgagcgcatgggagagcagcatcgtggatcgtctgatgacgcccactctctccttccttgctcggagtcgcagcgcggtcacactgccccgcaacggccgggaccagggtaggggctgcgaccctgggagaggccccacgtggggccgggcaggggccagcctggcgcgcgggccgcaacccgaccgcactcatccctctgcagccgtgccggtgtgcccgcgctcggcctccgccagccccctgacgccgtgcagcgtcacccgaagcgtgcaccgctgcgcccccgccggtgagcgcggggagcgccgcaagcccaacgccgggggcagccccgctccggtgcgccgccggccggaggcctcgccggtgcagaaaaaggagaagaaggacaaggagcgggaaaacgagaaggagaagagtgccctagcccgggagcgcagcctcaagaagcgccagtcgctgcccgcctccccacgtgcccgcctctctgccagcaccgcctctgagctcagccccaaatccaaggccaggccatcctctccctccacatcctggcacaggcctgcctccccctgccccagcccagggccaggccacactctgcctccaaagccaccgtccccccgaggcaccactgcatcccccaaggggcgggttcggaggaaggaggaggcaaaggagagccccagcgccgcagggcccgaggacaagagccagagcaagcgcagggccagtaacgagaaggagtcagcagccccagcctcaccggcaccttcgccggcgccctcgcccaccccagccccgccccagaaggagcagccccccgcggagacccctacagacgctgctgtcttgacctcacccccagcccctgctcccccggtgacccctagcaaaccaatggccggcaccacagaccgagaagaagccactcggctcttggctgagaagcggcgccaggcccgggagcagcgggagcgcgaggagcaggagcggaggctgcaggcagaaagggacaagcgaatgcgagaggagcagctggcacgggaggccgaggcccgggcggagcgggaggcggaggcccggaggcgggaggagcaggaggcacgagagaaggcgcaggccgagcaggaggagcaggagcggctgcagaagcagaaagaggaggccgaagctcggtcgcgggaagaggcggagcggcagcgtctggagcgggaaaagcacttccagcagcaggagcaagagcggcaagagcgcagaaagcgtctggaggagatcatgaagaggactcggaagtcagaagtttctgaaaccaagaagcaggacagcaaggaggccaacgccaacggttccagcccagagcctgtgaaagctgtggaggctcggtccccagggctgcagaaggaggctgtgcagaaagaggagcccatcccacaggagcctcagtggagtctcccaagcaaggagttgccagcgtccctggtgaatggcctgcagcctctcccagcacaccaggagaatggcttctccaccaacggaccctctggggacaagagtctgagccgaacaccagagacactcctgccctttgcagaggcagaagccttcctcaagaaagctgtggtgcagtccccgcaggtcacagaagtcctttaagagggtttgccttggatccgggcacagttgtgagggctcctctgcatcacctaccaggatgtctggaggagaaaaagacagaacaaagatggaagtggcctgggcccctgggggtgggtcctctctgttgtttttaatctgcaccttatagactgatgtctctttggccggagccagatctgcccctcagtgcattcgtgtgctcgcacgcgcagacatcccttctcccccatacacacatatacactcacagcctctctggcctcttcccttggggaggggccacctgtagtatttgccttgatttggtggggtacagtggatgtgaatactgtaaatagcttgtgctcagactcctctgcgtggagagggtgggtgcaggaggcagaccctccccccaaagccccctggggagatcttcctctctctatttaactgtaactgagggggatcccaggtctggggatgggggacaccttgggccacaggatactggttgcttcaggggtacccatgccccctgccctcgcctggaatcagtgttactgcatctgattaaatgtctccagaaataaagaataaaaaaaaaacaaaaaaaaaaaa

SEQ ID NO: 457087 - DNA, 820 bp, Homo sapiens
actcttctgtcgaaggaaaccgggctccttcgggcacaaccggctgtgtctgctccagggggccatcagagggtggaacagggacacaggacccattctgggagaggcctccaggaagccctgctgcatgacactgcggatgctgggctcgggcagcagtatcttctgcatggcgcgcgcgccccggcggggcccttggtacgcgtacaaggccccgcaggtcacagaagtcctttaagagggtttgccttggatccgggcacagttgtgagggctcctctgcatcacctaccaggatgtctggaggagaaaaagacagaacaaagatggaagtggcctgggcccctgggggtgggtcctctctgttgtttttaatctgcaccttatagactgatgtctctttggccggagccagatctgcccctcagtgcattcgtgtgctcgcacgcgcagacatcccttctcccccatacacacatatacactcacagcctctctggcctcttcccttggggaggggccacctgtagtatttgccttgatttggtggggtacagtggatgtgaatactgtaaatagcttgtgctcagactcctctgcgtggagagggtgggtgcaggaggcagaccctccccccaaagccccctggggagatcttcctctctctatttaactgtaactgagggggatcccaggtctggggatgggggacaccttgggccacaggatactggttgcttcaggggtacccatgccccctgccctcgcctggaatcagtgttactgcatctgattaaatgtctccagaaataaagaataa

SEQ ID NO: 457088 - DNA, 2906 bp, Homo sapiens
agggcggcagcaaggctcccagacctgtccccagcccagccatcagcaggggagagaaagcgaaaccctttcaggggtctccttgtgactctccttcatgcctcccgacgtcccccgggccgctttggtttaggtgggtttgagcgagaatttggactcgaagctgccctctcagccccagtgccagagcccccaaactccagggtgggaaaggggagtcccagccctgctccccctctcccccagtccccgcggcgggtgagtcacccgagcgctccctacttagtcctcaggcgctgcggcgcgtaccaagacgcggacgcagggggaggcagctagcgcggcgaactcctggagccgtggagcccgctcggccgtggccgtgggagaggcgccgggaggctgcgggcgcggggctccggggcgggggcggcgcgaacggcgcggacggcgcgggcgcggggggctgggtcccggggcgctgctggggtggacccccccgcctcgaacttggtacgcgccagcgagaggccaggcccagcccgggcggtacaatagggttgggccgaggccgggactgggccggcgccgggcggggaacgggttcgcgaccgcagccgagagaccccgggcgaccggcacctccgagactcgcgggccacctgcctcgaccttccccggagcgcccccgcctccgagtcgctacttgccgggccgggccgggccgggcgtgatgcgccgcgggacccctgtcctggccactggccgccgccgccgccgccgctgagaccccgagacccccagtgacgccgcagccatggagagcggcccgcgtgcggagctgggggcgggcgcacccccagctgtggtcgccaggacccccccagagccaagaccttctccagaaggtgacccttcccccccaccaccaccaatgtcagccctggtccccgacactcccccggacacccctcctgccatgaagaatgccactagctctaagcagctcccactggaaccagagagcccctcagggcaggtcgggcctaggccagcccccccgcaggaagagtccccttcctctgaagcaaagagcagaggacccaccccaccagccatgggcccacgggatgccagacctcctcgaaggagcagccagccatctccaacagcagtgccagcctccgacagccctcccaccaagcaagaggtgaagaaggcaggagagagacacaagctggcaaaggagcggcgagaagagcgggccaagtacctggcggccaagaaggcagtgtggctggagaaggaggagaaggccaaggcgctgcgggagaagcagctccaggagcgccggcgccggctggaggagcaacgtcttaaagccgagcaacgccgtgcagccctggaggaacggcagcggcagaagctcgagaaaaacaaggagcgctatgaagcagccatccaacggtcagtgaagaagacgtgggccgaaatccggcagcagcgctggtcctgggcaggggccctgcaccacagctctccaggacataagaccagtgggagcaggtgctccgtgtcggcagttaacctgcccaaacacgtggactctataatcaacaagcggctctcaaagtcctctgccacgctctggaactcccccagtagaaatcgcagcctgcagctgagcgcatgggagagcagcatcgtggatcgtctgatgacgcccactctctccttccttgctcggagtcgcagcgcggtcacactgccccgcaacggccgggaccagggtaggggctgcgaccctgggagaggccccacgtggggccgggcaggggccagcctggcgcgcgggccgcaacccgaccgcactcatccctctgcagccgtgccggtgtgcccgcgctcggcctccgccagccccctgacgccgtgcagcgtcacccgaagcgtgcaccgctgcgcccccgccggtgagcgcggggagcgccgcaagcccaacgccgggggcagccccgctccggtgcgccgccggccggaggcctcgccggtgcagaaaaaggagaagaaggacaaggagcgggaaaacgagaaggagaagagtgccctagcccgggagcgcagcctcaagaagcgccagtcgctgcccgcctccccacgtgcccgcctctctgccagcaccgcctctgagctcagccccaaatccaaggccaggccatcctctccctccacatcctggcacaggcctgcctccccctgccccagcccagggccaggccacactctgcctccaaagccaccgtccccccgaggcaccactgcatcccccaaggggcgggttcggaggaaggaggaggcaaaggagagccccagcgccgcagggcccgaggacaagagccagagcaagcgcagggccagtaacgagaaggagtcagcagccccagcctcaccggcaccttcgccggcgccctcgcccaccccagccccgccccagaaggagcagccccccgcggagacccctacagacgctgctgtcttgacctcacccccagcccctgctcccccggtgacccctagcaaaccaatggccggcaccacagaccgagaagaagccactcggctcttggctgagaagcggcgccaggcccgggagcagcgggagcgcgaggagcaggagcggaggctgcaggcagaaagggacaagcgaatgcgagaggagcagctggcacgggaggccgaggcccgggcggagcgggaggcggaggcccggaggcgggaggagcaggaggcacgagagaaggcgcaggccgagcaggaggagcaggagcggctgcagaagcaggcctgaaggaggggaggggaagggaggagcagagtgggtattaggaagagcattccgagaagca

SEQ ID NO: 457089 - DNA, 2747 bp, Homo sapiens
  misc_feature (786)..(786): n is a, c, g, or t
tatgtatcaggtactttacatgtgatacctttttttaatgtcttataattttagtttaaaaaaattttaatacacaataactgtacatatttatgggggtacatagtgatgttgcaatacatataacatatagtgattagggtaattagcatatctatcatctcaaaaacttatgtctttgttttgggaacatgcaatatccttcttctagctatttgaaactatacaatattgttaactatagtcatcctacagtgctacagaacactagaacttatacctcctatctagttgtaattgtgtattttacaactttgaagtaggtgtaattatccctatttagactatacctgtatgaaacagaaattattttcattttacagatgaggaaacagacgcagagaagtaatttgtccaaagtccatagggttgtaagactcataacaagaactacaacttgggcctatctgaatcttatacttctggtactatacttgttcacaggtttgaaaagagctttaatttctattatttctcaagaatttgtaatgctttctcttgtcactgtgctttcaacttagaggagttgcagttttgataaaagacaaactgatttagcttctaggtttgttaaatatgtaattcagaggcaactccaggcttatatttctacgactgctttctaaatctaattattttataaatagtcctgttgctttaattcactttttaccctaacataattaatcaagtttaactttgaaatctccatattttatgtgaganctcccaaggctatccacttttattttcctttgtaaatttattgttgctcagcctatttcattaatggcagctttaattataatattttattatattttcaaagtgcatgataatggtttaccagtctggttagtacatcagagatttctattgggagctatcagagatgttaacatccaacaattttaccaaagtgtaattgttatagacgtcttaacatgaatttacgcaacaaaaatatgtttaatgtggagaacagtgagatgcatatttgataattcactgcagtctgcatcatcatctctatattccaaaatttcgtcttaagccgtttagtatttaacttacagaagaaagggggttatcttagataacttttaatatcctaaggtattttccaattcacgatacagggagaaaagaaatgtgtccaggcccttagaagaaaatactttgaatttaaatgtgacacatacattaaacccgcgtgacacgccaggcaggcggtggaagtcaagtgcatttgtttttgtttcatccaccagggcgatctctttcacaattctgggagaggcctgtttgttcctccactcccacagctgaagtttgggacaaagtttgagaaaatcccaggcacctgcggctcctatcgaagccggcgaggagcacagggtagagcgtctcttcccagttttcagtcttcagatcgcaggcctctcggacccgcagagcgagcttcacgctgcagcgcttgagaaataagagctattccaaggaggggccctgggtcctcactgacgcttcgcaaaggtgtacgtccgcccagggaaggccggcggcgcagcgacggcgaggagtccccatccatcttctcttcaagcagcagtagctgggttcgggtacccaaccgacgagccgagacgccagaggccagagtacgaagttggaagcctgcgccccaagccaaccgggattccacttagctccgcgcggtccgcgcctcggccggaagggggcgtggcttcgggcccgcgccgcgaggcccgccgccgagtgggggggtttctcccgggccgcagccgcgcgtttccggcgcgctcccccgcgccctccgtcctgtggtctcgcccgcccccgctgccatgttggattgtgcggccgccgccgccgctgcgggagggttgggggaggagttgggagtttagcgcagtcgccggagtgcgaggacaacgaccatccggccctagcctggccgggcgggtgccgggagcttccctttctcagcgcggcgcgaaggtggctcgccgtcagcgcctgcttccctcgacctcgtcctcctccccgctccggaggagctgcgagatgtggcgcctctgactccacttctccccgcccctgtcaccgagagggggaacgagctctcgcccactcgccggaggagacggccctggactcccaaccccgccggcgaaaccatgagctccgtccagcagcagccgccgccgccgcggagggtcaccaacgtggggtctctgttgctcaccccgcaggagaacgagtccctcttcactttcctcggcaagaaatgtgtgctgtatggtatcctatttgtatagctgaactgtgctttatttaatgaactatgtcttcagcagtggtgcagttatatgcagcagatcggaactgtatgtggtcaaagaagtgcagtggtgttgcttgtcttgttaaggacaatccacagagatcttattttttaagaatatttgacattaagagatgggttctgctgttttgcccagcctggattcaaactcctggactcaagtgatcctcctgcctcaggctcccaaagtgctgggattacaggcctgagccaccagtcccgggctaaattagtgcatcttaatgtctgcttccaagacagctgagagatatgacatgcttctgtcactagcagtggc

SEQ ID NO: 457090 - DNA, 6310 bp, Homo sapiens
  misc_feature (786)..(786): n is a, c, g, or t
tatgtatcaggtactttacatgtgatacctttttttaatgtcttataattttagtttaaaaaaattttaatacacaataactgtacatatttatgggggtacatagtgatgttgcaatacatataacatatagtgattagggtaattagcatatctatcatctcaaaaacttatgtctttgttttgggaacatgcaatatccttcttctagctatttgaaactatacaatattgttaactatagtcatcctacagtgctacagaacactagaacttatacctcctatctagttgtaattgtgtattttacaactttgaagtaggtgtaattatccctatttagactatacctgtatgaaacagaaattattttcattttacagatgaggaaacagacgcagagaagtaatttgtccaaagtccatagggttgtaagactcataacaagaactacaacttgggcctatctgaatcttatacttctggtactatacttgttcacaggtttgaaaagagctttaatttctattatttctcaagaatttgtaatgctttctcttgtcactgtgctttcaacttagaggagttgcagttttgataaaagacaaactgatttagcttctaggtttgttaaatatgtaattcagaggcaactccaggcttatatttctacgactgctttctaaatctaattattttataaatagtcctgttgctttaattcactttttaccctaacataattaatcaagtttaactttgaaatctccatattttatgtgaganctcccaaggctatccacttttattttcctttgtaaatttattgttgctcagcctatttcattaatggcagctttaattataatattttattatattttcaaagtgcatgataatggtttaccagtctggttagtacatcagagatttctattgggagctatcagagatgttaacatccaacaattttaccaaagtgtaattgttatagacgtcttaacatgaatttacgcaacaaaaatatgtttaatgtggagaacagtgagatgcatatttgataattcactgcagtctgcatcatcatctctatattccaaaatttcgtcttaagccgtttagtatttaacttacagaagaaagggggttatcttagataacttttaatatcctaaggtattttccaattcacgatacagggagaaaagaaatgtgtccaggcccttagaagaaaatactttgaatttaaatgtgacacatacattaaacccgcgtgacacgccaggcaggcggtggaagtcaagtgcatttgtttttgtttcatccaccagggcgatctctttcacaattctgggagaggcctgtttgttcctccactcccacagctgaagtttgggacaaagtttgagaaaatcccaggcacctgcggctcctatcgaagccggcgaggagcacagggtagagcgtctcttcccagttttcagtcttcagatcgcaggcctctcggacccgcagagcgagcttcacgctgcagcgcttgagaaataagagctattccaaggaggggccctgggtcctcactgacgcttcgcaaaggtgtacgtccgcccagggaaggccggcggcgcagcgacggcgaggagtccccatccatcttctcttcaagcagcagtagctgggttcgggtacccaaccgacgagccgagacgccagaggccagagtacgaagttggaagcctgcgccccaagccaaccgggattccacttagctccgcgcggtccgcgcctcggccggaagggggcgtggcttcgggcccgcgccgcgaggcccgccgccgagtgggggggtttctcccgggccgcagccgcgcgtttccggcgcgctcccccgcgccctccgtcctgtggtctcgcccgcccccgctgccatgttggattgtgcggccgccgccgccgctgcgggagggttgggggaggagttgggagtttagcgcagtcgccggagtgcgaggacaacgaccatccggccctagcctggccgggcgggtgccgggagcttccctttctcagcgcggcgcgaaggtggctcgccgtcagcgcctgcttccctcgacctcgtcctcctccccgctccggaggagctgcgagatgtggcgcctctgactccacttctccccgcccctgtcaccgagagggggaacgagctctcgcccactcgccggaggagacggccctggactcccaaccccgccggcgaaaccatgagctccgtccagcagcagccgccgccgccgcggagggtcaccaacgtggggtctctgttgctcaccccgcaggagaacgagtccctcttcactttcctcggcaagaaatgtgtgactatgtcttcagcagtggtgcagttatatgcagcagatcggaactgtatgtggtcaaagaagtgcagtggtgttgcttgtcttgttaaggacaatccacagagatcttattttttaagaatatttgacattaaggatgggaaactattgtgggaacaagagctatacaataactttgtatataatagtcctagaggatattttcatacctttgctggagatacttgtcaagttgctcttaattttgccaatgaagaagaagcaaaaaaatttcgaaaagcagttacagaccttttgggccgtcgacaaaggaaatctgagaaaagacgagatcccccaaatggtcctaatctacccatggctacagttgatataaaaaatccagaaatcacaacaaatagattttatggtccacaagtcaacaacatctcccataccaaagaaaagaagaagggaaaagctaaaaagaagagattaaccaaggcagatataggaacaccaagcaatttccagcacattggacatgttggttgggatccaaatacaggctctgatctgaataatttggatccagaattgaagaatcttttcgatatgtgtggaatcttagaggcacaacttaaagaaagagaaacattaaaagttatatatgactttattgaaaaaacaggaggtgttgaagctgttaaaaatgaactgcggaggcaagcaccaccacctccaccaccatcaaggggagggccacctcctcctcctccccctccacatagctcgggtcctcctcctcctcctgctaggggaagaggcgctcctcccccaccaccttcaagagctcccacagctgcacctccaccaccgcctccttccaggccaagtgtagaagtccctccaccaccgccaaataggatgtaccctcctccacctccagcccttccctcctcagcaccttcagggcctccaccaccacctccatctgtgttgggggtagggccagtggcaccacccccaccgcctccacctccacctcctcctgggccaccgcccccgcctggcctgccttctgatggggaccatcaggttccaactactgcaggaaacaaagcagctcttttagatcaaattagagagggtgctcagctaaaaaaagtggagcagaacagtcggccagtgtcctgctctggacgagatgcactgttagaccagatacgacagggtatccaactaaaatctgtggctgatggccaagagtctacaccaccaacacctgcacccacttcaggaattgtgggtgcattaatggaagtgatgcagaaaaggagcaaagccattcattcttcagatgaagatgaagatgaagatgatgaagaagattttgaggatgatgatgagtgggaagactgatctatatattatatatatatatatttttaaggtgaaatactaaacactactttctgtctgtggattcttttgcttttttttaatctgtgcaatacctcatttaatctgtaaaggtttgtcgtaatcctctacaaagctactccctgttattgtgtgcaagtttacaccaggatgctcacttgatttgtgaatatttttcattccatcaacaagggagtttaaatactatatgtgagactgacaaaaaccttaatgtaatttacttataatgccagaaggaaaacactattttcataccctactttttctgtacctaaattttcttaaaaaaaaatctagtatagcactacattcttttttaagtgatgcagaccttagtttctttagcccctttattttgaatacaatgctacatatgaatgttgaagctgatacattgcacagttctgtagacatcactacaccgatgtagtttctcaaattttagcaatatgctctacataaaatcactacagagatactagtggggaagacgattaacacacctcttacagtaatactgcctgttattggtatagcagtggtatttgcagactgggatcataaggagcccttaaatacttgttattgactggggttatttttatgctgtagcaaatgtgacaggctctttttagcaaaatttttgaaaatttttttggtattactctgaaacaaaatttaagttggagtttcagggatttagggagtagttttcattctacatgaactgaggtaatattatggtaactccaatatttggttaaaaaaactatacaaatcagaatagtactaaaatactgtagaattttagcatttttattttgcactttgtgtggattgaggtgttcagaaataccaaccataaaaatgtaatctagttggcaaaggtgtgcgctaaaacacggaaccgaacatgcattgatttggataacttttgagggtttttgtcaaatagcatgtgaagagttacatttttcttaaaagattggtggtcccaatgtcagagttcttggaacagataactgaatgatagattttttttttttaaagataaaactttacaacctgcacatttgttatgcatactaaatggtgtgttaaaattagggtttctttgcctctctacactacactaatctgcctaaaggtggttgtttcatatttataatgctaattatcatacctacctactttaaattttaggtagaaaattatctgatttaaatacaaacatatttttctcacattgagtaatatgcataatgtagttccaaatgtatttcattactatagtcacaatatccaactaaaaattacgctatctagaattgtaccaaccaaaatctcgtattggcagatcttgacaggctggacctgcaagatgtggcttgaattttaaccatttattacataatctctagtgatcatgcatctagttatcataagaaataatttaaaaggttttgttgctgaaagcagtaagtggtgcagtaaaatacttaagttattcaaagaatgttatctttcttgcaagagtaatttaagcacatgggaaagattctagactttttgtttcttgcaacaacagtgccctctgctgctagaaacctttttctacttactatcatttttattgtggcttgagctcagtcaatctggtgcagatgaggctggacaactactaaccaataaaatcaggagtttgtacaaaagttaaatggaacattataattattttaagtaatgttaattgaaaaaattttttctttttgacaatataaaaaacattttaaatttcctagaaatgtcttcagggtaatgccaatttaagatctctcttaacttgtggccaagaaattctagattttccagctgactttggtataatatatatttatcaggaacttctctcagcagagagtacccattcttcgagttcaaagcacaattttaaacatgtaaaatggatatataatttgccaaaggtaattaatttattctttttttcttaaagaagaaaaagacattggttgttgttacaaaaagtctaaattactgttggttgaaacacagcagctgtggagttcagtccaggcatgaagactaaatctgctttaccaagtaaggtgtaaggttgcatgtttcagtcctctaccatcctgcactgtgagcagcactatacctgtgcgttgtctgaaagccttccgtatattctccagctaaatggtcgtctggtagcctttgcatttaacaaactagcatgaggctttttatatctaaatgctacgtgatagacaatttcagctagccacatattgtatgtatgagattcataaagactttcaatcatttcattttcagacaactgaaattttgtttagtatgtgaattctttttttgaaatgtatagtgaataggatgttgcactggtggcaattcatcatggagcataataaaattaatttgacccaaatagaataaaaaaaaat

SEQ ID NO: 457091 - DNA, 6310 bp, Homo sapiens
  misc_feature (786)..(786): n is a, c, g, or t
tatgtatcaggtactttacatgtgatacctttttttaatgtcttataattttagtttaaaaaaattttaatacacaataactgtacatatttatgggggtacatagtgatgttgcaatacatataacatatagtgattagggtaattagcatatctatcatctcaaaaacttatgtctttgttttgggaacatgcaatatccttcttctagctatttgaaactatacaatattgttaactatagtcatcctacagtgctacagaacactagaacttatacctcctatctagttgtaattgtgtattttacaactttgaagtaggtgtaattatccctatttagactatacctgtatgaaacagaaattattttcattttacagatgaggaaacagacgcagagaagtaatttgtccaaagtccatagggttgtaagactcataacaagaactacaacttgggcctatctgaatcttatacttctggtactatacttgttcacaggtttgaaaagagctttaatttctattatttctcaagaatttgtaatgctttctcttgtcactgtgctttcaacttagaggagttgcagttttgataaaagacaaactgatttagcttctaggtttgttaaatatgtaattcagaggcaactccaggcttatatttctacgactgctttctaaatctaattattttataaatagtcctgttgctttaattcactttttaccctaacataattaatcaagtttaactttgaaatctccatattttatgtgaganctcccaaggctatccacttttattttcctttgtaaatttattgttgctcagcctatttcattaatggcagctttaattataatattttattatattttcaaagtgcatgataatggtttaccagtctggttagtacatcagagatttctattgggagctatcagagatgttaacatccaacaattttaccaaagtgtaattgttatagacgtcttaacatgaatttacgcaacaaaaatatgtttaatgtggagaacagtgagatgcatatttgataattcactgcagtctgcatcatcatctctatattccaaaatttcgtcttaagccgtttagtatttaacttacagaagaaagggggttatcttagataacttttaatatcctaaggtattttccaattcacgatacagggagaaaagaaatgtgtccaggcccttagaagaaaatactttgaatttaaatgtgacacatacattaaacccgcgtgacacgccaggcaggcggtggaagtcaagtgcatttgtttttgtttcatccaccagggcgatctctttcacaattctgggagaggcctgtttgttcctccactcccacagctgaagtttgggacaaagtttgagaaaatcccaggcacctgcggctcctatcgaagccggcgaggagcacagggtagagcgtctcttcccagttttcagtcttcagatcgcaggcctctcggacccgcagagcgagcttcacgctgcagcgcttgagaaataagagctattccaaggaggggccctgggtcctcactgacgcttcgcaaaggtgtacgtccgcccagggaaggccggcggcgcagcgacggcgaggagtccccatccatcttctcttcaagcagcagtagctgggttcgggtacccaaccgacgagccgagacgccagaggccagagtacgaagttggaagcctgcgccccaagccaaccgggattccacttagctccgcgcggtccgcgcctcggccggaagggggcgtggcttcgggcccgcgccgcgaggcccgccgccgagtgggggggtttctcccgggccgcagccgcgcgtttccggcgcgctcccccgcgccctccgtcctgtggtctcgcccgcccccgctgccatgttggattgtgcggccgccgccgccgctgcgggagggttgggggaggagttgggagtttagcgcagtcgccggagtgcgaggacaacgaccatccggccctagcctggccgggcgggtgccgggagcttccctttctcagcgcggcgcgaaggtggctcgccgtcagcgcctgcttccctcgacctcgtcctcctccccgctccggaggagctgcgagatgtggcgcctctgactccacttctccccgcccctgtcaccgagagggggaacgagctctcgcccactcgccggaggagacggccctggactcccaaccccgccggcgaaaccatgagctccgtccagcagcagccgccgccgccgcggagggtcaccaacgtggggtctctgttgctcaccccgcaggagaacgagtccctcttcactttcctcggcaagaaatgtgtgactatgtcttcagcagtggtgcagttatatgcagcagatcggaactgtatgtggtcaaagaagtgcagtggtgttgcttgtcttgttaaggacaatccacagagatcttattttttaagaatatttgacattaaggatgggaaactattgtgggaacaagagctatacaataactttgtatataatagtcctagaggatattttcatacctttgctggagatacttgtcaagttgctcttaattttgccaatgaagaagaagcaaaaaaatttcgaaaagcagttacagaccttttgggccgtcgacaaaggaaatctgagaaaagacgagatcccccaaatggtcctaatctacccatggctacagttgatataaaaaatccagaaatcacaacaaatagattttatggtccacaagtcaacaacatctcccataccaaagaaaagaagaagggaaaagctaaaaagaagagattaaccaaggcagatataggaacaccaagcaatttccagcacattggacatgttggttgggatccaaatacaggctctgatctgaataatttggatccagaattgaagaatcttttcgatatgtgtggaatcttagaggcacaacttaaagaaagagaaacattaaaagttatatatgactttattgaaaaaacaggaggtgttgaagctgttaaaaatgaactgcggaggcaagcaccaccacctccaccaccatcaaggggagggccacctcctcctcctccccctccacatagctcgggtcctcctcctcctcctgctaggggaagaggcgctcctcccccaccaccttcaagagctcccacagctgcacctccaccaccgcctccttccaggccaagtgtagaagtccctccaccaccgccaaataggatgtaccctcctccacctccagcccttccctcctcagcaccttcagggcctccaccaccacctccatctgtgttgggggtagggccagtggcaccacccccaccgcctccacctccacctcctcctgggccaccgcccccgcctggcctgccttctgatggggaccatcaggttccaactactgcaggaaacaaagcagctcttttagatcaaattagagagggtgctcagctaaaaaaagtggagcagaacagtcggccagtgtcctgctctggacgagatgcactgttagaccagatacgacagggtatccaactaaaatctgtggctgatggccaagagtctacaccaccaacacctgcacccacttcaggaattgtgggtgcattaatggaagtgatgcagaaaaggagcaaagccattcattcttcagatgaagatgaagatgaagatgatgaagaagattttgaggatgatgatgagtgggaagactgatctatatattatatatatatatatttttaaggtgaaatactaaacactactttctgtctgtggattctgtaaaattatcatgtaaatgttctaccaatttgctgtatatttttgttgccttttttgcttttttttaatctgtgcaatacctcatttaatctgtaaaggtttgtcgtaatcctctacaaagctactccctgttattgtgtgcaagtttacaccaggatgctcacttgatttgtgaatatttttcattccatcaacaagggagtttaaatactatatgtgagactgacaaaaaccttaatgtaatttacttataatgccagaaggaaaacactattttcataccctactttttctgtacctaaattttcttaaaaaaaaatctagtatagcactacattcttttttaagtgatgcagaccttagtttctttagcccctttattttgaatacaatgctacatatgaatgttgaagctgatacattgcacagttctgtagacatcactacaccgatgtagtttctcaaattttagcaatatgctctacataaaatcactacagagatactagtggggaagacgattaacacacctcttacagtaatactgcctgttattggtatagcagtggtatttgcagactgggatcataaggagcccttaaatacttgttattgactggggttatttttatgctgtagcaaatgtgacaggctctttttagcaaaatttttgaaaatttttttggtattactctgaaacaaaatttaagttggagtttcagggatttagggagtagttttcattctacatgaactgaggtaatattatggtaactccaatatttggttaaaaaaactatacaaatcagaatagtactaaaatactgtagaattttagcatttttattttgcactttgtgtggattgaggtgttcagaaataccaaccataaaaatgtaatctagttggcaaaggtgtgcgctaaaacacggaaccgaacatgcattgatttggataacttttgagggtttttgtcaaatagcatgtgaagagttacatttttcttaaaagattggtggtcccaatgtcagagttcttggaacagataactgaatgatagattttttttttttaaagataaaactttacaacctgcacatttgttatgcatactaaatggtgtgttaaaattagggtttctttgcctctctacactacactaatctgcctaaaggtggttgtttcatatttataatgctaattatcatacctacctactttaaattttaggtagaaaattatctgatttaaatacaaacatatttttctcacattgagtaatatgcataatgtagttccaaatgtatttcattactatagtcacaatatccaactaaaaattacgctatctagaattgtaccaaccaaaatctcgtattggcagatcttgacaggctggacctgcaagatgtggcttgaattttaaccatttattacataatctctagtgatcatgcatctagttatcataagaaataatttaaaaggttttgttgctgaaagcagtaagtggtgcagtaaaatacttaagttattcaaagaatgttatctttcttgcaagagtaatttaagcacatgggaaagattctagactttttgtttcttgcaacaacagtgccctctgctgctagaaacctttttctacttactatcatttttattgtggcttgagctcagtcaatctggtgcagatgaggctggacaactactaaccaataaaatcaggagtttgtacaaaagttaaatggaacattataattattttaagtaatgttaattgaaaaaattttttctttttgacaatataaaaaacattttaaatttcctagaaatgtcttcagggtaatgccaatttaagatctctcttaacttgtggccaagaaattctagattttccagctgactttggtataatatatatttatcaggaacttctctcagcagagagtacccattcttcgagttcaaagcacaattttaaacatgtaaaatggatatataatttgccaaaggtaattaatttattctttttttcttaaagaagaaaaagacattggttgttgttacaaaaagtctaaattactgttggttgaaacacagcagctgtggagttcagtccaggcatgaagactaaatctgctttaccaagtaaggtgtaaggttgcatgtttcagtcctctaccatcctgcactgtgagcagcactatacctgtgcgttgtctgaaagccttccgtatattctcctatatctaaatgctacgtgatagacaatttcagctagccacatattgtatgtatgagattcataaagactttcaatcatttcattttcagacaactgaaattttgtttagtatgtgaattctttttttgaaatgtatagtgaataggatgttgcactggtggcaattcatcatggagcataataaaattaatttgacccaaatagaataaaaaaaaat

SEQ ID NO: 457092 - DNA, 3776 bp, Homo sapiens
  misc_feature (786)..(786): n is a, c, g, or t
tatgtatcaggtactttacatgtgatacctttttttaatgtcttataattttagtttaaaaaaattttaatacacaataactgtacatatttatgggggtacatagtgatgttgcaatacatataacatatagtgattagggtaattagcatatctatcatctcaaaaacttatgtctttgttttgggaacatgcaatatccttcttctagctatttgaaactatacaatattgttaactatagtcatcctacagtgctacagaacactagaacttatacctcctatctagttgtaattgtgtattttacaactttgaagtaggtgtaattatccctatttagactatacctgtatgaaacagaaattattttcattttacagatgaggaaacagacgcagagaagtaatttgtccaaagtccatagggttgtaagactcataacaagaactacaacttgggcctatctgaatcttatacttctggtactatacttgttcacaggtttgaaaagagctttaatttctattatttctcaagaatttgtaatgctttctcttgtcactgtgctttcaacttagaggagttgcagttttgataaaagacaaactgatttagcttctaggtttgttaaatatgtaattcagaggcaactccaggcttatatttctacgactgctttctaaatctaattattttataaatagtcctgttgctttaattcactttttaccctaacataattaatcaagtttaactttgaaatctccatattttatgtgaganctcccaaggctatccacttttattttcctttgtaaatttattgttgctcagcctatttcattaatggcagctttaattataatattttattatattttcaaagtgcatgataatggtttaccagtctggttagtacatcagagatttctattgggagctatcagagatgttaacatccaacaattttaccaaagtgtaattgttatagacgtcttaacatgaatttacgcaacaaaaatatgtttaatgtggagaacagtgagatgcatatttgataattcactgcagtctgcatcatcatctctatattccaaaatttcgtcttaagccgtttagtatttaacttacagaagaaagggggttatcttagataacttttaatatcctaaggtattttccaattcacgatacagggagaaaagaaatgtgtccaggcccttagaagaaaatactttgaatttaaatgtgacacatacattaaacccgcgtgacacgccaggcaggcggtggaagtcaagtgcatttgtttttgtttcatccaccagggcgatctctttcacaattctgggagaggcctgtttgttcctccactcccacagctgaagtttgggacaaagtttgagaaaatcccaggcacctgcggctcctatcgaagccggcgaggagcacagggtagagcgtctcttcccagttttcagtcttcagatcgcaggcctctcggacccgcagagcgagcttcacgctgcagcgcttgagaaataagagctattccaaggaggggccctgggtcctcactgacgcttcgcaaaggtgtacgtccgcccagggaaggccggcggcgcagcgacggcgaggagtccccatccatcttctcttcaagcagcagtagctgggttcgggtacccaaccgacgagccgagacgccagaggccagagtacgaagttggaagcctgcgccccaagccaaccgggattccacttagctccgcgcggtccgcgcctcggccggaagggggcgtggcttcgggcccgcgccgcgaggcccgccgccgagtgggggggtttctcccgggccgcagccgcgcgtttccggcgcgctcccccgcgccctccgtcctgtggtctcgcccgcccccgctgccatgttggattgtgcggccgccgccgccgctgcgggagggttgggggaggagttgggagtttagcgcagtcgccggagtgcgaggacaacgaccatccggccctagcctggccgggcgggtgccgggagcttccctttctcagcgcggcgcgaaggtggctcgccgtcagcgcctgcttccctcgacctcgtcctcctccccgctccggaggagctgcgagatgtggcgcctctgactccacttctccccgcccctgtcaccgagagggggaacgagctctcgcccactcgccggaggagacggccctggactcccaaccccgccggcgaaaccatgagctccgtccagcagcagccgccgccgccgcggagggtcaccaacgtggggtctctgttgctcaccccgcaggagaacgagtccctcttcactttcctcggcaagaaatgtgtgactatgtcttcagcagtggtgcagttatatgcagcagatcggaactgtatgtggtcaaagaagtgcagtggtgttgcttgtcttgttaaggacaatccacagagatcttattttttaagaatatttgacattaaggatgggaaactattgtgggaacaagagctatacaataactttgtatataatagtcctagaggatattttcatacctttgctggagatacttgtcaagttgctcttaattttgccaatgaagaagaagcaaaaaaatttcgaaaagcagttacagaccttttgggccgtcgacaaaggaaatctgagaaaagacgagatcccccaaatggtcctaatctacccatggctacagttgatataaaaaatccagaaatcacaacaaatagattttatggtccacaagtcaacaacatctcccataccaaagaaaagaagaagggaaaagctaaaaagaagagattaaccaaggcagatataggaacaccaagcaatttccagcacattggacatgttggttgggatccaaatacaggctctgatctgaataatttggatccagaattgaagaatcttttcgatatgtgtggaatcttagaggcacaacttaaagaaagagaaacattaaaagttatatatgactttattgaaaaaacaggaggtgttgaagctgttaaaaatgaactgcggaggcaagcaccaccacctccaccaccatcaaggggagggccacctcctcctcctccccctccacatagctcgggtcctcctcctcctcctgctaggggaagaggcgctcctcccccaccaccttcaagagctcccacagctgcacctccaccaccgcctccttccaggccaagtgtagaagtccctccaccaccgccaaataggatgtaccctcctccacctccagcccttccctcctcagcaccttcagggcctccaccaccacctccatctgtgttgggggtagggccagtggcaccacccccaccgcctccacctccacctcctcctgggccaccgcccccgcctggcctgccttctgatggggaccatcaggttccaactactgcaggaaacaaagcagctcttttagatcaaattagagagggtgctcagctaaaaaaagtggagcagaacagtcggccagtgtcctgctctggacgagatgcactgttagaccagatacgacagggtatccaactaaaatctgtaagtaagcttttttttttttcattttagatcctttatcataatggaattttaaagtaatttattgaaagatatttttggtgtattcttttttcctcttgctaattcattcttaaccctataaatttatctctatagccatgtcccatatctctatatcctgtgggg

SEQ ID NO: 457093 - DNA, 6364 bp, Homo sapiens
  misc_feature (786)..(786): n is a, c, g, or t
tatgtatcaggtactttacatgtgatacctttttttaatgtcttataattttagtttaaaaaaattttaatacacaataactgtacatatttatgggggtacatagtgatgttgcaatacatataacatatagtgattagggtaattagcatatctatcatctcaaaaacttatgtctttgttttgggaacatgcaatatccttcttctagctatttgaaactatacaatattgttaactatagtcatcctacagtgctacagaacactagaacttatacctcctatctagttgtaattgtgtattttacaactttgaagtaggtgtaattatccctatttagactatacctgtatgaaacagaaattattttcattttacagatgaggaaacagacgcagagaagtaatttgtccaaagtccatagggttgtaagactcataacaagaactacaacttgggcctatctgaatcttatacttctggtactatacttgttcacaggtttgaaaagagctttaatttctattatttctcaagaatttgtaatgctttctcttgtcactgtgctttcaacttagaggagttgcagttttgataaaagacaaactgatttagcttctaggtttgttaaatatgtaattcagaggcaactccaggcttatatttctacgactgctttctaaatctaattattttataaatagtcctgttgctttaattcactttttaccctaacataattaatcaagtttaactttgaaatctccatattttatgtgaganctcccaaggctatccacttttattttcctttgtaaatttattgttgctcagcctatttcattaatggcagctttaattataatattttattatattttcaaagtgcatgataatggtttaccagtctggttagtacatcagagatttctattgggagctatcagagatgttaacatccaacaattttaccaaagtgtaattgttatagacgtcttaacatgaatttacgcaacaaaaatatgtttaatgtggagaacagtgagatgcatatttgataattcactgcagtctgcatcatcatctctatattccaaaatttcgtcttaagccgtttagtatttaacttacagaagaaagggggttatcttagataacttttaatatcctaaggtattttccaattcacgatacagggagaaaagaaatgtgtccaggcccttagaagaaaatactttgaatttaaatgtgacacatacattaaacccgcgtgacacgccaggcaggcggtggaagtcaagtgcatttgtttttgtttcatccaccagggcgatctctttcacaattctgggagaggcctgtttgttcctccactcccacagctgaagtttgggacaaagtttgagaaaatcccaggcacctgcggctcctatcgaagccggcgaggagcacagggtagagcgtctcttcccagttttcagtcttcagatcgcaggcctctcggacccgcagagcgagcttcacgctgcagcgcttgagaaataagagctattccaaggaggggccctgggtcctcactgacgcttcgcaaaggtgtacgtccgcccagggaaggccggcggcgcagcgacggcgaggagtccccatccatcttctcttcaagcagcagtagctgggttcgggtacccaaccgacgagccgagacgccagaggccagagtacgaagttggaagcctgcgccccaagccaaccgggattccacttagctccgcgcggtccgcgcctcggccggaagggggcgtggcttcgggcccgcgccgcgaggcccgccgccgagtgggggggtttctcccgggccgcagccgcgcgtttccggcgcgctcccccgcgccctccgtcctgtggtctcgcccgcccccgctgccatgttggattgtgcggccgccgccgccgctgcgggagggttgggggaggagttgggagtttagcgcagtcgccggagtgcgaggacaacgaccatccggccctagcctggccgggcgggtgccgggagcttccctttctcagcgcggcgcgaaggtggctcgccgtcagcgcctgcttccctcgacctcgtcctcctccccgctccggaggagctgcgagatgtggcgcctctgactccacttctccccgcccctgtcaccgagagggggaacgagctctcgcccactcgccggaggagacggccctggactcccaaccccgccggcgaaaccatgagctccgtccagcagcagccgccgccgccgcggagggtcaccaacgtggggtctctgttgctcaccccgcaggagaacgagtccctcttcactttcctcggcaagaaatgtgtgactatgtcttcagcagtggtgcagttatatgcagcagatcggaactgtatgtggtcaaagaagtgcagtggtgttgcttgtcttgttaaggacaatccacagagatcttattttttaagaatatttgacattaaggatgggaaactattgtgggaacaagagctatacaataactttgtatataatagtcctagaggatattttcatacctttgctggagatacttgtcaagttgctcttaattttgccaatgaagaagaagcaaaaaaatttcgaaaagcagttacagaccttttgggccgtcgacaaaggaaatctgagaaaagacgagatcccccaaatggtcctaatctacccatggctacagttgatataaaaaatccagaaatcacaacaaatagattttatggtccacaagtcaacaacatctcccataccaaagaaaagaagaagggaaaagctaaaaagaagagattaaccaaggcagatataggaacaccaagcaatttccagcacattggacatgttggttgggatccaaatacaggctctgatctgaataatttggatccagaattgaagaatcttttcgatatgtgtggaatcttagaggcacaacttaaagaaagagaaacattaaaagttatatatgactttattgaaaaaacaggaggtgttgaagctgttaaaaatgaactgcggaggcaagcaccaccacctccaccaccatcaaggggagggccacctcctcctcctccccctccacatagctcgggtcctcctcctcctcctgctaggggaagaggcgctcctcccccaccaccttcaagagctcccacagctgcacctccaccaccgcctccttccaggccaagtgtagaagtccctccaccaccgccaaataggatgtaccctcctccacctccagcccttccctcctcagcaccttcagggcctccaccaccacctccatctgtgttgggggtagggccagtggcaccacccccaccgcctccacctccacctcctcctgggccaccgcccccgcctggcctgccttctgatggggaccatcaggttccaactactgcaggaaacaaagcagctcttttagatcaaattagagagggtgctcagctaaaaaaagtggagcagaacagtcggccagtgtcctgctctggacgagatgcactgttagaccagatacgacagggtatccaactaaaatctgtggctgatggccaagagtctacaccaccaacacctgcacccacttcaggaattgtgggtgcattaatggaagtgatgcagaaaaggagcaaagccattcattcttcagatgaagatgaagatgaagatgatgaagaagattttgaggatgatgatgagtgggaagactgatctatatattatatatatatatatttttaaggtgaaatactaaacactactttctgtctgtggattctgtaaaattatcatgtaaatgttctaccaatttgctgtatatttttgttgccttttttgcttttttttaatctgtgcaatacctcatttaatctgtaaaggtttgtcgtaatcctctacaaagctactccctgttattgtgtgcaagtttacaccaggatgctcacttgatttgtgaatatttttcattccatcaacaagggagtttaaatactatatgtgagactgacaaaaaccttaatgtaatttacttataatgccagaaggaaaacactattttcataccctactttttctgtacctaaattttcttaaaaaaaaatctagtatagcactacattcttttttaagtgatgcagaccttagtttctttagcccctttattttgaatacaatgctacatatgaatgttgaagctgatacattgcacagttctgtagacatcactacaccgatgtagtttctcaaattttagcaatatgctctacataaaatcactacagagatactagtggggaagacgattaacacacctcttacagtaatactgcctgttattggtatagcagtggtatttgcagactgggatcataaggagcccttaaatacttgttattgactggggttatttttatgctgtagcaaatgtgacaggctctttttagcaaaatttttgaaaatttttttggtattactctgaaacaaaatttaagttggagtttcagggatttagggagtagttttcattctacatgaactgaggtaatattatggtaactccaatatttggttaaaaaaactatacaaatcagaatagtactaaaatactgtagaattttagcatttttattttgcactttgtgtggattgaggtgttcagaaataccaaccataaaaatgtaatctagttggcaaaggtgtgcgctaaaacacggaaccgaacatgcattgatttggataacttttgagggtttttgtcaaatagcatgtgaagagttacatttttcttaaaagattggtggtcccaatgtcagagttcttggaacagataactgaatgatagattttttttttttaaagataaaactttacaacctgcacatttgttatgcatactaaatggtgtgttaaaattagggtttctttgcctctctacactacactaatctgcctaaaggtggttgtttcatatttataatgctaattatcatacctacctactttaaattttaggtagaaaattatctgatttaaatacaaacatatttttctcacattgagtaatatgcataatgtagttccaaatgtatttcattactatagtcacaatatccaactaaaaattacgctatctagaattgtaccaaccaaaatctcgtattggcagatcttgacaggctggacctgcaagatgtggcttgaattttaaccatttattacataatctctagtgatcatgcatctagttatcataagaaataatttaaaaggttttgttgctgaaagcagtaagtggtgcagtaaaatacttaagttattcaaagaatgttatctttcttgcaagagtaatttaagcacatgggaaagattctagactttttgtttcttgcaacaacagtgccctctgctgctagaaacctttttctacttactatcatttttattgtggcttgagctcagtcaatctggtgcagatgaggctggacaactactaaccaataaaatcaggagtttgtacaaaagttaaatggaacattataattattttaagtaatgttaattgaaaaaattttttctttttgacaatataaaaaacattttaaatttcctagaaatgtcttcagggtaatgccaatttaagatctctcttaacttgtggccaagaaattctagattttccagctgactttggtataatatatatttatcaggaacttctctcagcagagagtacccattcttcgagttcaaagcacaattttaaacatgtaaaatggatatataatttgccaaaggtaattaatttattctttttttcttaaagaagaaaaagacattggttgttgttacaaaaagtctaaattactgttggttgaaacacagcagctgtggagttcagtccaggcatgaagactaaatctgctttaccaagtaaggtgtaaggttgcatgtttcagtcctctaccatcctgcactgtgagcagcactatacctgtgcgttgtctgaaagccttccgtatattctccagctaaatggtcgtctggtagcctttgcatttaacaaactagcatgaggctttttatatctaaatgctacgtgatagacaatttcagctagccacatattgtatgtatgagattcataaagactttcaatcatttcattttcagacaactgaaattttgtttagtatgtgaattctttttttgaaatgtatagtgaataggatgttgcactggtggcaattcatcatggagcataataaaattaatttgacccaaatagaataaaaaaaaat

SEQ ID NO: 457094 - DNA, 6364 bp, Homo sapiens
  misc_feature (786)..(786): n is a, c, g, or t
tatgtatcaggtactttacatgtgatacctttttttaatgtcttataattttagtttaaaaaaattttaatacacaataactgtacatatttatgggggtacatagtgatgttgcaatacatataacatatagtgattagggtaattagcatatctatcatctcaaaaacttatgtctttgttttgggaacatgcaatatccttcttctagctatttgaaactatacaatattgttaactatagtcatcctacagtgctacagaacactagaacttatacctcctatctagttgtaattgtgtattttacaactttgaagtaggtgtaattatccctatttagactatacctgtatgaaacagaaattattttcattttacagatgaggaaacagacgcagagaagtaatttgtccaaagtccatagggttgtaagactcataacaagaactacaacttgggcctatctgaatcttatacttctggtactatacttgttcacaggtttgaaaagagctttaatttctattatttctcaagaatttgtaatgctttctcttgtcactgtgctttcaacttagaggagttgcagttttgataaaagacaaactgatttagcttctaggtttgttaaatatgtaattcagaggcaactccaggcttatatttctacgactgctttctaaatctaattattttataaatagtcctgttgctttaattcactttttaccctaacataattaatcaagtttaactttgaaatctccatattttatgtgaganctcccaaggctatccacttttattttcctttgtaaatttattgttgctcagcctatttcattaatggcagctttaattataatattttattatattttcaaagtgcatgataatggtttaccagtctggttagtacatcagagatttctattgggagctatcagagatgttaacatccaacaattttaccaaagtgtaattgttatagacgtcttaacatgaatttacgcaacaaaaatatgtttaatgtggagaacagtgagatgcatatttgataattcactgcagtctgcatcatcatctctatattccaaaatttcgtcttaagccgtttagtatttaacttacagaagaaagggggttatcttagataacttttaatatcctaaggtattttccaattcacgatacagggagaaaagaaatgtgtccaggcccttagaagaaaatactttgaatttaaatgtgacacatacattaaacccgcgtgacacgccaggcaggcggtggaagtcaagtgcatttgtttttgtttcatccaccagggcgatctctttcacaattctgggagaggcctgtttgttcctccactcccacagctgaagtttgggacaaagtttgagaaaatcccaggcacctgcggctcctatcgaagccggcgaggagcacagggtagagcgtctcttcccagttttcagtcttcagatcgcaggcctctcggacccgcagagcgagcttcacgctgcagcgcttgagaaataagagctattccaaggaggggccctgggtcctcactgacgcttcgcaaaggtgtacgtccgcccagggaaggccggcggcgcagcgacggcgaggagtccccatccatcttctcttcaagcagcagtagctgggttcgggtacccaaccgacgagccgagacgccagaggccagagtacgaagttggaagcctgcgccccaagccaaccgggattccacttagctccgcgcggtccgcgcctcggccggaagggggcgtggcttcgggcccgcgccgcgaggcccgccgccgagtgggggggtttctcccgggccgcagccgcgcgtttccggcgcgctcccccgcgccctccgtcctgtggtctcgcccgcccccgctgccatgttggattgtgcggccgccgccgccgctgcgggagggttgggggaggagttgggagtttagcgcagtcgccggagtgcgaggacaacgaccatccggccctagcctggccgggcgggtgccgggagcttccctttctcagcgcggcgcgaaggtggctcgccgtcagcgcctgcttccctcgacctcgtcctcctccccgctccggaggagctgcgagatgtggcgcctctgactccacttctccccgcccctgtcaccgagagggggaacgagctctcgcccactcgccggaggagacggccctggactcccaaccccgccggcgaaaccatgagctccgtccagcagcagccgccgccgccgcggagggtcaccaacgtggggtctctgttgctcaccccgcaggagaacgagtccctcttcactttcctcggcaagaaatgtgtgactatgtcttcagcagtggtgcagttatatgcagcagatcggaactgtatgtggtcaaagaagtgcagtggtgttgcttgtcttgttaaggacaatccacagagatcttattttttaagaatatttgacattaaggatgggaaactattgtgggaacaagagctatacaataactttgtatataatagtcctagaggatattttcatacctttgctggagatacttgtcaagttgctcttaattttgccaatgaagaagaagcaaaaaaatttcgaaaagcagttacagaccttttgggccgtcgacaaaggaaatctgagaaaagacgagatcccccaaatggtcctaatctacccatggctacagttgatataaaaaatccagaaatcacaacaaatagattttatggtccacaagtcaacaacatctcccataccaaagaaaagaagaagggaaaagctaaaaagaagagattaaccaaggcagatataggaacaccaagcaatttccagcacattggacatgttggttgggatccaaatacaggctctgatctgaataatttggatccagaattgaagaatcttttcgatatgtgtggaatcttagaggcacaacttaaagaaagagaaacattaaaagttatatatgactttattgaaaaaacaggaggtgttgaagctgttaaaaatgaactgcggaggcaagcaccaccacctccaccaccatcaaggggagggccacctcctcctcctccccctccacatagctcgggtcctcctcctcctcctgctaggggaagaggcgctcctcccccaccaccttcaagagctcccacagctgcacctccaccaccgcctccttccaggccaagtgtagaagtccctccaccaccgccaaataggatgtaccctcctccacctccagcccttccctcctcagcaccttcagggcctccaccaccacctccatctgtgttgggggtagggccagtggcaccacccccaccgcctccacctccacctcctcctgggccaccgcccccgcctggcctgccttctgatggggaccatcaggttccaactactgcaggaaacaaagcagctcttttagatcaaattagagagggtgctcagctaaaaaaagtggagcagaacagtcggccagtgtcctgctctggacgagatgcactgttagaccagatacgacagggtatccaactaaaatctgtggctgatggccaagagtctacaccaccaacacctgcacccacttcaggaattgtgggtgcattaatggaagtgatgcagaaaaggagcaaagccattcattcttcagatgaagatgaagatgaagatgatgaagaagattttgaggatgatgatgagtgggaagactgatctatatattatatatatatatatttttaaggtgaaatactaaacactactttctgtctgtggattctgtaaaattatcatgtaaatgttctaccaatttgctgtatatttttgttgccttttttgcttttttttaatctgtgcaatacctcatttaatctgtaaaggtttgtcgtaatcctctacaaagctactccctgttattgtgtgcaagtttacaccaggatgctcacttgatttgtgaatatttttcattccatcaacaagggagtttaaatactatatgtgagactgacaaaaaccttaatgtaatttacttataatgccagaaggaaaacactattttcataccctactttttctgtacctaaattttcttaaaaaaaaatctagtatagcactacattcttttttaagtgatgcagaccttagtttctttagcccctttattttgaatacaatgctacatatgaatgttgaagctgatacattgcacagttctgtagacatcactacaccgatgtagtttctcaaattttagcaatatgctctacataaaatcactacagagatactagtggggaagacgattaacacacctcttacagtaatactgcctgttattggtatagcagtggtatttgcagactgggatcataaggagcccttaaatacttgttattgactggggttatttttatgctgtagcaaatgtgacaggctctttttagcaaaatttttgaaaatttttttggtattactctgaaacaaaatttaagttggagtttcagggatttagggagtagttttcattctacatgaactgaggtaatattatggtaactccaatatttggttaaaaaaactatacaaatcagaatagtactaaaatactgtagaattttagcatttttattttgcactttgtgtggattgaggtgttcagaaataccaaccataaaaatgtaatctagttggcaaaggtgtgcgctaaaacacggaaccgaacatgcattgatttggataacttttgagggtttttgtcaaatagcatgtgaagagttacatttttcttaaaagattggtggtcccaatgtcagagttcttggaacagataactgaatgatagattttttttttttaaagataaaactttacaacctgcacatttgttatgcatactaaatggtgtgttaaaattagggtttctttgcctctctacactacactaatctgcctaaaggtggttgtttcatatttataatgctaattatcatacctacctactttaaattttaggtagaaaattatctgatttaaatacaaacatatttttctcacattgagtaatatgcataatgtagttccaaatgtatttcattactatagtcacaatatccaactaaaaattacgctatctagaattgtaccaaccaaaatctcgtattggcagatcttgacaggctggacctgcaagatgtggcttgaattttaaccatttattacataatctctagtgatcatgcatctagttatcataagaaataatttaaaaggttttgttgctgaaagcagtaagtggtgcagtaaaatacttaagttattcaaagaatgttatctttcttgcaagagtaatttaagcacatgggaaagattctagactttttgtttcttgcaacaacagtgccctctgctgctagaaacctttttctacttactatcatttttattgtggcttgagctcagtcaatctggtgcagatgaggctggacaactactaaccaataaaatcaggagtttgtacaaaagttaaatggaacattataattattttaagtaatgttaattgaaaaaattttttctttttgacaatataaaaaacattttaaatttcctagaaatgtcttcagggtaatgccaatttaagatctctcttaacttgtggccaagaaattctagattttccagctgactttggtataatatatatttatcaggaacttctctcagcagagagtacccattcttcgagttcaaagcacaattttaaacatgtaaaatggatatataatttgccaaaggtaattaatttattctttttttcttaaagaagaaaaagacattggttgttgttacaaaaagtctaaattactgttggttgaaacacagcagctgtggagttcagtccaggcatgaagactaaatctgctttaccaagtaaggtgtaaggttgcatgtttcagtcctctaccatcctgcactgtgagcagcactatacctgtgcgttgtctgaaagccttccgtatattctccagctaaatggtcgtctggtagcctttgcatttaacaaactagcatgaggctttttatatctaaatgctacgtgatagacaatttcagctagccacatattgtatgtatctggtggtgggcgcctgtagtcccagtcactcaggagcctgaggcaggagaatggtgttgacccatcagtttttgaaatgtatagtgaataggatgttgcactggtggcaattcatcatggagcataataaaattaatttgacccaaatagaataaaaaaaaat

SEQ ID NO: 457095 - DNA, 4237 bp, Homo sapiens
taagaatttttgtgttttaaatttttaaattctatacttctgatagtcaaggtgtatgcgtactggtggggaaaatatcatttgacttaaggatgccagttctggaaaaaatggtagtaataattttaagtaccctttttcttcttgactaataaagttgaaacaaagagttaaggctatatttctttgttaaatttaaaacaaaaatagatactttactttctttatccttgttacaagatatgtttcactttactgttgagcaatgtgttggatatgaggctattataatcaaaatttaagagattagactaattatatttaaattctagctggaagttcatattctttatgaaatttaatggcataaaaatgtaagtttgctttgaaatagtgcatctacactcatttcaagaacttaacaggttttagaaatttaggcagcactttatgaaaaaaatgtagaagtttaaaatataaataatttataatgaagtgatcctatttcagaaaaagtatttaaattgtaaattatgattgtatatcagttatcttaaattatatcccttttatataatttggttttatttgcaggtcctaatctacccatggctacagttgatataaaaaatccagaaatcacaacaaatagattttatggtccacaagtcaacaacatctcccataccaaagaaaagaagaagggaaaagctaaaaagaagagattaaccaaggcagatataggaacaccaagcaatttccagcacattggacatgttggttgggatccaaatacaggctctgatctgaataatttggatccagaattgaagaatcttttcgatatgtgtggaatcttagaggcacaacttaaagaaagagaaacattaaaagttatatatgactttattgaaaaaacaggaggtgttgaagctgttaaaaatgaactgcggaggcaagcaccaccacctccaccaccatcaaggggagggccacctcctcctcctccccctccacatagctcgggtcctcctcctcctcctgctaggggaagaggcgctcctcccccaccaccttcaagagctcccacagctgcacctccaccaccgcctccttccaggccaagtgtagaagtccctccaccaccgccaaataggatgtaccctcctccacctccagcccttccctcctcagcaccttcagggcctccaccaccacctccatctgtgttgggggtagggccagtggcaccacccccaccgcctccacctccacctcctcctgggccaccgcccccgcctggcctgccttctgatggggaccatcaggttccaactactgcaggaaacaaagcagctcttttagatcaaattagagagggtgctcagctaaaaaaagtggagcagaacagtcggccagtgtcctgctctggacgagatgcactgttagaccagatacgacagggtatccaactaaaatctgtggctgatggccaagagtctacaccaccaacacctgcacccacttcaggaattgtgggtgcattaatggaagtgatgcagaaaaggagcaaagccattcattcttcagatgaagatgaagatgaagatgatgaagaagattttgaggatgatgatgagtgggaagactgatctatatattatatatatatatatttttaaggtgaaatactaaacactactttctgtctgtggattctgtaaaattatcatgtaaatgttctaccaatttgctgtatatttttgttgccttttttgcttttttttaatctgtgcaatacctcatttaatctgtaaaggtttgtcgtaatcctctacaaagctactccctgttattgtgtgcaagtttacaccaggatgctcacttgatttgtgaatatttttcattccatcaacaagggagtttaaatactatatgtgagactgacaaaaaccttaatgtaatttacttataatgccagaaggaaaacactattttcataccctactttttctgtacctaaattttcttaaaaaaaaatctagtatagcactacattcttttttaagtgatgcagaccttagtttctttagcccctttattttgaatacaatgctacatatgaatgttgaagctgatacattgcacagttctgtagacatcactacaccgatgtagtttctcaaattttagcaatatgctctacataaaatcactacagagatactagtggggaagacgattaacacacctcttacagtaatactgcctgttattggtatagcagtggtatttgcagactgggatcataaggagcccttaaatacttgttattgactggggttatttttatgctgtagcaaatgtgacaggctctttttagcaaaatttttgaaaatttttttggtattactctgaaacaaaatttaagttggagtttcagggatttagggagtagttttcattctacatgaactgaggtaatattatggtaactccaatatttggttaaaaaaactatacaaatcagaatagtactaaaatactgtagaattttagcatttttattttgcactttgtgtggattgaggtgttcagaaataccaaccataaaaatgtaatctagttggcaaaggtgtgcgctaaaacacggaaccgaacatgcattgatttggataacttttgagggtttttgtcaaatagcatgtgaagagttacatttttcttaaaagattggtggtcccaatgtcagagttcttggaacagataactgaatgatagattttttttttttaaagataaaactttacaacctgcacatttgttatgcatactaaatggtgtgttaaaattagggtttctttgcctctctacactacactaatctgcctaaaggtggttgtttcatatttataatgctaattatcatacctacctactttaaattttaggtagaaaattatctgatttaaatacaaacatatttttctcacattgagtaatatgcataatgtagttccaaatgtatttcattactatagtcacaatatccaactaaaaattacgctatctagaattgtaccaaccaaaatctcgtattggcagatcttgacaggctggacctgcaagatgtggcttgaattttaaccatttattacataatctctagtgatcatgcatctagttatcataagaaataatttaaaaggttttgttgctgaaagcagtaagtggtgcagtaaaatacttaagttattcaaagaatgttatctttcttgcaagagtaatttaagcacatgggaaagattctagactttttgtttcttgcaacaacagtgccctctgctgctagaaacctttttctacttactatcatttttattgtggcttgagctcagtcaatctggtgcagatgaggctggacaactactaaccaataaaatcaggagtttgtacaaaagttaaatggaacattataattattttaagtaatgttaattgaaaaaattttttctttttgacaatataaaaaacattttaaatttcctagaaatgtcttcagggtaatgccaatttaagatctctcttaacttgtggccaagaaattctagattttccagctgactttggtataatatatatttatcaggaacttctctcagcagagagtacccattcttcgagttcaaagcacaattttaaacatgtaaaatggatatataatttgccaaaggtaattaatttattctttttttcttaaagaagaaaaagacattggttgttgttacaaaaagtctaaattactgttggttgaaacacagcagctgtggagttcagtccaggcatgaagactaaatctgctttaccaagtaaggtgtaaggttgcatgtttcagtcctctaccatcctgcactgtgagcagcactatacctgtgcgttgtctgaaagccttccgtatattctccagctaaatggtcgtctggtagcctttgcatttaacaaactagcatgaggctttttatatctaaatgctacgtgatagacaatttcagctagccacatattgtatgtatgagattcataaagactttcaatcatttcattttcagacaactgaaattttgtttagtatgtgaattctttttttgaaatgtatagtgaataggatgttgcactggtggcaattcatcatggagcataataaaattaatttgacccaaatagaataaaaaaaaat

SEQ ID NO: 457096 - DNA, 1966 bp, Homo sapiens
aaggctgtaccgcccggaatatgggatcgcaggtcgccccggccgggcgggcggggtcgcgcctggtggcggtccccgcgccgaggcgccgctagggcgggcgggggtcgggacgccgggctaggggcgcgtcatgtggccgctcacggtcccgccgccgctgctgctgctgctgtgctcaggcctggccggacagactctcttccagaacccagaagagggctggcagctgtacacctcagcccaggcccctgacgggaaatgcatctgcacggccgtgatcccagcgcagagtacctgctctcgagatggcaggagtcgggagctgcggcaactgatggagaaggtccagaacgtctcccagtccatggaggtccttgagttgcggacgtatcgcgacctccagtatgtacgcggcatggagaccctcatgcggagcctggatgcgcggctccgggcagctgatgggtccctctcggccaagagcttccaggagctgaaggacaggatgacggaactgttgcccctgagctcggtcctggagcagtacaaggcagacacgcggaccattgtacgcttgcgggaggaggtgaggaatctctccggcagtctggcggccattcaggaggagatgggtgcctacgggtatgaggacctgcagcaacgggtgatggccctggaggcccggctccacgcctgcgcccagaagctgggctgtgggaagctgaccggggtcagtaaccccatcaccgttcgggccatggggtcccgcttcggctcctggatgactgacacgatggcccccagtgcggatagccgggtctggtacatggatggctattacaaaggccgccgggtcctggagttccgtaccctgggagacttcatcaaaggccagaactttatccagcacctgctgccccagccgtgggcgggcacgggccacgtggtgtacaacggctccctgttctataacaagtaccagagcaacgtggtggtcaaataccacttccgctcgcgctctgtgctggtgcagaggagcctcccgggcgccggttacaacaacaccttcccctactcctggggcggcttctccgacatggacttcatggtggacgagagcgggctctgggctgtgtacaccaccaaccagaacgcgggcaacatcgtggtcagccggctggacccgcacaccctcgaggtcatgcggtcctgggacaccggctaccccaagcgcagcgctggcgaggccttcatgatctgcggtgtgctctacgtgaccaactcccacctggctggggccaaggtctacttcgcctattttaccaacacgtccagttacgagtacacggacgtgcccttccacaaccagtattcccacatctcgatgctggattacaacccccgggagcgcgccctctatacctggaacaacggccaccaggtgctctacaatgtcaccctgtttcacgtcatcagcacctctggggacccctgagccaatgctgtggctcgggctgctgcctggggggcctccgggggctgggggcccttttcattctgcctgtgtccctcaagggtgatctctctgtctctgtcacgccctttctccccgcctttttgctgggcttttgttctctgcctatgtatttctgtctattttttcaatttcccctcttctcctttattgatctctgcttttaatacaccacttctttctttctgcctttttatggatgtctttttctttttatggctctggttctccagttctttccgtctctgcctctctctgtctctctctctctgtccttccacccctccctccttgcttcccacccattcctcatccctcactcccacccccacccccacccccaggagttgagtgcatggatctgtttctttttttatttacactttttctttccggtttgccggaataaacaggacctttgacatttga

SEQ ID NO: 457097 - DNA, 1993 bp, Homo sapiens
cgcctgggtgtcgagggaccgagcgccccgcggcgggccagagaagggacgcgcggcgggcggccgcggggcatgaggcggaggcgcgatgtcggtgccgctgctcaagatcggggccgtgctgagcaccatggccatggtcaccaactggatgtcgcagacgctgccctcgctcgtggggctcaacggcaccgtgtcccgtgcgggcgcctctgagaaaatcactctcttccagaacccagaagagggctggcagctgtacacctcagcccaggcccctgacgggaaatgcatctgcacggccgtgatcccagcgcagagtacctgctctcgagatggcaggagtcgggagctgcggcaactgatggagaaggtccagaacgtctcccagtccatggaggtccttgagttgcggacgtatcgcgacctccagtatgtacgcggcatggagaccctcatgcggagcctggatgcgcggctccgggcagctgatgggtccctctcggccaagagcttccaggagctgaaggacaggatgacggaactgttgcccctgagctcggtcctggagcagtacaaggcagacacgcggaccattgtacgcttgcgggaggaggtgaggaatctctccggcagtctggcggccattcaggaggagatgggtgcctacgggtatgaggacctgcagcaacgggtgatggccctggaggcccggctccacgcctgcgcccagaagctgggctgtgggaagctgaccggggtcagtaaccccatcaccgttcgggccatggggtcccgcttcggctcctggatgactgacacgatggcccccagtgcggatagccgggtctggtacatggatggctattacaaaggccgccgggtcctggagttccgtaccctgggagacttcatcaaaggccagaactttatccagcacctgctgccccagccgtgggcgggcacgggccacgtggtgtacaacggctccctgttctataacaagtaccagagcaacgtggtggtcaaataccacttccgctcgcgctctgtgctggtgcagaggagcctcccgggcgccggttacaacaacaccttcccctactcctggggcggcttctccgacatggacttcatggtggacgagagcgggctctgggctgtgtacaccaccaaccagaacgcgggcaacatcgtggtcagccggctggacccgcacaccctcgaggtcatgcggtcctgggacaccggctaccccaagcgcagcgctggcgaggccttcatgatctgcggtgtgctctacgtgaccaactcccacctggctggggccaaggtctacttcgcctattttaccaacacgtccagttacgagtacacggacgtgcccttccacaaccagtattcccacatctcgatgctggattacaacccccgggagcgcgccctctatacctggaacaacggccaccaggtgctctacaatgtcaccctgtttcacgtcatcagcacctctggggacccctgagccaatgctgtggctcgggctgctgcctggggggcctccgggggctgggggcccttttcattctgcctgtgtccctcaagggtgatctctctgtctctgtcacgccctttctccccgcctttttgctgggcttttgttctctgcctatgtatttctgtctattttttcaatttcccctcttctcctttattgatctctgcttttaatacaccacttctttctttctgcctttttatggatgtctttttctttttatggctctggttctccagttctttccgtctctgcctctctctgtctctctctctctgtccttccacccctccctccttgcttcccacccattcctcatccctcactcccacccccacccccacccccaggagttgagtgcatggatctgtttctttttttatttacactttttctttccggtttgccggaataaacaggacctttgacatttga

SEQ ID NO: 457098 - DNA, 1670 bp, Homo sapiens
agatccgccacaactcaaggacctccatggactgggagacgttctggaccgtccagaacgtctcccagtccatggaggtccttgagttgcggacgtatcgcgacctccagtatgtacgcggcatggagaccctcatgcggagcctggatgcgcggctccgggcagctgatgggtccctctcggccaagagcttccaggagctgaaggacaggatgacggaactgttgcccctgagctcggtcctggagcagtacaaggcagacacgcggaccattgtacgcttgcgggaggaggtgaggaatctctccggcagtctggcggccattcaggaggagatgggtgcctacgggtatgaggacctgcagcaacgggtgatggccctggaggcccggctccacgcctgcgcccagaagctgggctgtgggaagctgaccggggtcagtaaccccatcaccgttcgggccatggggtcccgcttcggctcctggatgactgacacgatggcccccagtgcggatagccgggtctggtacatggatggctattacaaaggccgccgggtcctggagttccgtaccctgggagacttcatcaaaggccagaactttatccagcacctgctgccccagccgtgggcgggcacgggccacgtggtgtacaacggctccctgttctataacaagtaccagagcaacgtggtggtcaaataccacttccgctcgcgctctgtgctggtgcagaggagcctcccgggcgccggttacaacaacaccttcccctactcctggggcggcttctccgacatggacttcatggtggacgagagcgggctctgggctgtgtacaccaccaaccagaacgcgggcaacatcgtggtcagccggctggacccgcacaccctcgaggtcatgcggtcctgggacaccggctaccccaagcgcagcgctggcgaggccttcatgatctgcggtgtgctctacgtgaccaactcccacctggctggggccaaggtctacttcgcctattttaccaacacgtccagttacgagtacacggacgtgcccttccacaaccagtattcccacatctcgatgctggattacaacccccgggagcgcgccctctatacctggaacaacggccaccaggtgctctacaatgtcaccctgtttcacgtcatcagcacctctggggacccctgagccaatgctgtggctcgggctgctgcctggggggcctccgggggctgggggcccttttcattctgcctgtgtccctcaagggtgatctctctgtctctgtcacgccctttctccccgcctttttgctgggcttttgttctctgcctatgtatttctgtctattttttcaatttcccctcttctcctttattgatctctgcttttaatacaccacttctttctttctgcctttttatggatgtctttttctttttatggctctggttctccagttctttccgtctctgcctctctctgtctctctctctctgtccttccacccctccctccttgcttcccacccattcctcatccctcactcccacccccacccccacccccaggagttgagtgcatggatctgtttctttttttatttacactttttctttccggtttgccggaataaacaggacctttgacatttga

SEQ ID NO: 457099 - DNA, 725 bp, Homo sapiens
aactccctcttcctccccccatatattcgttctctaaggaaatctcttcttcctattccccacactctccagtcccctctctgaccaacacgtccagttacgagtacacggacgtgcccttccacaaccagtattcccacatctcgatgctggattacaacccccgggagcgcgccctctatacctggaacaacggccaccaggtgctctacaatgtcaccctgtttcacgtcatcagcacctctggggacccctgagccaatgctgtggctcgggctgctgcctggggggcctccgggggctgggggcccttttcattctgcctgtgtccctcaagggtgatctctctgtctctgtcacgccctttctccccgcctttttgctgggcttttgttctctgcctatgtatttctgtctattttttcaatttcccctcttctcctttattgatctctgcttttaatacaccacttctttctttctgcctttttatggatgtctttttctttttatggctctggttctccagttctttccgtctctgcctctctctgtctctctctctctgtccttccacccctccctccttgcttcccacccattcctcatccctcactcccacccccacccccacccccaggagttgagtgcatggatctgtttctttttttatttacactttttctttccggtttgccggaataaacaggacctttgacatttga

SEQ ID NO: 457100 - DNA, 256 bp, Homo sapiens
gtccagaagctggaaatggccctgacccttggcctctaacccctcactcacaactgaacaacatattgggaccagatttttgagtcttccctcatccctggtcccagctttcccaacttgatcacagcacttcatctttgcctggcctctcttgggctgttcatttccccatcctcattccccctgttcctgcctcccaggctgtgggaagctgaccggggtcagtaaccccatcaccgttcgggccatggggtcc

SEQ ID NO: 457101 - DNA, 2011 bp, Homo sapiens
agactcggagcgagcgagggggcgggggtggggcggaatcccggccgccggcgaggcgggggaggcggcggcgcagggtcgccccggccgggcgggcggggtcgcgcctggtggcggtccccgcgccgaggcgccgctagggcgggcgggggtcgggacgccgggctaggggcgcgtcatgtggccgctcacggtcccgccgccgctgctgctgctgctgtgctcaggcctggccggacagactctcttccagaacccagaagagggctggcagctgtacacctcagcccaggcccctgacgggaaatgcatctgcacggccgtgatcccagcgcagagtacctgctctcgagatggcaggagtcgggagctgcggcaactgatggagaaggtccagaacgtctcccagtccatggaggtccttgagttgcggacgtatcgcgacctccagtatgtacgcggcatggagaccctcatgcggagcctggatgcgcggctccgggcagctgatgggtccctctcggccaagagcttccaggagctgaaggacaggatgacggaactgttgcccctgagctcggtcctggagcagtacaaggcagacacgcggaccattgtacgcttgcgggaggaggtgaggaatctctccggcagtctggcggccattcaggaggagatgggtgcctacgggtatgaggacctgcagcaacgggtgatggccctggaggcccggctccacgcctgcgcccagaagctgggctgtgggaagctgaccggggtcagtaaccccatcaccgttcgggccatggggtcccgcttcggctcctggatgactgacacgatggcccccagtgcggatagccgggtctggtacatggatggctattacaaaggccgccgggtcctggagttccgtaccctgggagacttcatcaaaggccagaactttatccagcacctgctgccccagccgtgggcgggcacgggccacgtggtgtacaacggctccctgttctataacaagtaccagagcaacgtggtggtcaaataccacttccgctcgcgctctgtgctggtgcagaggagcctcccgggcgccggttacaacaacaccttcccctactcctggggcggcttctccgacatggacttcatggtggacgagagcgggctctgggctgtgtacaccaccaaccagaacgcgggcaacatcgtggtcagccggctggacccgcacaccctcgaggtcatgcggtcctgggacaccggctaccccaagcgcagcgctggcgaggccttcatgatctgcggtgtgctctacgtgaccaactcccacctggctggggccaaggtctacttcgcctattttaccaacacgtccagttacgagtacacggacgtgcccttccacaaccagtattcccacatctcgatgctggattacaacccccgggagcgcgccctctatacctggaacaacggccaccaggtgctctacaatgtcaccctgtttcacgtcatcagcacctctggggacccctgagccaatgctgtggctcgggctgctgcctggggggcctccgggggctgggggcccttttcattctgcctgtgtccctcaagggtgatctctctgtctctgtcacgccctttctccccgcctttttgctgggcttttgttctctgcctatgtatttctgtctattttttcaatttcccctcttctcctttattgatctctgcttttaatacaccacttctttctttctgcctttttatggatgtctttttctttttatggctctggttctccagttctttccgtctctgcctctctctgtctctctctctctgtccttccacccctccctccttgcttcccacccattcctcatccctcactcccacccccacccccacccccaggagttgagtgcatggatctgtttctttttttatttacactttttctttccggtttgccggaataaacaggacctttgacatttga

SEQ ID NO: 457102 - DNA, 1690 bp, Homo sapiens
gttccttctgtctgctgtgtagagaattgactacaggtgatgaaggtggaactgggagactagggaggaggtccagaacgtctcccagtccatggaggtccttgagttgcggacgtatcgcgacctccagtatgtacgcggcatggagaccctcatgcggagcctggatgcgcggctccgggcagctgatgggtccctctcggccaagagcttccaggagctgaaggacaggatgacggaactgttgcccctgagctcggtcctggagcagtacaaggcagacacgcggaccattgtacgcttgcgggaggaggtgaggaatctctccggcagtctggcggccattcaggaggagatgggtgcctacgggtatgaggacctgcagcaacgggtgatggccctggaggcccggctccacgcctgcgcccagaagctgggctgtgggaagctgaccggggtcagtaaccccatcaccgttcgggccatggggtcccgcttcggctcctggatgactgacacgatggcccccagtgcggatagccgggtctggtacatggatggctattacaaaggccgccgggtcctggagttccgtaccctgggagacttcatcaaaggccagaactttatccagcacctgctgccccagccgtgggcgggcacgggccacgtggtgtacaacggctccctgttctataacaagtaccagagcaacgtggtggtcaaataccacttccgctcgcgctctgtgctggtgcagaggagcctcccgggcgccggttacaacaacaccttcccctactcctggggcggcttctccgacatggacttcatggtggacgagagcgggctctgggctgtgtacaccaccaaccagaacgcgggcaacatcgtggtcagccggctggacccgcacaccctcgaggtcatgcggtcctgggacaccggctaccccaagcgcagcgctggcgaggccttcatgatctgcggtgtgctctacgtgaccaactcccacctggctggggccaaggtctacttcgcctattttaccaacacgtccagttacgagtacacggacgtgcccttccacaaccagtattcccacatctcgatgctggattacaacccccgggagcgcgccctctatacctggaacaacggccaccaggtgctctacaatgtcaccctgtttcacgtcatcagcacctctggggacccctgagccaatgctgtggctcgggctgctgcctggggggcctccgggggctgggggcccttttcattctgcctgtgtccctcaagggtgatctctctgtctctgtcacgccctttctccccgcctttttgctgggcttttgttctctgcctatgtatttctgtctattttttcaatttcccctcttctcctttattgatctctgcttttaatacaccacttctttctttctgcctttttatggatgtctttttctttttatggctctggttctccagttctttccgtctctgcctctctctgtctctctctctctgtccttccacccctccctccttgcttcccacccattcctcatccctcactcccacccccacccccacccccaggagttgagtgcatggatctgtttctttttttatttacactttttctttccggtttgccggaataaacaggacctttgacatttga

SEQ ID NO: 457103 - DNA, 1566 bp, Homo sapiens
gttccttctgtctgctgtgtagagaattgactacaggtgatgaaggtggaactgggagactagggaggaggtccagaacgtctcccagtccatggaggtccttgagttgcggacgtatcgcgacctccagtatgtacgcggcatggagaccctcatgcggagcctggatgcgcggctccgggcagctgatgggtccctctcggccaagagcttccaggagctgaaggacaggatgacggaactgttgcccctgagctcggtcctggagcagtacaaggcagacacgcggaccattgtacgcttgcgggaggaggctgtgggaagctgaccggggtcagtaaccccatcaccgttcgggccatggggtcccgcttcggctcctggatgactgacacgatggcccccagtgcggatagccgggtctggtacatggatggctattacaaaggccgccgggtcctggagttccgtaccctgggagacttcatcaaaggccagaactttatccagcacctgctgccccagccgtgggcgggcacgggccacgtggtgtacaacggctccctgttctataacaagtaccagagcaacgtggtggtcaaataccacttccgctcgcgctctgtgctggtgcagaggagcctcccgggcgccggttacaacaacaccttcccctactcctggggcggcttctccgacatggacttcatggtggacgagagcgggctctgggctgtgtacaccaccaaccagaacgcgggcaacatcgtggtcagccggctggacccgcacaccctcgaggtcatgcggtcctgggacaccggctaccccaagcgcagcgctggcgaggccttcatgatctgcggtgtgctctacgtgaccaactcccacctggctggggccaaggtctacttcgcctattttaccaacacgtccagttacgagtacacggacgtgcccttccacaaccagtattcccacatctcgatgctggattacaacccccgggagcgcgccctctatacctggaacaacggccaccaggtgctctacaatgtcaccctgtttcacgtcatcagcacctctggggacccctgagccaatgctgtggctcgggctgctgcctggggggcctccgggggctgggggcccttttcattctgcctgtgtccctcaagggtgatctctctgtctctgtcacgccctttctccccgcctttttgctgggcttttgttctctgcctatgtatttctgtctattttttcaatttcccctcttctcctttattgatctctgcttttaatacaccacttctttctttctgcctttttatggatgtctttttctttttatggctctggttctccagttctttccgtctctgcctctctctgtctctctctctctgtccttccacccctccctccttgcttcccacccattcctcatccctcactcccacccccacccccacccccaggagttgagtgcatggatctgtttctttttttatttacactttttctttccggtttgccggaataaacaggacctttgacatttga

SEQ ID NO: 457104 - DNA, 398 bp, Homo sapiens
tcctagcctcgccagtgtcctagcctcgccagtgtcctagcctcgccagtgtcctagcctcgccagtgtcctagcctcgccagtggtcctagcctcgccaggtcagtattaccctgtgaagccccttccctcctttattattcaggagggctgggggggctccctggttctgagcatcatcctttcccctcccctctcttcctcccctctgcactttgtttacttgttttgcccagcctgtgtggaaaggaggcccacgggcactaggggagccgaattctacaatcccgctggggcggccggggcgggagagaaaggtggtgctgcagtggtggccctggggggccattcgattcgcctcagttgctgctgtaataaaagtctactttttgctaaaa

SEQ ID NO: 457105 - DNA, 430 bp, Homo sapiens
tgcctcggccccagcagccacagcaggaggaggtgacatcacctgtcgtgcccccctctgtcaagactccagccagagaacttctgttccacccagcattgtttgaagtgccctcgctcaaactccttgcggcccactgcattgtgggacaccaacacatgatcccagagaacgctctagaggagatcaccaaaaacatggatactagtgccgtactggctgaaatccctgcaggaccaggaagagaaccagttcagactttgcccagcctgtgtggaaaggaggcccacgggcactaggggagccgaattctacaatcccgctggggcggccggggcgggagagaaaggtggtgctgcagtggtggccctggggggccattcgattcgcctcagttgctgctgtaataaaagtctactttttgctaaaa

SEQ ID NO: 457106 - DNA, 2195 bp, Homo sapiens
ggggcccgcagttcggttgcgctgcggagcgcagctgtgagggagtcgctgtgatccggggccccggaacccgagctggagctgaagcgcaggctgcggggcgcggagtcgggagtgcaggcctgagtgttccttccagcatgtcggagggggagtcccagacagtacttagcagtggctcagacccaaaggtagaatcctcatcttcagctcctggcctgacatcagtgtcacctcctgtgacctccacaacctcagctgcttccccagaggaagaagaagaaagtgaagatgagtctgagattttggaagagtcgccctgtgggcgctggcagaagaggcgagaagaggtgaatcaacggaatgtaccaggtattgacagtgcatacctggccatggatacagaggaaggtgtagaggttgtgtggaatgaggtacagttctctgaacgcaagaactacaagctgcaggaggaaaaggttcgtgctgtgtttgataatctgattcaattggagcatcttaacattgttaagtttcacaaatattgggctgacattaaagagaacaaggccagggtcatttttatcacagaatacatgtcatctgggagtctgaagcaatttctgaagaagaccaaaaagaaccacaagacgatgaatgaaaaggcatggaagcgttggtgcacacaaatcctctctgccctaagctacctgcactcctgtgacccccccatcatccatgggaacctgacctgtgacaccatcttcatccagcacaacggactcatcaagattggctctgtggctcctgacactatcaacaatcatgtgaagacttgtcgagaagagcagaagaatctacacttctttgcaccagagtatggagaagtcactaatgtgacaacagcagtggacatctactcctttggcatgtgtgcactggagatggcagtgctggagattcagggcaatggagagtcctcatatgtgccacaggaagccatcagcagtgccatccagcttctagaagacccattacagagggagttcattcaaaagtgcctgcagtctgagcctgctcgcagaccaacagccagagaacttctgttccacccagcattgtttgaagtgccctcgctcaaactccttgcggcccactgcattgtgggacaccaacacatgatcccagagaacgctctagaggagatcaccaaaaacatggatactagtgccgtactggctgaaatccctgcaggaccaggaagagaaccagttcagactttgtactctcagtcaccagctctggaattagataaattccttgaagatgtcaggaatgggatctatcctctgacagcctttgggctgcctcggccccagcagccacagcaggaggaggtgacatcacctgtcgtgcccccctctgtcaagactccgacacctgaaccagctgaggtggagactcgcaaggtggtgctgatgcagtgcaacattgagtcggtggaggagggagtcaaacaccacctgacacttctgctgaagttggaggacaaactgaaccggcacctgagctgtgacctgatgccaaatgagaatatccccgagttggcggctgagctggtgcagctgggcttcattagtgaggctgaccagagccggttgacttctctgctagaagagaccttgaacaagttcaattttgccaggaacagtaccctcaactcagccgctgtcaccgtctcctcttagagctcactcgggccaggccctgatctgcgctgtggctgtccctggacgtgctgcagccctcctgtcccttccccccagtcagtattaccctgtgaagccccttccctcctttattattcaggagggctgggggggctccctggttctgagcatcatcctttcccctcccctctcttcctcccctctgcactttgtttacttgttttgcacagacgtgggcctgggccttctcagcagccgccttctagttgggggctagtcgctgatctgccggctcccgcccagcctgtgtggaaaggaggcccacgggcactaggggagccgaattctacaatcccgctggggcggccggggcgggagagaaaggtggtgctgcagtggtggccctggggggccattcgattcgcctcagttgctgctgtaataaaagtctactttttgctaaaa

SEQ ID NO: 457107 - DNA, 2707 bp, Homo sapiens
  misc_feature (2202)..(2203): n is a, c, g, or t
ggggcccgcagttcggttgcgctgcggagcgcagctgtgagggagtcgctgtgatccggggccccggaacccgagctggagctgaagcgcaggctgcggggcgcggagtcgggagtgcaggcctgagtgttccttccagcatgtcggagggggagtcccagacagtacttagcagtggctcagacccaaaggtagaatcctcatcttcagctcctggcctgacatcagtgtcacctcctgtgacctccacaacctcagctgcttccccagaggaagaagaagaaagtgaagatgagtctgagattttggaagagtcgccctgtgggcgctggcagaagaggcgagaagaggtgaatcaacggaatgtaccaggtattgacagtgcatacctggccatggatacagaggaaggtgtagaggttgtgtggaatgaggtacagttctctgaacgcaagaactacaagctgcaggaggaaaaggttcgtgctgtgtttgataatctgattcaattggagcatcttaacattgttaagtttcacaaatattgggctgacattaaagagaacaaggccagggtcatttttatcacagaatacatgtcatctgggagtctgaagcaatttctgaagaagaccaaaaagaaccacaagacgatgaatgaaaaggcatggaagcgttggtgcacacaaatcctctctgccctaagctacctgcactcctgtgacccccccatcatccatgggaacctgacctgtgacaccatcttcatccagcacaacggactcatcaagattggctctgtggctcctgacactatcaacaatcatgtgaagacttgtcgagaagagcagaagaatctacacttctttgcaccagagtatggagaagtcactaatgtgacaacagcagtggacatctactcctttggcatgtgtgcactggagatggcagtgctggagattcagggcaatggagagtcctcatatgtgccacaggaagccatcagcagtgccatccagcttctagaagacccattacagagggagttcattcaaaagtgcctgcagtctgagcctgctcgcagaccaacagccagagaacttctgttccacccagcattgtttgaagtgccctcgctcaaactccttgcggcccactgcattgtgggacaccaacacatgatcccagagaacgctctagaggagatcaccaaaaacatggatactagtgccgtactggctgaaatccctgcaggaccaggaagagaaccagttcagactttgtactctcagtcaccagctctggaattagataaattccttgaagatgtcaggaatgggatctatcctctgacagcctttgggctgcctcggccccagcagccacagcaggaggaggtgacatcacctgtcgtgcccccctctgtcaagactccgacacctgaaccagctgaggtggagactcgcaaggtggtgctgatgcagtgcaacattgagtcggtggaggagggagtcaaacaccacctgacacttctgctgaagttggaggacaaactgaaccggcacctgagctgtgacctgatgccaaatgagaatatccccgagttggcggctgagctggtgcagctgggcttcattagtgaggctgaccagagccggttgacttctctgctagaagagaccttgaacaagttcaattttgccaggaacagtaccctcaactcagccgctgtcaccgtctcctcttagagctcactcgggccaggccctgatctgcgctgtggctgtccctggacgtgctgcagccctcctgtcccttccccccagtcagtattaccctgtgaagccccttccctcctttattattcaggagggctgggggggctccctggttctgagcatcatcctttcccctcccctctcttcctcccctctgcactttgtttacttgttttgcacagacgtgggcctgggccttctcagcagccgccttctagttgggggctagtcgctgatctgccggctcccgcccagcctgtgtggaaaggaggcccacgggcactaggggagccgaattctacaatcccgctggggcggccggggcgggagagaaaggtggtgctgcagtggtggccctggggggccattcgattcgcctcagttgctgctgtaataaaagtctactttttgctaaaaaaaaaannaaaaaaaaaaaacaaacaaaaaaaaaaaaaaaaaaaagaggggggggggggcgcgcccagaagaattatctccccgggggggccccacctttatgcggcgttcccccgtttttttttaacaggggggcgcccccaataaggggggacggcgcaattaaaaggacgaggggaaggggcggcggcggttaaacccaccgcggtgcgggggcggggaaacagcggtctcgcgcgggggagaaccttttggggggagagggagacccccattaaattttgggggcgggggggaggacacctaagtggtgggcaacacttaactcatgaaggggagatttttaaagagctgtagagggggaacaaataataaaattttgagggggttatcaagggtgtgttaaacacagggggggatgattgtattgggggtgagaaaaaaatttgggcagacggagaattaaatatggggaacaattttacacgggagtctgtttattaaaaaagggc

SEQ ID NO: 457108 - DNA, 2153 bp, Homo sapiens
ggggcccgcagttcggttgcgctgcggagcgcagctgtgagggagtcgctgtgatccggggccccggaacccgagctggagctgaagcgcaggctgcggggcgcggagtcgggagtgcaggcctgagtgttccttccagcatgtcggagggggagtcccagacagtacttagcagtggctcagacccaaaggtagaatcctcatcttcagctcctggcctgacatcagtgtcacctcctgtgacctccacaacctcagctgcttccccagaggaagaagaagaaagtgaagatgagtctgagattttggaagagtcgccctgtgggcgctggcagaagaggcgagaagaggtgaatcaacggaatgtaccaggtattgacagtgcatacctggccatggatacagaggaaggtgtagaggttgtgtggaatgaggtacagttctctgaacgcaagaactacaagctgcaggaggaaaaggttcgtgctgtgtttgataatctgattcaattggagcatcttaacattgttaagtttcacaaatattgggctgacattaaagagaacaaggccagggtcatttttatcacagaatacatgtcatctgggagtctgaagcaatttctgaagaagaccaaaaagaaccacaagacgatgaatgaaaaggcatggaagcgttggtgcacacaaatcctctctgccctaagctacctgcactcctgtgacccccccatcatccatgggaacctgacctgtgacaccatcttcatccagcacaacggactcatcaagattggctctgtggctcctgacactatcaacaatcatgtgaagacttgtcgagaagagcagaagaatctacacttctttgcaccagagtatggagaagtcactaatgtgacaacagcagtggacatctactcctttggcatgtgtgcactggagatggcagtgctggagattcagggcaatggagagtcctcatatgtgccacaggaagccatcagcagtgccatccagcttctagaagacccattacagagggagttcattcaaaagtgcctgcagtctgagcctgctcgcagaccaacagccagagaacttctgttccacccagcattgtttgaagtgccctcgctcaaactccttgcggcccactgcattgtgggacaccaacacatgatcccagagaacgctctagaggagatcaccaaaaacatggatactagtgccgtactggctgaaatccctgcaggaccaggaagagaaccagttcagactttgtactctcagtcaccagctctggaattagataaattccttgaagatgtcaggaatgggatctatcctctgacagcctttgggctgcctcggccccagcagccacagcaggaggaggtgacatcacctgtcgtgcccccctctgtcaagactccgacacctgaaccagctgaggtggagactcgcaaggtggtgctgatgcagtgcaacattgagtcggtggaggagggagtcaaacaccacctgacacttctgctgaagttggaggacaaactgaaccggcacctgagctgtgacctgatgccaaatgagaatatccccgagttggcggctgagctggtgcagctgggcttcattagtgaggctgaccagagccggttgacttctctgctagaagagaccttgaacaagttcaattttgccaggaacagtaccctcaactcagccgctgtcaccgtctcctcttagagctcactcgggccaggccctgatctgcgctgtggctgtccctggacgtgctgcagccctcctgtcccttccccccagtcagtattaccctgtgaagccccttccctcctttattattcaggagggctgggggggctccctggttctgagcatcatcctttcccctcccctctcttcctcccctctgcactttgtttacttgttttgcacagacgtgggcctgggccttctcagcagccgccttctagttgggggctagtcgctgatctgccggctcccccgaattctacaatcccgctggggcggccggggcgggagagaaaggtggtgctgcagtggtggccctggggggccattcgattcgcctcagttgctgctgtaataaaagtctactttttgctaaaa

SEQ ID NO: 457109 - DNA, 2164 bp, Homo sapiens
ggggcccgcagttcggttgcgctgcggagcgcagctgtgagggagtcgctgtgatccggggccccggaacccgagctggagctgaagcgcaggctgcggggcgcggagtcgggagtgcaggcctgagtgttccttccagcatgtcggagggggagtcccagacagtacttagcagtggctcagacccaaaggtagaatcctcatcttcagctcctggcctgacatcagtgtcacctcctgtgacctccacaacctcagctgcttccccagaggaagaagaagaaagtgaagatgagtctgagattttggaagagtcgccctgtgggcgctggcagaagaggcgagaagaggtgaatcaacggaatgtaccaggtattgacagtgcatacctggccatggatacagaggaaggtgtagaggttgtgtggaatgaggtacagttctctgaacgcaagaactacaagctgcaggaggaaaaggttcgtgctgtgtttgataatctgattcaattggagcatcttaacattgttaagtttcacaaatattgggctgacattaaagagaacaaggccagggtcatttttatcacagaatacatgtcatctgggagtctgaagcaatttctgaagaagaccaaaaagaaccacaagacgatgaatgaaaaggcatggaagcgttggtgcacacaaatcctctctgccctaagctacctgcactcctgtgacccccccatcatccatgggaacctgacctgtgacaccatcttcatccagcacaacggactcatcaagattggctctgtggctcctgacactatcaacaatcatgtgaagacttgtcgagaagagcagaagaatctacacttctttgcaccagagtatggagaagtcactaatgtgacaacagcagtggacatctactcctttggcatgtgtgcactggagatggcagtgctggagattcagggcaatggagagtcctcatatgtgccacaggaagccatcagcagtgccatccagcttctagaagacccattacagagggagttcattcaaaagtgcctgcagtctgagcctgctcgcagaccaacagccagagaacttctgttccacccagcattgtttgaagtgccctcgctcaaactccttgcggcccactgcattgtgggacaccaacacatgatcccagagaacgctctagaggagatcaccaaaaacatggatactagtgccgtactggctgaaatccctgcaggaccaggaagagaaccagttcagactttgtactctcagtcaccagctctggaattagataaattccttgaagatgtcaggaatgggatctatcctctgacagcctttgggctgcctcggccccagcagccacagcaggaggaggtgacatcacctgtcgtgcccccctctgtcaagactccgacacctgaaccagctgaggtggagactcgcaaggtggtgctgatgcagtgcaacattgagtcggtggaggagggagtcaaacaccacctgacacttctgctgaagttggaggacaaactgaaccggcacctgagctgtgacctgatgccaaatgagaatatccccgagttggcggctgagctggtgcagctgggcttcattagtgaggctgaccagagccggttgacttctctgctagaagagaccttgaacaagttcaattttgccaggaacagtaccctcaactcagccgctgtcaccgtctcctcttagagctcactcgggccaggccctgatctgcgctgtggctgtccctggacgtgctgcagccctcctgtcccttccccccagtcagtattaccctgtgaagccccttccctcctttattattcaggagggctgggggggctccctggttctgagcatcatcctttcccctcccctctcttcctcccctctgcactttgtttacttgttttgcacagacgtgggcctgggccttctcagcagccgccttctagttgggggctagtcgctgatctgccggctcccaaaacaagtaaacaaagtgcggggtcggccgggtgctaggccggggccgaggccgaggccggggcgggatccagagcgggagccggcgcgggatctgggactcggagcgggatccggagcgggacccaggagccggc

SEQ ID NO: 457110 - DNA, 2066 bp, Homo sapiens
ggggcccgcagttcggttgcgctgcggagcgcagctgtgagggagtcgctgtgatccggggccccggaacccgagctggagctgaagcgcaggctgcggggcgcggagtcgggagtgcaggcctgagtgttccttccagcatgtcggagggggagtcccagacagtacttagcagtggctcagacccaaaggtagaatcctcatcttcagctcctggcctgacatcagtgtcacctcctgtgacctccacaacctcagctgcttccccagaggaagaagaagaaagtgaagatgagtctgagattttggaagagtcgccctgtgggcgctggcagaagaggcgagaagaggtgaatcaacggaatgtaccaggtattgacagtgcatacctggccatggatacagaggaaggtgtagaggttgtgtggaatgaggtacagttctctgaacgcaagaactacaagctgcaggaggaaaaggttcgtgctgtgtttgataatctgattcaattggagcatcttaacattgttaagtttcacaaatattgggctgacattaaagagaacaaggccagggtcatttttatcacagaatacatgtcatctgggagtctgaagcaatttctgaagaagaccaaaaagaaccacaagacgatgaatgaaaaggcatggaagcgttggtgcacacaaatcctctctgccctaagctacctgcactcctgtgacccccccatcatccatgggaacctgacctgtgacaccatcttcatccagcacaacggactcatcaagattggctctgtggctcctgacactatcaacaatcatgtgaagacttgtcgagaagagcagaagaatctacacttctttgcaccagagtatggagaagtcactaatgtgacaacagcagtggacatctactcctttggcatgtgtgcactggagatggcagtgctggagattcagggcaatggagagtcctcatatgtgccacaggaagccatcagcagtgccatccagcttctagaagacccattacagagggagttcattcaaaagtgcctgcagtctgagcctgctcgcagaccaacagccagagaacttctgttccacccagcattgtttgaagtgccctcgctcaaactccttgcggcccactgcattgtgggacaccaacacatgatcccagagaacgctctagaggagatcaccaaaaacatggatactagtgccgtactggctgaaatccctgcaggaccaggaagagaaccagttcagactttgtactctcagtcaccagctctggaattagataaattccttgaagatgtcaggaatgggatctatcctctgacagcctttgggctgcctcggccccagcagccacagcaggaggaggtgacatcacctgtcgtgcccccctctgtcaagactccgacacctgaaccagctgaggtggagactcgcaaggtggtgctgatgcagtgcaacattgagtcggtggaggagggagtcaaacaccacctgacacttctgctgaagttggaggacaaactgaaccggcacctgagctgtgacctgatgccaaatgagaatatccccgagttggcggctgagctggtgcagctgggcttcattagtgaggctgaccagagccggttgacttctctgctagaagagaccttgaacaagttcaattttgccaggaacagtaccctcaactcagccgctgtcaccgtctcctcttagagctcactcgggccaggccctgatctgcgctgtggctgtccctggacgtgctgcagccctcctgtcccttccccccagcacagacgtgggcctgggccttctcagcagccgccttctagttgggggctagtcgctgatctgccggctcccgcccagcctgtgtggaaaggaggcccacgggcactaggggagccgaattctacaatcccgctggggcggccggggcgggagagaaaggtggtgctgcagtggtggccctggggggccattcgattcgcctcagttgctgctgtaataaaagtctactttttgctaaaa

SEQ ID NO: 457111 - DNA, 2018 bp, Homo sapiens
ggggcccgcagttcggttgcgctgcggagcgcagctgtgagggagtcgctgtgatccggggccccggaacccgagctggagctgaagcgcaggctgcggggcgcggagtcgggagtgcaggcctgagtgttccttccagcatgtcggagggggagtcccagacagtacttagcagtggctcagacccaaaggtagaatcctcatcttcagctcctggcctgacatcagtgtcacctcctgtgacctccacaacctcagctgcttccccagaggaagaagaagaaagtgaagatgagtctgagattttggaagagtcgccctgtgggcgctggcagaagaggcgagaagaggtgaatcaacggaatgtaccaggtattgacagtgcatacctggccatggatacagaggaaggtgtagaggttgtgtggaatgaggtacagttctctgaacgcaagaactacaagctgcaggaggaaaaggttcgtgctgtgtttgataatctgattcaattggagcatcttaacattgttaagtttcacaaatattgggctgacattaaagagaacaaggccagggtcatttttatcacagaatacatgtcatctgggagtctgaagcaatttctgaagaagaccaaaaagaaccacaagacgatgaatgaaaaggcatggaagcgttggtgcacacaaatcctctctgccctaagctacctgcactcctgtgacccccccatcatccatgggaacctgacctgtgacaccatcttcatccagcacaacggactcatcaagattggctctgtggctcctgacactatcaacaatcatgtgaagacttgtcgagaagagcagaagaatctacacttctttgcaccagagtatggagaagtcactaatgtgacaacagcagtggacatctactcctttggcatgtgtgcactggagatggcagtgctggagattcagggcaatggagagtcctcatatgtgccacaggaagccatcagcagtgccatccagcttctagaagacccattacagagggagttcattcaaaagtgcctgcagtctgagcctgctcgcagaccaacagccagagaacttctgttccacccagcattgtttgaagtgccctcgctcaaactccttgcggcccactgcattgtgggacaccaacacatgatcccagagaacgctctagaggagatcaccaaaaacatggatactagtgccgtactggctgaaatccctgcaggaccaggaagagaaccagttcagactttgtactctcagtcaccagctctggaattagataaattccttgaagatgtcaggaatgggatctatcctctgacagcctttgggctgcctcggccccagcagccacagcaggaggaggtgacatcacctgtcgtgcccccctctgtcaagactccgacacctgaaccagctgaggtggagactcgcaaggtggtgctgatgcagtgcaacattgagtcggtggaggagggagtcaaacaccacctgacacttctgctgaagttggaggacaaactgaaccggcacctgagctgtgacctgatgccaaatgagaatatccccgagttggcggctgagctggtgcagctgggcttcattagtgaggctgaccagagccggttgacttctctgctagaagagaccttgaacaagttcaattttgccaggaacagtaccctcaactcagccgctgtcaccgtccctctcttcctcccctctgcactttgtttacttgttttgcacagacgtgggcctgggccttctcagcagccgccttctagttgggggctagtcgctgatctgccggctcccgcccagcctgtgtggaaaggaggcccacgggcactaggggagccgaattctacaatcccgctggggcggccggggcgggagagaaaggtggtgctgcagtggtggccctggggggccattcgattcgcctcagttgctgctgtaataaaagtctactttttgctaaaa

SEQ ID NO: 457112 - DNA, 2121 bp, Homo sapiens
cttactgctaggtacgaggctgggtttactgcggagcgcagctgtgagggagtcgctgtgatccggggccccggaacccgagctggagctgaagcgcaggctgcggggcgcggagtcgggagtgcaggcctgagtgttccttccagcatgtcggagggggagtcccagacagtacttagcagtggctcagacccaaaggaagaagaagaaagtgaagatgagtctgagattttggaagagtcgccctgtgggcgctggcagaagaggcgagaagaggtgaatcaacggaatgtaccaggtattgacagtgcatacctggccatggatacagaggaaggtgtagaggttgtgtggaatgaggtacagttctctgaacgcaagaactacaagctgcaggaggaaaaggttcgtgctgtgtttgataatctgattcaattggagcatcttaacattgttaagtttcacaaatattgggctgacattaaagagaacaaggccagggtcatttttatcacagaatacatgtcatctgggagtctgaagcaatttctgaagaagaccaaaaagaaccacaagacgatgaatgaaaaggcatggaagcgttggtgcacacaaatcctctctgccctaagctacctgcactcctgtgacccccccatcatccatgggaacctgacctgtgacaccatcttcatccagcacaacggactcatcaagattggctctgtggctcctgacactatcaacaatcatgtgaagacttgtcgagaagagcagaagaatctacacttctttgcaccagagtatggagaagtcactaatgtgacaacagcagtggacatctactcctttggcatgtgtgcactggagatggcagtgctggagattcagggcaatggagagtcctcatatgtgccacaggaagccatcagcagtgccatccagcttctagaagacccattacagagggagttcattcaaaagtgcctgcagtctgagcctgctcgcagaccaacagccagagaacttctgttccacccagcattgtttgaagtgccctcgctcaaactccttgcggcccactgcattgtgggacaccaacacatgatcccagagaacgctctagaggagatcaccaaaaacatggatactagtgccgtactggctgaaatccctgcaggaccaggaagagaaccagttcagactttgtactctcagtcaccagctctggaattagataaattccttgaagatgtcaggaatgggatctatcctctgacagcctttgggctgcctcggccccagcagccacagcaggaggaggtgacatcacctgtcgtgcccccctctgtcaagactccgacacctgaaccagctgaggtggagactcgcaaggtggtgctgatgcagtgcaacattgagtcggtggaggagggagtcaaacaccacctgacacttctgctgaagttggaggacaaactgaaccggcacctgagctgtgacctgatgccaaatgagaatatccccgagttggcggctgagctggtgcagctgggcttcattagtgaggctgaccagagccggttgacttctctgctagaagagaccttgaacaagttcaattttgccaggaacagtaccctcaactcagccgctgtcaccgtctcctcttagagctcactcgggccaggccctgatctgcgctgtggctgtccctggacgtgctgcagccctcctgtcccttccccccagtcagtattaccctgtgaagccccttccctcctttattattcaggagggctgggggggctccctggttctgagcatcatcctttcccctcccctctcttcctcccctctgcactttgtttacttgttttgcacagacgtgggcctgggccttctcagcagccgccttctagttgggggctagtcgctgatctgccggctcccgcccagcctgtgtggaaaggaggcccacgggcactaggggagccgaattctacaatcccgctggggcggccggggcgggagagaaaggtggtgctgcagtggtggccctggggggccattcgattcgcctcagttgctgctgtaataaaagtctactttttgctaaaa

SEQ ID NO: 457113 - DNA, 2792 bp, Homo sapiens
  misc_feature (2287)..(2288): n is a, c, g, or t
ggggcccgcagttcggttgcgctgcggagcgcagctgtgagggagtcgctgtgatccggggccccggaacccgagctggagctgaagcgcaggctgcggggcgcggagtcgggagtgcaggcctgagtgttccttccagcatgtcggagggggagtcccagacagtacttagcagtggctcagacccaaaggtagaatcctcatcttcagctcctggcctgacatcagtgtcacctcctgtgacctccacaacctcagctgcttccccagaggaagaagaagaaagtgaagatgagtctgagattttggaagagtcgccctgtgggcgctggcagaagaggcgagaagaggtgaatcaacggaatgtaccaggtattgacagtgcatacctggccatggatacagaggaaggtgtagaggttgtgtggaatgaggtacagttctctgaacgcaagaactacaagctgcaggaggaaaaggttcgtgctgtgtttgataatctgattcaattggagcatcttaacattgttaagtttcacaaatattgggctgacattaaagagaacaaggccagggtcatttttatcacagaatacatgtcatctgggagtctgaagcaatttctgaagaagaccaaaaagaaccacaagacgatgaatgaaaaggcatggaagcgttggtgcacacaaatcctctctgccctaagctacctgcactcctgtgacccccccatcatccatgggaacctgacctgtgacaccatcttcatccagcacaacggactcatcaagattggctctgtggctcctgacactatcaacaatcatgtgaagacttgtcgagaagagcagaagaatctacacttctttgcaccagagtatggagaagtcactaatgtgacaacagcagtggacatctactcctttggcatgtgtgcactggagatggcagtgctggagattcagggcaatggagagtcctcatatgtgccacaggaagccatcagcagtgccatccagcttctagaagacccattacagagggagttcattcaaaagtgcctgcagtctgagcctgctcgcagaccaacagccagagaacttctgttccacccagcattgtttgaagtgccctcgctcaaactccttgcggcccactgcattgtgggacaccaacacatgatcccagagaacgctctagaggagatcaccaaaaacatggatactagtgccgtactggctgaaatccctgcaggaccaggaagagaaccagttcagactttgtactctcagtcaccagctctggaattagataaattccttgaagatgtcaggaatgggatctatcctctgacagcctttgggctgcctcggccccagcagccacagcaggaggaggtgacatcacctgtcgtgcccccctctgtcaagactccgacacctgaaccagctgaggtggagactcgcaaggtggtgctgatgcagtgcaacattgagtcggtggaggagggagtcaaacaccacctgacacttctgctgaagttggaggacaaactgaaccggcacctgagctgtgacctgatgccaaatgagaatatccccgagttggcggctgagctggtgcagctgggcttcattagtgaggtgaggtttctgccttcatctgccctggctgcccccatgccttctcttctctcagcccccatcttactgagctcttctcccccaggctgaccagagccggttgacttctctgctagaagagaccttgaacaagttcaattttgccaggaacagtaccctcaactcagccgctgtcaccgtctcctcttagagctcactcgggccaggccctgatctgcgctgtggctgtccctggacgtgctgcagccctcctgtcccttccccccagtcagtattaccctgtgaagccccttccctcctttattattcaggagggctgggggggctccctggttctgagcatcatcctttcccctcccctctcttcctcccctctgcactttgtttacttgttttgcacagacgtgggcctgggccttctcagcagccgccttctagttgggggctagtcgctgatctgccggctcccgcccagcctgtgtggaaaggaggcccacgggcactaggggagccgaattctacaatcccgctggggcggccggggcgggagagaaaggtggtgctgcagtggtggccctggggggccattcgattcgcctcagttgctgctgtaataaaagtctactttttgctaaaaaaaaaannaaaaaaaaaaaacaaacaaaaaaaaaaaaaaaaaaaagaggggggggggggcgcgcccagaagaattatctccccgggggggccccacctttatgcggcgttcccccgtttttttttaacaggggggcgcccccaataaggggggacggcgcaattaaaaggacgaggggaaggggcggcggcggttaaacccaccgcggtgcgggggcggggaaacagcggtctcgcgcgggggagaaccttttggggggagagggagacccccattaaattttgggggcgggggggaggacacctaagtggtgggcaacacttaactcatgaaggggagatttttaaagagctgtagagggggaacaaataataaaattttgagggggttatcaagggtgtgttaaacacagggggggatgattgtattgggggtgagaaaaaaatttgggcagacggagaattaaatatggggaacaattttacacgggagtctgtttattaaaaaagggc

SEQ ID NO: 457114 - DNA, 2100 bp, Homo sapiens
ggggcccgcagttcggttgcgctgcggagcgcagctgtgagggagtcgctgtgatccggggccccggaacccgagctggagctgaagcgcaggctgcggggcgcggagtcgggagtgcaggcctgagtgttccttccagcatgtcggagggggagtcccagacagtacttagcagtggctcagacccaaaggtagaatcctcatcttcagctcctggcctgacatcagtgtcacctcctgtgacctccacaacctcagctgcttccccagaggaagaagaagaaagtgaagatgagtctgagattttggaagagtcgccctgtgggcgctggcagaagaggcgagaagaggtgaatcaacggaatgtaccaggtattgacagtgcatacctggccatggatacagaggaaggtgtagaggttgtgtggaatgaggtacagttctctgaacgcaagaactacaagctgcaggaggaaaaggttcgtgctgtgtttgataatctgattcaattggagcatcttaacattgttaagtttcacaaatattgggctgacattaaagagaacaaggccagggtcatttttatcacagaatacatgtcatctgggagtctgaagcaatttctgaagaagaccaaaaagaaccacaagacgatgaatgaaaaggcatggaagcgttggtgcacacaaatcctctctgccctaagtggctcctgacactatcaacaatcatgtgaagacttgtcgagaagagcagaagaatctacacttctttgcaccagagtatggagaagtcactaatgtgacaacagcagtggacatctactcctttggcatgtgtgcactggagatggcagtgctggagattcagggcaatggagagtcctcatatgtgccacaggaagccatcagcagtgccatccagcttctagaagacccattacagagggagttcattcaaaagtgcctgcagtctgagcctgctcgcagaccaacagccagagaacttctgttccacccagcattgtttgaagtgccctcgctcaaactccttgcggcccactgcattgtgggacaccaacacatgatcccagagaacgctctagaggagatcaccaaaaacatggatactagtgccgtactggctgaaatccctgcaggaccaggaagagaaccagttcagactttgtactctcagtcaccagctctggaattagataaattccttgaagatgtcaggaatgggatctatcctctgacagcctttgggctgcctcggccccagcagccacagcaggaggaggtgacatcacctgtcgtgcccccctctgtcaagactccgacacctgaaccagctgaggtggagactcgcaaggtggtgctgatgcagtgcaacattgagtcggtggaggagggagtcaaacaccacctgacacttctgctgaagttggaggacaaactgaaccggcacctgagctgtgacctgatgccaaatgagaatatccccgagttggcggctgagctggtgcagctgggcttcattagtgaggctgaccagagccggttgacttctctgctagaagagaccttgaacaagttcaattttgccaggaacagtaccctcaactcagccgctgtcaccgtctcctcttagagctcactcgggccaggccctgatctgcgctgtggctgtccctggacgtgctgcagccctcctgtcccttccccccagtcagtattaccctgtgaagccccttccctcctttattattcaggagggctgggggggctccctggttctgagcatcatcctttcccctcccctctcttcctcccctctgcactttgtttacttgttttgcacagacgtgggcctgggccttctcagcagccgccttctagttgggggctagtcgctgatctgccggctcccgcccagcctgtgtggaaaggaggcccacgggcactaggggagccgaattctacaatcccgctggggcggccggggcgggagagaaaggtggtgctgcagtggtggccctggggggccattcgattcgcctcagttgctgctgtaataaaagtctactttttgctaaaa

SEQ ID NO: 457115 - DNA, 1895 bp, Homo sapiens
ggggcccgcagttcggttgcgctgcggagcgcagctgtgagggagtcgctgtgatccggggccccggaacccgagctggagctgaagcgcaggctgcggggcgcggagtcgggagtgcaggcctgagtgttccttccagcatgtcggagggggagtcccagacagtacttagcagtggctcagacccaaaggtagaatcctcatcttcagctcctggcctgacatcagtgtcacctcctgtgacctccacaacctcagctgcttccccagaggaagaagaagaaagtgaagatgagtctgagattttggaagagtcgccctgtgggcgctggcagaagaggcgagaagaggtgaatcaacggaatgtaccaggtattgacagtgcatacctggccatggatacagaggaaggtgtagaggttgtgtggaatgaggtacagttctctgaacgcaagaactacaagctgcaggagcacaacggactcatcaagattggctctgtggctcctgacactatcaacaatcatgtgaagacttgtcgagaagagcagaagaatctacacttctttgcaccagagtatggagaagtcactaatgtgacaacagcagtggacatctactcctttggcatgtgtgcactggagatggcagtgctggagattcagggcaatggagagtcctcatatgtgccacaggaagccatcagcagtgccatccagcttctagaagacccattacagagggagttcattcaaaagtgcctgcagtctgagcctgctcgcagaccaacagccagagaacttctgttccacccagcattgtttgaagtgccctcgctcaaactccttgcggcccactgcattgtgggacaccaacacatgatcccagagaacgctctagaggagatcaccaaaaacatggatactagtgccgtactggctgaaatccctgcaggaccaggaagagaaccagttcagactttgtactctcagtcaccagctctggaattagataaattccttgaagatgtcaggaatgggatctatcctctgacagcctttgggctgcctcggccccagcagccacagcaggaggaggtgacatcacctgtcgtgcccccctctgtcaagactccgacacctgaaccagctgaggtggagactcgcaaggtggtgctgatgcagtgcaacattgagtcggtggaggagggagtcaaacaccacctgacacttctgctgaagttggaggacaaactgaaccggcacctgagctgtgacctgatgccaaatgagaatatccccgagttggcggctgagctggtgcagctgggcttcattagtgaggctgaccagagccggttgacttctctgctagaagagaccttgaacaagttcaattttgccaggaacagtaccctcaactcagccgctgtcaccgtctcctcttagagctcactcgggccaggccctgatctgcgctgtggctgtccctggacgtgctgcagccctcctgtcccttccccccagtcagtattaccctgtgaagccccttccctcctttattattcaggagggctgggggggctccctggttctgagcatcatcctttcccctcccctctcttcctcccctctgcactttgtttacttgttttgcacagacgtgggcctgggccttctcagcagccgccttctagttgggggctagtcgctgatctgccggctcccgcccagcctgtgtggaaaggaggcccacgggcactaggggagccgaattctacaatcccgctggggcggccggggcgggagagaaaggtggtgctgcagtggtggccctggggggccattcgattcgcctcagttgctgctgtaataaaagtctactttttgctaaaa

SEQ ID NO: 457116 - DNA, 1742 bp, Homo sapiens
ggggcccgcagttcggttgcgctgcggagcgcagctgtgagggagtcgctgtgatccggggccccggaacccgagctggagctgaagcgcaggctgcggggcgcggagtcgggagtgcaggcctgagtgttccttccagcatgtcggagggggagtcccagacagtacttagcagtggctcagacccaaaggtagaatcctcatcttcagctcctggcctgacatcagtgtcacctcctgtgacctccacaacctcagctgcttccccagaggaagaagaagaaagtgaagatgagtctgagattttggaagagtcgccctgtgggcgctggcagaagaggcgagaagaggtgaatcaacggaatgtaccaggtattgacagtgcatacctggccatggatacagaggaaggtgtagaggttgtgtggaatgaggtacagttctctgaacgcaagaactacaagctgcaggaggaaaaggttcgtgctgtgtttgataatctgattcaattggagcatcttaacattgttaagtttcacaaatattgggctgacattaaagagaacaaggccagggtcatttttatcacagaatacatgtcatctgggagtctgaagcaatttctgaagaagaccaaaaagaaccacaagacgatgaatgaaaaggcatggaagcgttggtgcacacaaatcctctctgccctaagctacctgcactcctgtgacccccccatcatccatgggaacctgacctgtgacaccatcttcatccagcacaacggactcatcaagattggctctgtggctcctgacactatcaacaatcatgtgaagacttgtcgagaagagcagaagaatctacacttctttgcaccagagtatggagaagtcactaatgtgacaacagcagtggacatctactcctttggcatgtgtgcactggagatggcagtgctggagattcagggcaatggagagtcctcatatgtgccacaggaagccatcagcagtgccatccagcttctagaagacccattacagagggagttcattcaaaagtgcctgcagtctgagcctgctcgcagaccaacagccagagaacttctgttccacccagcattgtttgaagtgccctcgctcaaactccttgcggcccactgcattgtgggacaccaacacatgatcccagagaacgctctagaggagatcaccaaaaacatggatactagtgccgtactggctgaaatccctgcaggaccaggaagagaaccagttcagactttgtactctcagtcaccagctctggaattagataaattccttgaagatgtcaggaatgggatctatcctctgacagcctttgggctgcctcggccccagcagccacagcaggaggaggtgacatcacctgtcgtgcccccctctgtcaagatccctggttctgagcatcatcctttcccctcccctctcttcctcccctctgcactttgtttacttgttttgcacagacgtgggcctgggccttctcagcagccgccttctagttgggggctagtcgctgatctgccggctcccgcccagcctgtgtggaaaggaggcccacgggcactaggggagccgaattctacaatcccgctggggcggccggggcgggagagaaaggtggtgctgcagtggtggccctggggggccattcgattcgcctcagttgctgctgtaataaaagtctactttttgctaaaa

SEQ ID NO: 457117 - DNA, 1495 bp, Homo sapiens
aggagacttcaggagagaatttggcttttggggcctctctctggagtgagactattcttcattgatgatggtcagattgtgggtgtctcccctactcccagtggctcctgacactatcaacaatcatgtgaagacttgtcgagaagagcagaagaatctacacttctttgcaccagagtatggagaagtcactaatgtgacaacagcagtggacatctactcctttggcatgtgtgcactggagatggcagtgctggagattcagggcaatggagagtcctcatatgtgccacaggaagccatcagcagtgccatccagcttctagaagacccattacagagggagttcattcaaaagtgcctgcagtctgagcctgctcgcagaccaacagccagagaacttctgttccacccagcattgtttgaagtgccctcgctcaaactccttgcggcccactgcattgtgggacaccaacacatgatcccagagaacgctctagaggagatcaccaaaaacatggatactagtgccgtactggctgaaatccctgcaggaccaggaagagaaccagttcagactttgtactctcagtcaccagctctggaattagataaattccttgaagatgtcaggaatgggatctatcctctgacagcctttgggctgcctcggccccagcagccacagcaggaggaggtgacatcacctgtcgtgcccccctctgtcaagactccgacacctgaaccagctgaggtggagactcgcaaggtggtgctgatgcagtgcaacattgagtcggtggaggagggagtcaaacaccacctgacacttctgctgaagttggaggacaaactgaaccggcacctgagctgtgacctgatgccaaatgagaatatccccgagttggcggctgagctggtgcagctgggcttcattagtgaggctgaccagagccggttgacttctctgctagaagagaccttgaacaagttcaattttgccaggaacagtaccctcaactcagccgctgtcaccgtctcctcttagagctcactcgggccaggccctgatctgcgctgtggctgtccctggacgtgctgcagccctcctgtcccttccccccagtcagtattaccctgtgaagccccttccctcctttattattcaggagggctgggggggctccctggttctgagcatcatcctttcccctcccctctcttcctcccctctgcactttgtttacttgttttgcacagacgtgggcctgggccttctcagcagccgccttctagttgggggctagtcgctgatctgccggctcccgcccagcctgtgtggaaaggaggcccacgggcactaggggagccgaattctacaatcccgctggggcggccggggcgggagagaaaggtggtgctgcagtggtggccctggggggccattcgattcgcctcagttgctgctgtaataaaagtctactttttgctaaaa

SEQ ID NO: 457118 - DNA, 1478 bp, Homo sapiens
ggggcccgcagttcggttgcgctgcggagcgcagctgtgagggagtcgctgtgatccggggccccggaacccgagctggagctgaagcgcaggctgcggggcgcggagtcgggagtgcaggcctgagtgttccttccagcatgtcggagggggagtcccagacagtacttagcagtggctcagacccaaaggtagaatcctcatcttcagctcctggcctgacatcagtgtcacctcctgtgacctccacaacctcagctgcttccccagaggaagaagaagaaagtgaagatgagtctgagattttggaagagtcgccctgtgggcgctggcagaagaggcgagaagaggtgaatcaacggaatgtaccaggtattgacagtgcatacctggccatggatacagaggaaggtgtagaggttgtgtggaatgaggtacagttctctgaacgcaagaactacaagctgcaggaggaaaaggttcgtgctgtgtttgataatctgattcaattggagcatcttaacattgttaagtttcacaaatattgggctgacattaaagagaacaaggccagggtcatttttatcacagaatacatgtcatctgggagtctgaagcaatttctgaagaagaccaaaaagaaccacaagacgatgaatgaaaaggcatggaagcgttggtgcacacaaatcctctctgccctaagctacctgcactcctgtgacccccccatcatccatgggaacctgacctgtgacaccatcttcatccagcacaacggactcatcaagattggctctgtggctcctgacactatcaacaatcatgtgaagacttgtcgagaagagcagaagaatctacacttctttgcaccagagtatggagaagtcactaatgtgacaacagcagtggacatctactcctttggcatgtgtgcactggagatggcagtgctggagattcagggcaatggagagtcctcatatgtgccacaggaagccatcagcagtgccatccagcttctagaagacccattacagagggagttcattcaaaagtgcctgcagtctgagcctgctcgcagaccaacagccagagaacttctgttccacccagcattgtttgaagtgccctcgctcaaactccttgcggcccactgcattgtgggacaccaacacatgatcccagagaacgctctagaggagatcaccaaaaacatggatactagtgccgtactggctgaaatccctgcaggaccaggaagagaaccagttcagactttgtactctcagtcaccagctctggaattagataaattccttgaagatgtcaggaatgggatctatcctctgacagcctttgggctgcctcggccccagcagccacagcagagaaaggtggtgctgcagtggtggccctggggggccattcgattcgcctcagttgctgctgtaataaaagtctactttttgctaaaa

SEQ ID NO: 457119 - DNA, 1257 bp, Homo sapiens
  misc_feature (1)..(1): n is a, c, g, or t
naaacttacggctaggtacgaggctgggtggtgggagagtcctcatatgtgccacaggaagccatcagcagtgccatccagcttctagaagacccattacagagggagttcattcaaaagtgcctgcagtctgagcctgctcgcagaccaacagccagagaacttctgttccacccagcattgtttgaagtgccctcgctcaaactccttgcggcccactgcattgtgggacaccaacacatgatcccagagaacgctctagaggagatcaccaaaaacatggatactagtgccgtactggctgaaatccctgcaggaccaggaagagaaccagttcagactttgtactctcagtcaccagctctggaattagataaattccttgaagatgtcaggaatgggatctatcctctgacagcctttgggctgcctcggccccagcagccacagcaggaggaggtgacatcacctgtcgtgcccccctctgtcaagactccgacacctgaaccagctgaggtggagactcgcaaggtggtgctgatgcagtgcaacattgagtcggtggaggagggagtcaaacaccacctgacacttctgctgaagttggaggacaaactgaaccggcacctgagctgtgacctgatgccaaatgagaatatccccgagttggcggctgagctggtgcagctgggcttcattagtgaggctgaccagagccggttgacttctctgctagaagagaccttgaacaagttcaattttgccaggaacagtaccctcaactcagccgctgtcaccgtctcctcttagagctcactcgggccaggccctgatctgcgctgtggctgtccctggacgtgctgcagccctcctgtcccttccccccagtcagtattaccctgtgaagccccttccctcctttattattcaggagggctgggggggctccctggttctgagcatcatcctttcccctcccctctcttcctcccctctgcactttgtttacttgttttgcacagacgtgggcctgggccttctcagcagccgccttctagttgggggctagtcgctgatctgccggctcccgcccagcctgtgtggaaaggaggcccacgggcactaggggagccgaattctacaatcccgctggggcggccggggcgggagagaaaggtggtgctgcagtggtggccctggggggccattcgattcgcctcagttgctgctgtaataaaagtctactttttgctaaaa

SEQ ID NO: 457120 - DNA, 1041 bp, Homo sapiens
cccactccatcatgccctccagacatgatcccagagaacgctctagaggagatcaccaaaaacatggatactagtgccgtactggctgaaatccctgcaggaccaggaagagaaccagttcagactttgtactctcagtcaccagctctggaattagataaattccttgaagatgtcaggaatgggatctatcctctgacagcctttgggctgcctcggccccagcagccacagcaggaggaggtgacatcacctgtcgtgcccccctctgtcaagactccgacacctgaaccagctgaggtggagactcgcaaggtggtgctgatgcagtgcaacattgagtcggtggaggagggagtcaaacaccacctgacacttctgctgaagttggaggacaaactgaaccggcacctgagctgtgacctgatgccaaatgagaatatccccgagttggcggctgagctggtgcagctgggcttcattagtgaggctgaccagagccggttgacttctctgctagaagagaccttgaacaagttcaattttgccaggaacagtaccctcaactcagccgctgtcaccgtctcctcttagagctcactcgggccaggccctgatctgcgctgtggctgtccctggacgtgctgcagccctcctgtcccttccccccagtcagtattaccctgtgaagccccttccctcctttattattcaggagggctgggggggctccctggttctgagcatcatcctttcccctcccctctcttcctcccctctgcactttgtttacttgttttgcacagacgtgggcctgggccttctcagcagccgccttctagttgggggctagtcgctgatctgccggctcccgcccagcctgtgtggaaaggaggcccacgggcactaggggagccgaattctacaatcccgctggggcggccggggcgggagagaaaggtggtgctgcagtggtggccctggggggccattcgattcgcctcagttgctgctgtaataaaagtctactttttgctaaaa

SEQ ID NO: 457121 - DNA, 995 bp, Homo sapiens
ggggcccgcagttcggttgcgctgcggagcgcagctgtgagggagtcgctgtgatccggggccccggaacccgagctggagctgaagcgcaggctgcggggcgcggagtcgggagtgcaggcctgagtgttccttccagcatgtcggagggggagtcccagacagtacttagcagtggctcagacccaaaggtagaatcctcatcttcagctcctggcctgacatcagtgtcacctcctgtgacctccacaacctcagctgcttccccagaggaagaagaagaaagtgaagatgagtctgagattttggaagagtcgccctgtgggcgctggcagaagaggcgagaagaggtgaatcaacggaatgtaccaggtattgacagtgcatacctggccatggatacagaggaaggtgtagaggttgtgtggaatgaggtacagttctctgaacgcaagaactacaagctgcaggaggaaaaggttcgtgctgtgtttgataatctgattcaattggagcatcttaacattgttaagtttcacaaatattgggctgacattaaagagaacaaggccagggtcatttttatcacagaatacatgtcatctgggagtctgaagcaatttctgaagaagaccaaaaagaaccacaagacgatgaatgaaaaggcatggaagcgttggtgcacacaaatcctctctgccctaagctacctgcactcctgtgacccccccatcatccatgggaacctgacctgtgacaccatcttcatccagcacaacggactcatcaagattggctctgtggctcctgacactatcaacaatcatgtgaagacttgtcgagaagagcagaagaatctacacttctttgcaccagagtatggagaagtcactaatgtgacaacagcagtggacatctactcctttggcatgtgtgcactggagatggcagtgctgatgtcttcctgtgcacatatgaggaaatccagccgactg

SEQ ID NO: 457122 - DNA, 717 bp, Homo sapiens
aaatcagctcggtacctcataggtcgcaggagggagtcaaaccacctgacacttctgctgaagttggaggacaaactgaaccggcacctgagctgtgacctgatgccaaatgagaatatccccgagttggcggctgagctggtgcagctgggcttcattagtgaggctgaccagagccggttgacttctctgctagaagagaccttgaacaagttcaattttgccaggaacagtaccctcaactcagccgctgtcaccgtctcctcttagagctcactcgggccaggccctgatctgcgctgtggctgtccctggacgtgctgcagccctcctgtcccttccccccagtcagtattaccctgtgaagccccttccctcctttattattcaggagggctgggggggctccctggttctgagcatcatcctttcccctcccctctcttcctcccctctgcactttgtttacttgttttgcacagacgtgggcctgggccttctcagcagccgccttctagttgggggctagtcgctgatctgccggctcccgcccagcctgtgtggaaaggaggcccacgggcactaggggagccgaattctacaatcccgctggggcggccggggcgggagagaaaggtggtgctgcagtggtggccctggggggccattcgattcgcctcagttgctgctgtaataaaagtctactttttgctaaaa

SEQ ID NO: 457123 - DNA, 705 bp, Homo sapiens
ttcgtgatctagaggtcccctgcgggtctcttcctgacacttctgctgaagttggaggacaaactgaaccggcacctgagctgtgacctgatgccaaatgagaatatccccgagttggcggctgagctggtgcagctgggcttcattagtgaggctgaccagagccggttgacttctctgctagaagagaccttgaacaagttcaattttgccaggaacagtaccctcaactcagccgctgtcaccgtctcctcttagagctcactcgggccaggccctgatctgcgctgtggctgtccctggacgtgctgcagccctcctgtcccttccccccagtcagtattaccctgtgaagccccttccctcctttattattcaggagggctgggggggctccctggttctgagcatcatcctttcccctcccctctcttcctcccctctgcactttgtttacttgttttgcacagacgtgggcctgggccttctcagcagccgccttctagttgggggctagtcgctgatctgccggctcccgcccagcctgtgtggaaaggaggcccacgggcactaggggagccgaattctacaatcccgctggggcggccggggcgggagagaaaggtggtgctgcagtggtggccctggggggccattcgattcgcctcagttgctgctgtaataaaagtctactttttgctaaaa

SEQ ID NO: 457124 - DNA, 719 bp, Homo sapiens
cctaaagcagtgggtggatctgactgacagtttagccctagtggggctgtctgaagggccccaggtccctcagtcccgtactgtactcaccccctcctgtttctttgtcagatgagaatatccccgagttggcggctgagctggtgcagctgggcttcattagtgaggctgaccagagccggttgacttctctgctagaagagaccttgaacaagttcaattttgccaggaacagtaccctcaactcagccgctgtcaccgtctcctcttagagctcactcgggccaggccctgatctgcgctgtggctgtccctggacgtgctgcagccctcctgtcccttccccccagtcagtattaccctgtgaagccccttccctcctttattattcaggagggctgggggggctccctggttctgagcatcatcctttcccctcccctctcttcctcccctctgcactttgtttacttgttttgcacagacgtgggcctgggccttctcagcagccgccttctagttgggggctagtcgctgatctgccggctcccgcccagcctgtgtggaaaggaggcccacgggcactaggggagccgaattctacaatcccgctggggcggccggggcgggagagaaaggtggtgctgcagtggtggccctggggggccattcgattcgcctcagttgctgctgtaataaaagtctactttttgctaaaa

SEQ ID NO: 457125 - DNA, 1080 bp, Homo sapiens
  misc_feature (1)..(1): n is a, c, g, or t
naaacttacggctaggtacgaggctgggtggtgggagagtcctcatatgtgccacaggaagccatcagcagtgccatccagcttctagaagacccattacagagggagttcattcaaaagtgcctgcagtctgagcctgctcgcagaccaacagccagagaacttctgttccacccagcattgtttgaagtgccctcgctcaaactccttgcggcccactgcattgtgggacaccaacacatgatcccagagaacgctctagaggagatcaccaaaaacatggatactagtgccgtactggctgaaatccctgcaggaccaggaagagaaccagttcagactttgtactctcagtcaccagctctggaattagataaattccttgaagatgtcaggaatgggatctatcctctgacagcctttgggctgcctcggccccagcagccacagcaggaggaggtgacatcacctgtcgtgcccccctctgtcaagactccgacacctgaaccagctgaggtggagactcgcaaggtggtgctgatgcagtgcaacattgagtcggtggaggagggagtcaaacaccacctgacacttctgctgaagttggaggacaaactgaaccggcacctgagctgtgacctgatgccaaatgagaatatccccgagttggcggctgagctggtgcagctgggcttcattagtgaggctgaccagagccggttgacttctctgctagaagagaccttgaacaagttcaattttgccaggaacagtaccctcaactcagccgctgtcaccgtccctctcttcctcccctctgcactttgtttacttgttttgcacagacgtgggcctgggccttctcagcagccgccttctagttgggggctagtcgctgatctgccggctcccgcccagcctgtgtggaaaggaggcccacgggcactaggggagccgaattctacaatcccgctggggcggccggggcgggagagaaaggtggtgctgcagtggtggccctggggggccattcgattcgcctcagttgctgctgtaataaaagtctactttttgctaaaa

SEQ ID NO: 457126 - DNA, 471 bp, Homo sapiens
tcctagcctcgccagtgtcctagcctcgccagtgtcctagcctcgccagtgtcctagcctcgccagtgtcctagcctcgccagtggtcctagcctcgccaggtcagtattaccctgtgaagccccttccctcctttattattcaggagggctgggggggctccctggttctgagcatcatcctttcccctcccctctcttcctcccctctgcactttgtttacttgttttgcacagacgtgggcctgggccttctcagcagccgccttctagttgggggctagtcgctgatctgccggctcccgcccagcctgtgtggaaaggaggcccacgggcactaggggagccgaattctacaatcccgctggggcggccggggcgggagagaaaggtggtgctgcagtggtggccctggggggccattcgattcgcctcagttgctgctgtaataaaagtctactttttgctaaaa

SEQ ID NO: 457127 - DNA, 607 bp, Homo sapiens
ggggcccgcagttcggttgcgctgcggagcgcagctgtgagggagtcgctgtgatccggggccccggaacccgagctggagctgaagcgcaggctgcggggcgcggagtcgggagtgcaggcctgagtgttccttccagcatgtcggagggggagtcccagacagtacttagcagtggctcagacccaaaggtagaatcctcatcttcagctcctggcctgacatcagtgtcacctcctgtgacctccacaacctcagctgcttccccagaggaagaagaagaaagtgaagatgagtctgagattttggaagagtcgccctgtgggcgctggcagaagaggcgagaagaggtgaatcaacggaatgtaccaggtattgacagtgcatacctggccatggatacagaggaaggtgtagaggttgtgtggaatgaggtacagttctctgaacgcaagaactacaagctgcaggaggaaaaggttcgtgctgtgtttgataatctgattcaattggagcatcttaacattgttaagtttcacaaatattgggctgacatcagtgtcaactcctgccccctccacaacctcagctgcttcccaaaaggaaa

SEQ ID NO: 457128 - DNA, 179 bp, Homo sapiens
gtaagtagtacctggttagtttcttacccatatttcctgatgtagttactccaaacagatttcagggcactactcttctgttctattctgcctctccccactttctttgaatcatatactgtcaagattagggcccctacgggtcttttaaagggtgcgtcctaatgccctaaccacga

SEQ ID NO: 457129 - DNA, 434 bp, Homo sapiens
tgctgatgcagtgcaacattgagtcggtggaggagggagtcaaacaccacgtaaggctcagggctagggttgcgcagggctagtagccagagggtagggaagaaaagtctcattttctgactgtcctattctccagctgacacttctgctgaagttggaggacaaactgaaccggcacctgagctgtgacctgatgccaagtgagtctctcctttccctcagaggatggagagtctatgagccttatcttttagggacatattcaggggtgggggaggtgacaaggcagtaacacattgactcacatagaatgactatcttagaccctaaagcagtgggtggatctgactgacagtttagccctagtggggctgtctgaagggccccaggtccctcagtcccgtactgtactcaccccctcctgtttctttgtc

SEQ ID NO: 457130 - DNA, 516 bp, Homo sapiens
tagcgttcagaggatcccctccataatctgtgccagtggacatctatcctttggcatgtgtgcactggagatggcagtgctggagattcagggcaatggagagtcctcatatgtgccacaggaagccatcagcagtgccatccagcttctagaagacccattacagagggtaaggatcttcaggatcactccctcctcaactgaccttcaaatgtcttctggtttttcttcctttgtacccactgggtatatgctcctaagagctagggaacataacagaaaggacacgaaaaatctataaacattttcttaggaggtgcctaccatgtttttgcatagaaacacacaggtaagggggttaagatggatgatgctggggttaaaagttgtgtgttggaagccgggcatggtggctcacgcctgtaatcccagcactttgggaggccgaggcgggcggatcacgaggtcaggggatcgagaccatcctggctaacatggtgaaaccctgtctctact

SEQ ID NO: 457131 - DNA, 2202 bp, Homo sapiens
cttactgctaggtacgaggctgggtttactgcggagcgcagctgtgagggagtcgctgtgatccggggccccggaacccgagctggagctgaagcgcaggctgcggggcgcggagtcgggagtgcaggcctgagtgttccttccagcatgtcggagggggagtcccagacagtacttagcagtggctcagacccaaaggtagaatcctcatcttcagctcctggcctgacatcagtgtcacctcctgtgacctccacaacctcagctgcttccccagaggaagaagaagaaagtgaagatgagtctgagattttggaagagtcgccctgtgggcgctggcagaagaggcgagaagaggtgaatcaacggaatgtaccaggtattgacagtgcatacctggccatggatacagaggaaggtgtagaggttgtgtggaatgaggtacagttctctgaacgcaagaactacaagctgcaggaggaaaaggttcgtgctgtgtttgataatctgattcaattggagcatcttaacattgttaagtttcacaaatattgggctgacattaaagagaacaaggccagggtcatttttatcacagaatacatgtcatctgggagtctgaagcaatttctgaagaagaccaaaaagaaccacaagacgatgaatgaaaaggcatggaagcgttggtgcacacaaatcctctctgccctaagctacctgcactcctgtgacccccccatcatccatgggaacctgacctgtgacaccatcttcatccagcacaacggactcatcaagattggctctgtggctcctgacactatcaacaatcatgtgaagacttgtcgagaagagcagaagaatctacacttctttgcaccagagtatggagaagtcactaatgtgacaacagcagtggacatctactcctttggcatgtgtgcactggagatggcagtgctggagattcagggcaatggagagtcctcatatgtgccacaggaagccatcagcagtgccatccagcttctagaagacccattacagagggagttcattcaaaagtgcctgcagtctgagcctgctcgcagaccaacagccagagaacttctgttccacccagcattgtttgaagtgccctcgctcaaactccttgcggcccactgcattgtgggacaccaacacatgatcccagagaacgctctagaggagatcaccaaaaacatggatactagtgccgtactggctgaaatccctgcaggaccaggaagagaaccagttcagactttgtactctcagtcaccagctctggaattagataaattccttgaagatgtcaggaatgggatctatcctctgacagcctttgggctgcctcggccccagcagccacagcaggaggaggtgacatcacctgtcgtgcccccctctgtcaagactccgacacctgaaccagctgaggtggagactcgcaaggtggtgctgatgcagtgcaacattgagtcggtggaggagggagtcaaacaccacctgacacttctgctgaagttggaggacaaactgaaccggcacctgagctgtgacctgatgccaaatgagaatatccccgagttggcggctgagctggtgcagctgggcttcattagtgaggctgaccagagccggttgacttctctgctagaagagaccttgaacaagttcaattttgccaggaacagtaccctcaactcagccgctgtcaccgtctcctcttagagctcactcgggccaggccctgatctgcgctgtggctgtccctggacgtgctgcagccctcctgtcccttccccccagtcagtattaccctgtgaagccccttccctcctttattattcaggagggctgggggggctccctggttctgagcatcatcctttcccctcccctctcttcctcccctctgcactttgtttacttgttttgcacagacgtgggcctgggccttctcagcagccgccttctagttgggggctagtcgctgatctgccggctcccgcccagcctgtgtggaaaggaggcccacgggcactaggggagccgaattctacaatcccgctggggcggccggggcgggagagaaaggtggtgctgcagtggtggccctggggggccattcgattcgcctcagttgctgctgtaataaaagtctactttttgctaaaa

SEQ ID NO: 457132 - DNA, 2280 bp, Homo sapiens
ggggcccgcagttcggttgcgctgcggagcgcagctgtgagggagtcgctgtgatccggggccccggaacccgagctggagctgaagcgcaggctgcggggcgcggagtcgggagtgcaggcctgagtgttccttccagcatgtcggagggggagtcccagacagtacttagcagtggctcagacccaaaggtagaatcctcatcttcagctcctggcctgacatcagtgtcacctcctgtgacctccacaacctcagctgcttccccagaggaagaagaagaaagtgaagatgagtctgagattttggaagagtcgccctgtgggcgctggcagaagaggcgagaagaggtgaatcaacggaatgtaccaggtattgacagtgcatacctggccatggatacagaggaaggtgtagaggttgtgtggaatgaggtacagttctctgaacgcaagaactacaagctgcaggaggaaaaggttcgtgctgtgtttgataatctgattcaattggagcatcttaacattgttaagtttcacaaatattgggctgacattaaagagaacaaggccagggtcatttttatcacagaatacatgtcatctgggagtctgaagcaatttctgaagaagaccaaaaagaaccacaagacgatgaatgaaaaggcatggaagcgttggtgcacacaaatcctctctgccctaagctacctgcactcctgtgacccccccatcatccatgggaacctgacctgtgacaccatcttcatccagcacaacggactcatcaagattggctctgtggctcctgacactatcaacaatcatgtgaagacttgtcgagaagagcagaagaatctacacttctttgcaccagagtatggagaagtcactaatgtgacaacagcagtggacatctactcctttggcatgtgtgcactggagatggcagtgctggagattcagggcaatggagagtcctcatatgtgccacaggaagccatcagcagtgccatccagcttctagaagacccattacagagggagttcattcaaaagtgcctgcagtctgagcctgctcgcagaccaacagccagagaacttctgttccacccagcattgtttgaagtgccctcgctcaaactccttgcggcccactgcattgtgggacaccaacacatgatcccagagaacgctctagaggagatcaccaaaaacatggatactagtgccgtactggctgaaatccctgcaggaccaggaagagaaccagttcagactttgtactctcagtcaccagctctggaattagataaattccttgaagatgtcaggaatgggatctatcctctgacagcctttgggctgcctcggccccagcagccacagcaggaggaggtgacatcacctgtcgtgcccccctctgtcaagactccgacacctgaaccagctgaggtggagactcgcaaggtggtgctgatgcagtgcaacattgagtcggtggaggagggagtcaaacaccacctgacacttctgctgaagttggaggacaaactgaaccggcacctgagctgtgacctgatgccaaatgagaatatccccgagttggcggctgagctggtgcagctgggcttcattagtgaggtgaggtttctgccttcatctgccctggctgcccccatgccttctcttctctcagcccccatcttactgagctcttctcccccaggctgaccagagccggttgacttctctgctagaagagaccttgaacaagttcaattttgccaggaacagtaccctcaactcagccgctgtcaccgtctcctcttagagctcactcgggccaggccctgatctgcgctgtggctgtccctggacgtgctgcagccctcctgtcccttccccccagtcagtattaccctgtgaagccccttccctcctttattattcaggagggctgggggggctccctggttctgagcatcatcctttcccctcccctctcttcctcccctctgcactttgtttacttgttttgcacagacgtgggcctgggccttctcagcagccgccttctagttgggggctagtcgctgatctgccggctcccgcccagcctgtgtggaaaggaggcccacgggcactaggggagccgaattctacaatcccgctggggcggccggggcgggagagaaaggtggtgctgcagtggtggccctggggggccattcgattcgcctcagttgctgctgtaataaaagtctactttttgctaaaa

SEQ ID NO: 457133 - DNA, 2133 bp, Homo sapiens
ggggcccgcagttcggttgcgctgcggagcgcagctgtgagggagtcgctgtgatccggggccccggaacccgagctggagctgaagcgcaggctgcggggcgcggagtcgggagtgcaggcctgagtgttccttccagcatgtcggagggggagtcccagacagtacttagcagtggctcagacccaaaggtagaatcctcatcttcagctcctggcctgacatcagtgtcacctcctgtgacctccacaacctcagctgcttccccagaggaagaagaagaaagtgaagatgagtctgagattttggaagagtcgccctgtgggcgctggcagaagaggcgagaagaggtgaatcaacggaatgtaccaggtattgacagtgcatacctggccatggatacagaggaaggtgtagaggttgtgtggaatgaggtacagttctctgaacgcaagaactacaagctgcaggaggaaaaggttcgtgctgtgtttgataatctgattcaattggagcatcttaacattgttaagtttcacaaatattgggctgacattaaagagaacaaggccagggtcatttttatcacagaatacatgtcatctgggagtctgaagcaatttctgaagaagaccaaaaagaaccacaagacgatgaatgaaaaggcatggaagcgttggtgcacacaaatcctctctgccctaagctacctgcactcctgtgacccccccatcatccatgggaacctgacctgtgacaccatcttcatccagcacaacggactcatcaagattggctctgtggctcctgacactatcaacaatcatgtgaagacttgtcgagaagagcagaagaatctacacttctttgcaccagagtatggagaagtcactaatgtgacaacagcagtggacatctactcctttggcatgtgtgcactggagatggcagtgctggagattcagggcaatggagagtcctcatatgtgccacaggaagccatcagcagtgccatccagcttctagaagacccattacagagggagttcattcaaaagtgcctgcagtctgagcctgctcgcagaccaacagccagagaacttctgttccacccagcattgtttgaagtgccctcgctcaaactccttgcggcccactgcattgtgggacaccaacacatgatcccagagaacgctctagaggagatcaccaaaaacatggatactagtgccgtactggctgaaatccctgcaggaccaggaagagaaccagttcagactttgtactctcagtcaccagctctggaattagataaattccttgaagatgtcaggaatgggatctatcctctgacagcctttgggctgcctcggccccagcagccacagcaggaggaggtgacatcacctgtcgtgcccccctctgtcaagactccgacacctgaaccagctgaggtggagactcgcaaggtggtgctgatgcagtgcaacattgagtcggtggaggagggagtcaaacaccacctgacacttctgctgaagttggaggacaaactgaaccggcacctgagctgtgacctgatgccaaatgagaatatccccgagttggcggctgagctggtgcagctgggcttcattagtgaggctgaccagagccggttgacttctctgctagaagagaccttgaacaagttcaattttgccaggaacagtaccctcaactcagccgctgtcaccgtctcctcttagagctcactcgggccaggccctgatctgcgctgtggctgtccctggacgtgctgcagccctcctgtcccttccccccagtcagtattaccctgtgaagccccttccccctctcttcctcccctctgcactttgtttacttgttttgcacagacgtgggcctgggccttctcagcagccgccttctagttgggggctagtcgctgatctgccggctcccgcccagcctgtgtggaaaggaggcccacgggcactaggggagccgaattctacaatcccgctggggcggccggggcgggagagaaaggtggtgctgcagtggtggccctggggggccattcgattcgcctcagttgctgctgtaataaaagtctactttttgctaaaa

SEQ ID NO: 457134 - DNA, 1904 bp, Homo sapiens
ggggcccgcagttcggttgcgctgcggagcgcagctgtgagggagtcgctgtgatccggggccccggaacccgagctggagctgaagcgcaggctgcggggcgcggagtcgggagtgcaggcctgagtgttccttccagcatgtcggagggggagtcccagacagtacttagcagtggctcagacccaaaggtagaatcctcatcttcagctcctggcctgacatcagtgtcacctcctgtgacctccacaacctcagctgcttccccagaggaagaagaagaaagtgaagatgagtctgagattttggaagagtcgccctgtgggcgctggcagaagaggcgagaagaggtgaatcaacggaatgtaccaggtattgacagtgcatacctggccatggatacagaggaaggtgtagaggttgtgtggaatgaggtacagttctctgaacgcaagaactacaagctgcaggaggaaaaggttcgtgctgtgtttgataatctgattcaattggagcatcttaacattgttaagtttcacaaatattgggctgacattaaagagaacaaggccagggtcatttttatcacagaatacatgtcatctgggagtctgaagcaatttctgaagaagaccaaaaagaaccacaagacgatgaatgaaaaggcatggaagcgttggtgcacacaaatcctctctgccctaagctacctgcactcctgtgacccccccatcatccatgggaacctgacctgtgacaccatcttcatccagcacaacggactcatcaagattggctctgtggctcctgacactatcaacaatcatgtgaagacttgtcgagaagagcagaagaatctacacttctttgcaccagagtatggagacatgatcccagagaacgctctagaggagatcaccaaaaacatggatactagtgccgtactggctgaaatccctgcaggaccaggaagagaaccagttcagactttgtactctcagtcaccagctctggaattagataaattccttgaagatgtcaggaatgggatctatcctctgacagcctttgggctgcctcggccccagcagccacagcaggaggaggtgacatcacctgtcgtgcccccctctgtcaagactccgacacctgaaccagctgaggtggagactcgcaaggtggtgctgatgcagtgcaacattgagtcggtggaggagggagtcaaacaccacctgacacttctgctgaagttggaggacaaactgaaccggcacctgagctgtgacctgatgccaaatgagaatatccccgagttggcggctgagctggtgcagctgggcttcattagtgaggctgaccagagccggttgacttctctgctagaagagaccttgaacaagttcaattttgccaggaacagtaccctcaactcagccgctgtcaccgtctcctcttagagctcactcgggccaggccctgatctgcgctgtggctgtccctggacgtgctgcagccctcctgtcccttccccccagtcagtattaccctgtgaagccccttccctcctttattattcaggagggctgggggggctccctggttctgagcatcatcctttcccctcccctctcttcctcccctctgcactttgtttacttgttttgcacagacgtgggcctgggccttctcagcagccgccttctagttgggggctagtcgctgatctgccggctcccgcccagcctgtgtggaaaggaggcccacgggcactaggggagccgaattctacaatcccgctggggcggccggggcgggagagaaaggtggtgctgcagtggtggccctggggggccattcgattcgcctcagttgctgctgtaataaaagtctactttttgctaaaa

SEQ ID NO: 457135 - DNA, 2226 bp, Homo sapiens
ggggcccgcagttcggttgcgctgcggagcgcagctgtgagggagtcgctgtgatccggggccccggaacccgagctggagctgaagcgcaggctgcggggcgcggagtcgggagtgcaggcctgagtgttccttccagcatgtcggagggggagtcccagacagtacttagcagtggctcagacccaaaggtagaatcctcatcttcagctcctggcctgacatcagtgtcacctcctgtgacctccacaacctcagctgcttccccagaggaagaagaagaaagtgaagatgagtctgagattttggaagagtcgccctgtgggcgctggcagaagaggcgagaagaggtgaatcaacggaatgtaccaggtattgacagtgcatacctggccatggatacagaggaaggtgtagaggttgtgtggaatgaggtacagttctctgaacgcaagaactacaagctgcaggaggaaaaggttcgtgctgtgtttgataatctgattcaattggagcatcttaacattgttaagtttcacaaatattgggctgacattaaagagaacaaggccagggtcatttttatcacagaatacatgtcatctgggagtctgaagcaatttctgaagaagaccaaaaagaaccacaagacgatgaatgaaaaggcatggaagcgttggtgcacacaaatcctctctgccctaagtggcccctctaacagcccagtgcccccacagctacctgcactcctgtgacccccccatcatccatgggaacctgacctgtgacaccatcttcatccagcacaacggactcatcaagattggctctgtggctcctgacactatcaacaatcatgtgaagacttgtcgagaagagcagaagaatctacacttctttgcaccagagtatggagaagtcactaatgtgacaacagcagtggacatctactcctttggcatgtgtgcactggagatggcagtgctggagattcagggcaatggagagtcctcatatgtgccacaggaagccatcagcagtgccatccagcttctagaagacccattacagagggagttcattcaaaagtgcctgcagtctgagcctgctcgcagaccaacagccagagaacttctgttccacccagcattgtttgaagtgccctcgctcaaactccttgcggcccactgcattgtgggacaccaacacatgatcccagagaacgctctagaggagatcaccaaaaacatggatactagtgccgtactggctgaaatccctgcaggaccaggaagagaaccagttcagactttgtactctcagtcaccagctctggaattagataaattccttgaagatgtcaggaatgggatctatcctctgacagcctttgggctgcctcggccccagcagccacagcaggaggaggtgacatcacctgtcgtgcccccctctgtcaagactccgacacctgaaccagctgaggtggagactcgcaaggtggtgctgatgcagtgcaacattgagtcggtggaggagggagtcaaacaccacctgacacttctgctgaagttggaggacaaactgaaccggcacctgagctgtgacctgatgccaaatgagaatatccccgagttggcggctgagctggtgcagctgggcttcattagtgaggctgaccagagccggttgacttctctgctagaagagaccttgaacaagttcaattttgccaggaacagtaccctcaactcagccgctgtcaccgtctcctcttagagctcactcgggccaggccctgatctgcgctgtggctgtccctggacgtgctgcagccctcctgtcccttccccccagtcagtattaccctgtgaagccccttccctcctttattattcaggagggctgggggggctccctggttctgagcatcatcctttcccctcccctctcttcctcccctctgcactttgtttacttgttttgcacagacgtgggcctgggccttctcagcagccgccttctagttgggggctagtcgctgatctgccggctcccgcccagcctgtgtggaaaggaggcccacgggcactaggggagccgaattctacaatcccgctggggcggccggggcgggagagaaaggtggtgctgcagtggtggccctggggggccattcgattcgcctcagttgctgctgtaataaaagtctactttttgctaaaa

SEQ ID NO: 457136 - DNA, 1641 bp, Homo sapiens
gattaaagagaacaaggccaggtcatttttatcacagaatacatgtcatctgggagtctgaagcaatttctgaagaagaccaaaaagaaccacaagacgatgaatgaaaaggcatggaagcgttggtgcacacaaatcctctctgccctaagctacctgcactcctgtgacccccccatcatccatgggaacctgacctgtgacaccatcttcatccagcacaacggactcatcaagattggctctgtggctcctgacactatcaacaatcatgtgaagacttgtcgagaagagcagaagaatctacacttctttgcaccagagtatggagaagtcactaatgtgacaacagcagtggacatctactcctttggcatgtgtgcactggagatggcagtgctggagattcagggcaatggagagtcctcatatgtgccacaggaagccatcagcagtgccatccagcttctagaagacccattacagagggagttcattcaaaagtgcctgcagtctgagcctgctcgcagaccaacagccagagaacttctgttccacccagcattgtttgaagtgccctcgctcaaactccttgcggcccactgcattgtgggacaccaacacatgatcccagagaacgctctagaggagatcaccaaaaacatggatactagtgccgtactggctgaaatccctgcaggaccaggaagagaaccagttcagactttgtactctcagtcaccagctctggaattagataaattccttgaagatgtcaggaatgggatctatcctctgacagcctttgggctgcctcggccccagcagccacagcaggaggaggtgacatcacctgtcgtgcccccctctgtcaagactccgacacctgaaccagctgaggtggagactcgcaaggtggtgctgatgcagtgcaacattgagtcggtggaggagggagtcaaacaccacctgacacttctgctgaagttggaggacaaactgaaccggcacctgagctgtgacctgatgccaaatgagaatatccccgagttggcggctgagctggtgcagctgggcttcattagtgaggctgaccagagccggttgacttctctgctagaagagaccttgaacaagttcaattttgccaggaacagtaccctcaactcagccgctgtcaccgtctcctcttagagctcactcgggccaggccctgatctgcgctgtggctgtccctggacgtgctgcagccctcctgtcccttccccccagtcagtattaccctgtgaagccccttccctcctttattattcaggagggctgggggggctccctggttctgagcatcatcctttcccctcccctctcttcctcccctctgcactttgtttacttgttttgcacagacgtgggcctgggccttctcagcagccgccttctagttgggggctagtcgctgatctgccggctcccgcccagcctgtgtggaaaggaggcccacgggcactaggggagccgaattctacaatcccgctggggcggccggggcgggagagaaaggtggtgctgcagtggtggccctggggggccattcgattcgcctcagttgctgctgtaataaaagtctactttttgctaaaa

SEQ ID NO: 457137 - DNA, 1713 bp, Homo sapiens
gagatacatgctttcagtgggatccccagaaacgaccaacagctagtcagtgcacttcgatatccttacttccaagttggacacccactagccagctacaacctgggacccggcacaacctgggatgtgctggtcccagggttcttggtgaggcgtagaaccacatagacgatgaatgaaaaggcatggaagcgttggtgcacacaaatcctctctgccctaagctacctgcactcctgtgacccccccatcatccatgggaacctgacctgtgacaccatcttcatccagcacaacggactcatcaagattggctctgtggctcctgacactatcaacaatcatgtgaagacttgtcgagaagagcagaagaatctacacttctttgcaccagagtatggagaagtcactaatgtgacaacagcagtggacatctactcctttggcatgtgtgcactggagatggcagtgctggagattcagggcaatggagagtcctcatatgtgccacaggaagccatcagcagtgccatccagcttctagaagacccattacagagggagttcattcaaaagtgcctgcagtctgagcctgctcgcagaccaacagccagagaacttctgttccacccagcattgtttgaagtgccctcgctcaaactccttgcggcccactgcattgtgggacaccaacacatgatcccagagaacgctctagaggagatcaccaaaaacatggatactagtgccgtactggctgaaatccctgcaggaccaggaagagaaccagttcagactttgtactctcagtcaccagctctggaattagataaattccttgaagatgtcaggaatgggatctatcctctgacagcctttgggctgcctcggccccagcagccacagcaggaggaggtgacatcacctgtcgtgcccccctctgtcaagactccgacacctgaaccagctgaggtggagactcgcaaggtggtgctgatgcagtgcaacattgagtcggtggaggagggagtcaaacaccacctgacacttctgctgaagttggaggacaaactgaaccggcacctgagctgtgacctgatgccaaatgagaatatccccgagttggcggctgagctggtgcagctgggcttcattagtgaggctgaccagagccggttgacttctctgctagaagagaccttgaacaagttcaattttgccaggaacagtaccctcaactcagccgctgtcaccgtctcctcttagagctcactcgggccaggccctgatctgcgctgtggctgtccctggacgtgctgcagccctcctgtcccttccccccagtcagtattaccctgtgaagccccttccctcctttattattcaggagggctgggggggctccctggttctgagcatcatcctttcccctcccctctcttcctcccctctgcactttgtttacttgttttgcacagacgtgggcctgggccttctcagcagccgccttctagttgggggctagtcgctgatctgccggctcccgcccagcctgtgtggaaaggaggcccacgggcactaggggagccgaattctacaatcccgctggggcggccggggcgggagagaaaggtggtgctgcagtggtggccctggggggccattcgattcgcctcagttgctgctgtaataaaagtctactttttgctaaaa

SEQ ID NO: 457138 - DNA, 1127 bp, Homo sapiens
tacccgttatcattaggaggtcagccagagaacttctgttccacccagcattgtttgaagtgccctcgctcaaactccttgcggcccactgcattgtgggacaccaacacatgatcccagagaacgctctagaggagatcaccaaaaacatggatactagtgccgtactggctgaaatccctgcaggaccaggaagagaaccagttcagactttgtactctcagtcaccagctctggaattagataaattccttgaagatgtcaggaatgggatctatcctctgacagcctttgggctgcctcggccccagcagccacagcaggaggaggtgacatcacctgtcgtgcccccctctgtcaagactccgacacctgaaccagctgaggtggagactcgcaaggtggtgctgatgcagtgcaacattgagtcggtggaggagggagtcaaacaccacctgacacttctgctgaagttggaggacaaactgaaccggcacctgagctgtgacctgatgccaaatgagaatatccccgagttggcggctgagctggtgcagctgggcttcattagtgaggctgaccagagccggttgacttctctgctagaagagaccttgaacaagttcaattttgccaggaacagtaccctcaactcagccgctgtcaccgtctcctcttagagctcactcgggccaggccctgatctgcgctgtggctgtccctggacgtgctgcagccctcctgtcccttccccccagtcagtattaccctgtgaagccccttccctcctttattattcaggagggctgggggggctccctggttctgagcatcatcctttcccctcccctctcttcctcccctctgcactttgtttacttgttttgcacagacgtgggcctgggccttctcagcagccgccttctagttgggggctagtcgctgatctgccggctcccgcccagcctgtgtggaaaggaggcccacgggcactaggggagccgaattctacaatcccgctggggcggccggggcgggagagaaaggtggtgctgcagtggtggccctggggggccattcgattcgcctcagttgctgctgtaataaaagtctactttttgctaaaa

SEQ ID NO: 457139 - DNA, 1027 bp, Homo sapiens
ggctgtctagaggatccgcggaaggggacaggaggagatcaccaaaaacatggatactagtgccgtactggctgaaatccctgcaggaccaggaagagaaccagttcagactttgtactctcagtcaccagctctggaattagataaattccttgaagatgtcaggaatgggatctatcctctgacagcctttgggctgcctcggccccagcagccacagcaggaggaggtgacatcacctgtcgtgcccccctctgtcaagactccgacacctgaaccagctgaggtggagactcgcaaggtggtgctgatgcagtgcaacattgagtcggtggaggagggagtcaaacaccacctgacacttctgctgaagttggaggacaaactgaaccggcacctgagctgtgacctgatgccaaatgagaatatccccgagttggcggctgagctggtgcagctgggcttcattagtgaggctgaccagagccggttgacttctctgctagaagagaccttgaacaagttcaattttgccaggaacagtaccctcaactcagccgctgtcaccgtctcctcttagagctcactcgggccaggccctgatctgcgctgtggctgtccctggacgtgctgcagccctcctgtcccttccccccagtcagtattaccctgtgaagccccttccctcctttattattcaggagggctgggggggctccctggttctgagcatcatcctttcccctcccctctcttcctcccctctgcactttgtttacttgttttgcacagacgtgggcctgggccttctcagcagccgccttctagttgggggctagtcgctgatctgccggctcccgcccagcctgtgtggaaaggaggcccacgggcactaggggagccgaattctacaatcccgctggggcggccggggcgggagagaaaggtggtgctgcagtggtggccctggggggccattcgattcgcctcagttgctgctgtaataaaagtctactttttgctaaaa

SEQ ID NO: 457140 - DNA, 1226 bp, Homo sapiens
tactataaagacccatcgcacgagggaagttcgataccgctttctcgttatgaacttctgacgagaaaggctcagagactacccatggaggccctgtaggtcacgtgtctagactcagcagttggtgtaattggcccaagtcatagtccttgtcgcctcatgtatcatgaagatgtctagagttgtgtcgcaagcctcagtgctctctaccgaggattgagcaacaaggcataggatccctcaggttggtgttagtggctcgaaaatccatgacgcgcgtacacgtgacccataagacaaattcaagacttatgtactctcagtcaccagctctggaattagataaattccttgaagatgtcaggaatgggatctatcctctgacagcctttgggctgcctcggccccagcagccacagcaggaggaggtgacatcacctgtcgtgcccccctctgtcaagactccgacacctgaaccagctgaggtggagactcgcaaggtggtgctgatgcagtgcaacattgagtcggtggaggagggagtcaaacaccacctgacacttctgctgaagttggaggacaaactgaaccggcacctgagctgtgacctgatgccaaatgagaatatccccgagttggcggctgagctggtgcagctgggcttcattagtgaggctgaccagagccggttgacttctctgctagaagagaccttgaacaagttcaattttgccaggaacagtaccctcaactcagccgctgtcaccgtctcctcttagagctcactcgggccaggccctgatctgcgctgtggctgtccctggacgtgctgcagccctcctgtcccttccccccagtcagtattaccctgtgaagccccttccctcctttattattcaggagggctgggggggctccctggttctgagcatcatcctttcccctcccctctcttcctcccctctgcactttgtttacttgttttgcacagacgtgggcctgggccttctcagcagccgccttctagttgggggctagtcgctgatctgccggctcccgcccagcctgtgtggaaaggaggcccacgggcactaggggagccgaattctacaatcccgctggggcggccggggcgggagagaaaggtggtgctgcagtggtggccctggggggccattcgattcgcctcagttgctgctgtaataaaagtctactttttgctaaaa

SEQ ID NO: 457141 - DNA, 871 bp, Homo sapiens
  misc_feature (674)..(674): n is a, c, g, or t
  misc_feature (758)..(758): n is a, c, g, or t
  misc_feature (830)..(830): n is a, c, g, or t
  misc_feature (838)..(838): n is a, c, g, or t
ggggcccgcagttcggttgcgctgcggagcgcagctgtgagggagtcgctgtgatccggggccccggaacccgagctggagctgaagcgcaggctgcggggcgcggagtcgggagtgcaggcctgagtgttccttccagcatgtcggagggggagtcccagacagtacttagcagtggctcagacccaaaggtagaatcctcatcttcagctcctggcctgacatcagtgtcacctcctgtgacctccacaacctcagctgcttccccagaggaagaagaagaaagtgaagatgagtctgagattttggaagagtcgccctgtgggcgctggcagaagaggcgagaagaggtgaatcaacggaatgtaccaggtattgacagtgcatacctggccatggatacagaggaaggtgtagaggttgtgtggaatgaggtacagttctctgaacgcaagaactacaagctgcaggaggaaaaggttcgtgctgtgtttgataatctgattcaattggagcatcttaacattgttaagtttcacaaatattgggctgacattaaagagaacaaggccagggtcatttttatcacagaatacatgtcatctgggagtctgaagcaatttctgaagaagaccaaaaagaaccacaagacgatgaatgaaaaggcatggaancgttgggtgcacacaaatcctctctgcccctaaagctacctgcactccctgtggacccccccatcaatccaatggggaaacctngaccctgttgacaaccaatcttcaatccaagccacaaacgggactcatcaaagaattggggtcctgttgggntccctggncaaccaattcaaacaaatcaatggtgtaagaac

SEQ ID NO: 457142 - DNA, 562 bp, Homo sapiens
tatgggctactttatttggccttatggccatataagaagcataaatgtattggccattactctaatggcctataacttgtcaggatatgtttaagctttgataaagtttgtttttctttagttctccaagggacttagttggattttgtctttaatcttgcagcatccacaaatccagaagaaatctcaatatatcaaatacctttgttgtgatgatgtgaggacactgcatcagtgggtcaatgggatccgcattgcaaaggcatgtctccttttgatttgatgatggaataatgaggtgtttgtcgatgatatagttttcgttttcatgacaactattctgactatttcatgttcatggatttgccagtgcctacgtttttcaggcctaagtttcaagttttaaatgttgtcttttttccttgtttatagggataaacttttaacatttggtatacttggaataatattgctggtaaaagcttgtgtagtatcaaagtgatttattttggctttggagaatgcattatatgattcttaaatagtagagtttagcctaagc

SEQ ID NO: 457143 - DNA, 495 bp, Homo sapiens
caaccccgccttctgcgtctcggctggacgcgagcacactcggctccgccgccgccgccgccgccgcggggcgctgcggccgccccgcccccgctcccgccgccgcccgccagtcagtcagtcagtcagtcagtcagtcagtcagtcagtcagtcactgagcgcgcggcgcgggagctgctggcagtcgctgcgtctctggcgagggagcgccgcgcctggggaggaggcggaggcagcggctggaggagcgcgagcggcggtttccttgcccggggccgcgggaaggccgaccgactgccgcgatggagcagctatcagatgaagaaattgatcatggtgctgaagaagacagtgacaaggaagatcaggacctggacaaaatgtttggagcctggcttggagaactagacaaactcactcaggtgagtagtgcttgaaaaactggttgaggatttgaagtcaccattgtgttaaaagtttaatgtgcagaaga

SEQ ID NO: 457144 - DNA, 387 bp, Homo sapiens
atccgaattcctaagttacaattctggcgtgaccttaaggcaggggtattaaaaaggctgattctcaatgtaatgcagacatgattgagagactcctctactgatggttcattaattcttttattgtttagagttgatttcatgcaagactgggtgtcaggataccaataatgttatgtgaatcatttattataattatcagtctctcatggtgaaatatttaacactaatctgagatttcttaattccaaggtaagggaagttttctagtagaaaatactggctgtgtttatgatgaaatgagtaaaataacttggtgctgttgtacacagcacttgaccttgtgtaaaagatctaactagacatacatatgaatattgtcagaat

SEQ ID NO: 457145 - DNA, 9689 bp, Homo sapiens
  misc_feature (3124)..(3124): n is a, c, g, or t
caaccccgccttctgcgtctcggctggacgcgagcacactcggctccgccgccgccgccgccgccgcggggcgctgcggccgccccgcccccgctcccgccgccgcccgccagtcagtcagtcagtcagtcagtcagtcagtcagtcagtcagtcactgagcgcgcggcgcgggagctgctggcagtcgctgcgtctctggcgagggagcgccgcgcctggggaggaggcggaggcagcggctggaggagcgcgagcggcggtttccttgcccggggccgcgggaaggccgaccgactgccgcgatggagcagctatcagatgaagaaattgatcatggtgctgaagaagacagtgacaaggaagatcaggacctggacaaaatgtttggagcctggcttggagaactagacaaactcactcagagtttggattctgacaagcccatggaaccagtaaaaagatctcctcttcgccaggaaacaaacatggccaacttttcttaccgcttctccatatacaacttgaatgaagctctgaatcagggagagactgtggatctggatgccttgatggctgatctttgctctatagagcaggagctcagcagcattggttcaggaaacagtaagcgtcaaatcacagaaacgaaagctactcagaaattgcctgttagccgacatacattgaaacatggcaccttgaaaggattatcttcttcatctaataggatagctaaaccttcccatgccagctactccttggacgacgtcactgcacagttagaacaggcctctttgagtatggatgaggctgctcagcaatctgtactagaagatactaaacccttagtaactaatcagcacagaagaaccgcgtcagcaggcacagtgagtgatgctgaagtacactctattagtaattcctcccattccagcatcacttccgcagcctccagcatggactctttggatattgataaagtaacacgccctcaagagctggatttgacacatcaagggcagccaattactgaggaagaacaggcagcaaaattgaaagctgagaagatcagagttgccctagagaaaattaaagaggcacaagtgaaaaagctggtgatcagagtccacatgtctgatgacagttctaaaacaatgatggtggatgagaggcagacagtaagacaagtactggataacctgatggacaaatcccactgcggttatagtttagactggtcactggtagaaaccgtttctgaattacaaatggagagaatctttgaagaccatgaaaacttggttgaaaatcttcttaattggacaagagatagccaaaacaagcttatatttatggagcgtatagaaaaatatgcacttttcaaaaacccacagaattatcttttggggaaaaaagaaacagctgagatggcagatagaaacaaagaagtcctcttggaggaatgtttttgtggaagttctgtaactgtaccagaaattgaaggagtcctttggttgaaggatgatggcaagaagtcctggaaaaagcgttattttctcttgcgagcatctggtatctactatgttcccaaaggaaaagcaaaggtctctcgggatctggtgtgctttctccagctggatcatgtcaacgtttattatggccaggactatcggaacaaatacaaagcacctacagactattgtctggtgctgaagcatccacaaatccagaagaaatctcaatatatcaaatacctttgttgtgatgatgtgaggacactgcatcagtgggtcaatgggatccgcattgcaaagtatgggaagcagctctatatgaactaccaagaagccttgaagaggacagagtcagcctatgattggacttccttatccagctccagcattaaatcgggatccagttcttccagcatcccagagtctcagtcaaaccactccaatcagtctgatagcggagtttctgacacccagccagcaggacacgtccgttcccagagcattgtgagctccgtattctctgaagcctggaaacgaggcactcagttggaagagtccagcaaggccagaatggagtctatgaatcggccctacacttcacttgtgccccctttatccccgcaacctaagatagtcaccccctacactgcttcacagccttcaccacctctacctcctccgccacccccacctcctcctccaccaccccctccaccaccccctcctcccccactccccagccagtctgcaccttctgcaggctcagcagccccaatgttcgtcaagtacagcacaataacacggctacagaatgcgtctcagcattcaggggccctgtttaagccgccaacacccccagtgatgcagtcacagtcagtgaagcctcagatcctggtaccccccaatggagttgttccaccaccccctccccctcctccacccccaaccccaggctctgccatggcccagctaaagcctgcaccgtgtgccccatcccttccacagttcagtgccccgcctcctccactgaagatccatcaagttcagcatattactcaggtggctcccccaacaccccccccacctcctcctatccctgcacccctccctccccaagctcccccaaaaccccttgtgaccatccccgcaccaaccagcaccaagactgtggcacctgttgtgactcaagctgcaccacccacacctactcctccagtgcccccagcaaaaaagcagccagctttccctgcttcttacattccaccctctccccctacccctcctgttccagtacccccgccaacattacccaagcaacagagcttctgtgcaaaaccccctccctctccactgtcaccggtgccctcggtcgtgaagcagatagccagccagtttccaccccctccaactccccctgccatggaatctcagcccttaaagcctgtcccagcaaatgtagctccacagtcccctcctgcagtaaaagcaaagcccaagtggcagcccagctccatcccagtcccttctccggacttccctcctccccctcctgaaagcagcctggtgtttcctcctccacccccatcacctgtcccagccccaccaccnccacctccacccacagcttctcctacccctgacaaaagtggatctccaggcaaaaagaccagtaagacgtccagccctgggggaaagaaaccacccccaaccccacagcgcaactccagcattaaatccagcagtggtgcagagcaccccgagcccaagagaccctcggtggacagtctagtcagcaagtttacaccgccagcagaatcagggtctcccagcaaggagaccctaccacctcctgcagcaccccccaagcctggaaaactcaatctttctggagtcaaccttcctggagttctccaacaagggtgtgtgtcagcaaaagcccctgttctgagtgggcgtggaaaggactccgtggtggaatttccttctcctccatccgattctgattttccaccccctccacctgaaacagagcttcctctgccccccattgagattccagcagttttctcgggaaacacctctccaaaagtggcagtcgttaatcctcaaccacaacaatggtctaaaatgtcagtgaagaaggcccctccacccacacgacccaaacggaatgatagcacccgcctcactcaagctgagatttctgagcagccaacaatggccacagttgtgccacaagtgcccacctctcccaaatccagccttagtgtccagcctggattcctggctgacctcaacaggacactgcaacgaaagtccatcactcggcacggctcactctcctcccgcatgtccagagcagaaccaacagccaccatggatgatatggcattgcctccaccaccccctgaactgctgtctgatcaacagaaggctggttacggaggcagtcatatatcaggctatgcaacgttgcggagaggaccccctcctgctccccccaaaagagaccagaacaccaagctctccagagactggtagccaccataggactttattttcatgatatctgtaatcactgctacaatcagctcacctgatcatctgtgaattcaggtgttcagagcctcctggtatgatgttattcaggtagtgtccagctatatgtgtatgtgtgtgtgtacacgtgcatgtacacacagctgtacagtgtgtgtatatatgtatacatatatgtatgtgtatgtgtatatagagagagagctgagagttattctatttattccttttctctcctaatctgaaaatgggtgttctgtattttgggtggaagaggcatagaaggggatgtgtgttgtctcttaagatttctatatcatgtggattggaccaaaaacttctaatcacttatttagaaggtatttataagtgtctgtccatgtgtagcctattcgtgcatgttgtgtattatataactaaggaatagatgtagaatgtgctatttctggttgagaaaaatcaccagaatgtttggtgtatctataaggcttttgtgtttgtttttccccagttggctgaagttagaattgcttgactgacacttcattgctatacatgaaggggcactttaaatcaggaaaatctctcagcttcatagaacgggtaactagtgcaggatggggaaatgttcacagacatcatctgtatgtggttgtgcatagaaagtaaatacatggcgtaattaactcagctgttctagctgcagtactgctgcagtgatccacccacatttaggatgtgctgacagataagctctttgcctacaatacatggataattagtgctataattctggatagttcctttttagtactgttttatgaagctttatcaacttggcttcatgatcctcactttgattgattttaagaggatggataacacagttatctctgtaatgttctgtcccagtatgtctttgggtcaccagttaccttcttaaaatatgtgctttaggtaggtgttattacatatctgtagacaattggtatatgaaatatacacatcctgtgccccaatatggtgcattatgaaaaacaaaatcattttctaaaatgcattttttgagcattgctctatagaagggaagggtgatgagagaacagaactggcccctgtacaggtgtcattaatctggttgtatatgggttataatatgtaatacaaaaagctcattaagtatgggactacatggagagggaagacagtttcatttatagctactggggctaccaggacccttgctgactgcagcctggttgtgattagttcaggttactaggtgttctgatggagtgggacagtccaagtccagtaactgacattacgttttatgcgtgtgcagtttggtataacgtggagtcagtgctctaacgacacactatacttctatatgcttttttctgtgaattttccttggtacatgagagaaataagtactctcatcaacttatgataaattggactattaggaataaaacaatctcagagcagctcctaaacaagagaataaaaatgggccatcccagcacttataaggggagcacatcttgtaatgaaagtctgtgcctattgttaatgattaccaatgcaaactgcagaaatcagttgacattgtcccacaaggaaaaagtgatgccagtaaagtgggggaagagatggtaaataattctagaatgagcaaaagtgcttaattagtacagtatactcaaggtcttgcataacccacactccacgaaaaccgcatcgtaaacagagagtgaacagcacctctccattgctacatctccagaatattgttcggttatgttcatgtggttatggagcaataagaatatataccattaatttttaggtctttcaaattgttcaccaagttttgtgtttgatatttatgaagtgatctttaacacatctgcattgttaatttaagcatgcacagaaatttgggtaatgtttgagtagattgccaagcgctactgtgattcatgaatgaatttctcatagtcttctgcctgcagttttatagtttgaggggcacccatatttgtgggttagagttagtaagaatatgaatccagttatcaaagtattcatccctgaggttttgagttttattgtggtggtgattttctcatgagaaggtagacaacacttcagtttttcttgagggggaaaaaatgtacccgctaaccttttttcacccatgatttgagccctaaaacaacagcctttatgttttcagtgcaggatttcttggaatttcttgcttgtatcaatcctgatgatagccatcctgaacagatgcttctggtctgttttcctggaatagcagacatccttttgaacactaatgatgccaggaagagagtaaggctagaggaggagactcattttaaccccagtccagtggcttgtccgacaacaggccatttccctttacattcctccacagacagaaatggctattaaaaatgttttaacctcatgtatgaactgaatttaaaaaaccactaaagtgatactttatacttctgttttactccctagtgggttttctttaatttggatttttgttgggatgtagcttttcctagactgtatttctgtagctctttttctctggtgtattcatggaaagcatctactgccgcacgacactagtactgtgccttctttcactgccctctgctctgcagctctcacccagcttggctgcttcaagtctgtgcagttgacttggctgtactgaaaagtgaacagcatggattaactcatcctgctgctgagggcagtgcaaacaggtgcttattagaggtagtgacttgcttaattagtgacactcctaatttctactatggataatttcaaagtagaatcactctatgcttagagttttggcaccaatgctgtagggcagcagaatctattctcagtaaaataacttatggtttattagatattctgtattggattttaccagcttgacttttactgctcagatgctttctttcccccccttagacgctgtaattctcttgggaagagtaactattcttaaggtttttacagatacccaccttagttgtaaattggatagtttatatttctgggactttttaaatgaaaatgtggaatgttaagttacaaaagacttttcatcagaaaatttcaaacaaagtaaacatggcgttttatagtcctctaaaatctaggtgctcccacccaccaaaggcatatcctgcaaagggctgtgaactatcttggtgaactgtcttgggtcccctttccatgtatgttttcttgtcactgaaaacaaacaacgctgagtttatcaagaaaatttaaattgggggatcataataattccaaccaagtgacaactctgacatcaaggttattaggagctgtacatccaattcaagttttatttgctgctattctgggagaataaacttgtatatggagaataaactaataaacttgtatcgaggaaatccataaagttataaattagcctgaaaaatatttcaggtaatggtgtggattggcctgctttgactctcagccaccaacagaaatctttgtcacctttgttcctcagctaaaagtaattttgttataaacacaaagtgactttaaacaggtaaaaaacccattcctatttttgtacattaccaaaagtttttcatatacctacagagctaactaattacaactgatttaatccactcaagtttagaccagttaaacccataggatcctgtatggttatcaatgtgatgccttgcttttcataaaataggtataattgggtcatacacttgacgagagggtgactgtttctaggggaagaaaaccctttagattgcaggtaactttcacttttttttttttaatatacactttacatttgtataaattatgcagggtactcctaaccctgtagaaatgtatgacctctcacaaagttgagatttgatccaaagagaaatgcaagtataaaagaattagatacttattatcttttaaggtttttttttttttttggtagagatgggggtctcactgtgttgcccaggctggtctcaaactcctggccacaagtgatcttcctgcctcagcctcccaaaatgctgagattacaggcatgagccactgtacccagcctttccttataaaattcaaagagaaaatttctacacctttatccctcaaataaaacaagtgctcagttcttaccgtgcccttgcaaggtctatatgtaaaagaaatctgaaatttagctgtagaataaaacttgataaataaaaagaaaaaacatacatttctccagttggtttgctctttgcttgttgaagtaataaaccgttttaaagagaaaatacttgctgtaaacccccagtgccttcaactcttttggcagaatatttttaaagaaatccagcaagcaaactttgaggtgctaatgaaagtaaaggaaggtggtatttctagttttggcagaaatgaaaagtgtctcacaagagacatcactacccacgtggggtctggctgctttctaccaaagacatttagagaagtgaattgagtcagggtgatggtgaacactacatattttatagatggttaagttgagaattaattatgtttatcatggatggctactaataccaagctcatgattgttgcagcctcaacgtcttaggcagtaaaacttgtctgcagcactaaagggggagaaacccttatattttgcaaactgtccattcgttaaatttattgtaacctaataccaaaaactgccgtttttcatattatttccccacctcctacttttttttttttttttgctacttgtaaaataaccccttctagaaaataagcattaactggaatgtttcaaacaattttgcttcattttactatcagccactagtgaactcttacagagatgtacatttaagataaaattagcttgtgctaagtgttttaaaaacattgtttactgttaaaggggaattgcacattatatttaactgggattgctccctccctcagttctttaaaaaacaagagtcaaggctcacaccaacttgtaggctgtgggagctttgccataggtagatacaatgtagaagtatacttttttaaagcatgaagaagacaaggaacttcattataatgtaccaggtagaggacattattattcaaaggattatgcacagctcagtgaagatgaagttacaatttttctcgcagctttgttgctattattttcttctgcataaatgtatgctcatttcattatgtgccttgctccctgattgtgcaaagctatatatatatatatatatatagatagatagatagatagatatatgagagagatatattcagtactactgaggatgtttttctgaggatgtttttgttctgctggattaagttattttccaagttactcttgccagttatgtcagtaaactattgtaatggcttagcacactagtcgtacagtcagtgtaaatgtttttcatttacatgttttcattatatcagcttatcaaatccttaataaaaaaaattcatagatttcatttaaaaaaaaaaa

SEQ ID NO: 457146 - DNA, 1694 bp, Homo sapiens
aaacaactccacaataaaaagtagtaatgaagaaaaatagcagcagtgttaaagatattgcatagttatgcttcaaatggcataaccatgacacatcttttctggatgttttagtgaagaatacatatttgggggtatcaacagatctttttgtaggcagttatgaaaaataattacaggccaggcgcaatggctcactcctgtaatcccaaaatgctgagattacaggcatgagccactgtacccagcctttccttataaaattcaaagagaaaatttctacacctttatccctcaaataaaacaagtgctcagttcttaccgtgcccttgcaaggtctatatgtaaaagaaatctgaaatttagctgtagaataaaacttgataaataaaaagaaaaaacatacatttctccagttggtttgctctttgcttgttgaagtaataaaccgttttaaagagaaaatacttgctgtaaacccccagtgccttcaactcttttggcagaatatttttaaagaaatccagcaagcaaactttgaggtgctaatgaaagtaaaggaaggtggtatttctagttttggcagaaatgaaaagtgtctcacaagagacatcactacccacgtggggtctggctgctttctaccaaagacatttagagaagtgaattgagtcagggtgatggtgaacactacatattttatagatggttaagttgagaattaattatgtttatcatggatggctactaataccaagctcatgattgttgcagcctcaacgtcttaggcagtaaaacttgtctgcagcactaaagggggagaaacccttatattttgcaaactgtccattcgttaaatttattgtaacctaataccaaaaactgccgtttttcatattatttccccacctcctacttttttttttttttttgctacttgtaaaataaccccttctagaaaataagcattaactggaatgtttcaaacaattttgcttcattttactatcagccactagtgaactcttacagagatgtacatttaagataaaattagcttgtgctaagtgttttaaaaacattgtttactgttaaaggggaattgcacattatatttaactgggattgctccctccctcagttctttaaaaaacaagagtcaaggctcacaccaacttgtaggctgtgggagctttgccataggtagatacaatgtagaagtatacttttttaaagcatgaagaagacaaggaacttcattataatgtaccaggtagaggacattattattcaaaggattatgcacagctcagtgaagatgaagttacaatttttctcgcagctttgttgctattattttcttctgcataaatgtatgctcatttcattatgtgccttgctccctgattgtgcaaagctatatatatatatatatatatagatagatagatagatagatatatgagagagatatattcagtactactgaggatgtttttctgaggatgtttttgttctgctggattaagttattttccaagttactcttgccagttatgtcagtaaactattgtaatggcttagcacactagtcgtacagtcagtgtaaatgtttttcatttacatgttttcattatatcagcttatcaaatccttaataaaaaaaattcatagatttcatttaaaaaaaaaaa

SEQ ID NO: 457147 - DNA, 2699 bp, Homo sapiens
caaccccgccttctgcgtctcggctggacgcgagcacactcggctccgccgccgccgccgccgccgcggggcgctgcggccgccccgcccccgctcccgccgccgcccgccagtcagtcagtcagtcagtcagtcagtcagtcagtcagtcagtcactgagcgcgcggcgcgggagctgctggcagtcgctgcgtctctggcgagggagcgccgcgcctggggaggaggcggaggcagcggctggaggagcgcgagcggcggtttccttgcccggggccgcgggaaggccgaccgactgccgcgatggagcagctatcagatgaagaaattgatcatggtgctgaagaagacagtgacaaggaagatcaggacctggacaaaatgtttggagcctggcttggagaactagacaaactcactcagagtttggattctgacaagcccatggaaccagtaaaaagatctcctcttcgccaggaaacaaacatggccaacttttcttaccgcttctccatatacaacttgaatgaagctctgaatcagggagagactgtggatctggatgccttgatggctgatctttgctctatagagcaggagctcagcagcattggttcaggaaacagtaagcgtcaaatcacagaaacgaaagctactcagaaattgcctgttagccgacatacattgaaacatggcaccttgaaaggattatcttcttcatctaataggatagctaaaccttcccatgccagctactccttggacgacgtcactgcacagttagaacaggcctctttgagtatggatgaggctgctcagcaatctgtactagaagatactaaacccttagtaactaatcagcacagaagaaccgcgtcagcaggcacagtgagtgatgctgaagtacactctattagtaattcctcccattccagcatcacttccgcagcctccagcatggactctttggatattgataaagtaacacgccctcaagagctggatttgacacatcaagggcagccaattactgaggaagaacaggcagcaaaattgaaagctgagaagatcagagttgccctagagaaaattaaagaggcacaagtgaaaaagctggtgatcagagtccacatgtctgatgacagttctaaaacaatgatggtggatgagaggcagacagtaagacaagtactggataacctgatggacaaatcccactgcggttatagtttagactggtcactggtagaaaccgtttctgaattacaaatggagagaatctttgaagaccatgaaaacttggttgaaaatcttcttaattggacaagagatagccaaaacaagcttatatttatggagcgtatagaaaaatatgcacttttcaaaaacccacagaattatcttttggggaaaaaagaaacagctgagatggcagatagaaacaaagaagtcctcttggaggaatgtttttgtggaagttctgtaactgtaccagaaattgaaggagtcctttggttgaaggatgatggcaagaagtcctggaaaaagcgttattttctcttgcgagcatctggtatctactatgttcccaaaggaaaagcaaaggtctctcgggatctggtgtgctttctccagctggatcatgtcaacgtttattatggccaggactatcggaacaaatacaaagcacctacagactattgtctggtgctgaagcatccacaaatccagaagaaatctcaatatatcaaatacctttgttgtgatgatgtgaggacactgcatcagtgggtcaatgggatccgcattgcaaagtatgggaagcagctctatatgaactaccaagaagccttgaagaggacagagtcagcctatgattggacttccttatccagctccagcattaaatcgggatccagttcttccagcatcccaggtagttcaaaatgcttcaaagcactattttgcgattaatatgaaggtctctgtagagactgatagtagacctggaaatttcaacttgattcttaaaaaccggagccatacttaattcctaaattataatcaatagatgcctttttaaaaattgctagagggtacagtatcatgggctagttcacaaatgtatttgaaatgaaaaatcagtatatagatttctaaagccagttttgttatttatatttataaaatttattcaaaacatacatactgctggacactgttaatgcataatttgggataaaacattacttggaaagaatctttgtactcagaaaccatgaagaagctgcactccttcagattcctatatcctttaaacaagtgcatgctatgattacatcttaacataaatcttctttcaattcaaaatgtttcatgaatgagatccatgtcatctaaaagcagaatttttaaatttttgcattggatgtgatgaaagaaataataactttagtagtatatttaaaagctgcatgactctatttcatctctattaagtaaaaacaaatttagaatgtgtatatacacatacatttcctagtgctgtccactgaggactagaagcagtgataccccaggaacaatgagaatacccagtccctagatcatagaggtttctttttgttttttcgttttattaaattttggccaaggatgctgcttaaatagatcatggtttctaataccattcttcaaa

SEQ ID NO: 457148 - DNA, 436 bp, Homo sapiens
tctttttggtgtttttatcttaggtctctcgggatctggtgtgctttctccagctggatcatgtcaacgtttattatggccaggactatcggaacaaatacaaagcacctacagactattgtctggtgctgaaggtaaacacatatttctttttaggaattttaattgatgttagacatagagcaggttattggatattttagaactgttgagattccatcaattatactgtttttgctttattctcaaagtttaaaaaggaatggtgaagtgtggtaaggaaaagaagcatgtgctatatcatagcagaccctgggccaattatctctaggtaaggagtgaatattagattgtaagctttgagttgtgagatataaaatgtatttgattataaatttgagattctcatttaacaccaggcttattttaggaaaac

SEQ ID NO: 457149 - DNA, 716 bp, Homo sapiens
gcccgtttcacctcctttacctatcattttcttccttactgcattttcacagcatgctatttctctgagatgttccagcaagcaggccaagcgtcatattgacttcacagaagaacaggctgagctgacacctgtaagttctataaacatgccatggcatgacttaatgaagaggaatgcattcattagacctccaaatgatgaaaccttttcatataacttcagtttttcaaataaaaattaaaccaaacttaataaattagcaaaaacaaataagcaactttagatatggtacaactgaatattaatactcctggtatgattatgtaggtggtagcataattgatatagatgatttttgtattagaacctgaaacaacatgccttctttattctgaaactaagggcttttgtaaatttcttaagatactaacaaattgaattgttctttacagcagagctaccaaatggaatgattcttctgcactgatgcttaactgaaagcctagtttctttcttaaaaaaatttattctttggtcattttttttgccatgccatttgccatggttggcaaatctggatgcttcagaggtgtactgtcccatacggtagccactagccacgtgtgcctattaaatatttaaaatgtggttaatctgaattgtgtgctgtaaggataaaatacatactggacttcaaagacttactatgaaac

SEQ ID NO: 457150 - DNA, 2581 bp, Homo sapiens
caaccccgccttctgcgtctcggctggacgcgagcacactcggctccgccgccgccgccgccgccgcggggcgctgcggccgccccgcccccgctcccgccgccgcccgccagtcagtcagtcagtcagtcagtcagtcagtcagtcagtcagtcactgagcgcgcggcgcgggagctgctggcagtcgctgcgtctctggcgagggagcgccgcgcctggggaggaggcggaggcagcggctggaggagcgcgagcggcggtttccttgcccggggccgcgggaaggccgaccgactgccgcgatggagcagctatcagatgaagaaattgatcatggtgctgaagaagacagtgacaaggaagatcaggacctggacaaaatgtttggagcctggcttggagaactagacaaactcactcagagtttggattctgacaagcccatggaaccagtaaaaagatctcctcttcgccaggaaacaaacatggccaacttttcttaccgcttctccatatacaacttgaatgaagctctgaatcagggagagactgtggatctggatgccttgatggctgatctttgctctatagagcaggagctcagcagcattggttcaggaaacagtaagcgtcaaatcacagaaacgaaagctactcagaaattgcctgttagccgacatacattgaaacatggcaccttgaaaggattatcttcttcatctaataggatagctaaaccttcccatgccagctactccttggacgacgtcactgcacagttagaacaggcctctttgagtatggatgaggctgctcagcaatctgtactagaagatactaaacccttagtaactaatcagcacagaagaaccgcgtcagcaggcacagtgagtgatgctgaagtacactctattagtaattcctcccattccagcatcacttccgcagcctccagcatggactctttggatattgataaagtaacacgccctcaagagctggatttgacacatcaagggcagccaattactgagcatgctatttctctgagatgttccagcaagcaggccaagcgtcatattgacttcacagaagaacaggctgagctgacacctcactcctatctggacagggaaacctcccttcttctgagaaacattgcaggaaaaccttctcatttgctgaccaaggaagaacaggcagcaaaattgaaagctgagaagatcagagttgccctagagaaaattaaagaggcacaagtgaaaaagctggtgatcagagtccacatgtctgatgacagttctaaaacaatgatggtggatgagaggcagacagtaagacaagtactggataacctgatggacaaatcccactgcggttatagtttagactggtcactggtagaaaccgtttctgaattacaaatggagagaatctttgaagaccatgaaaacttggttgaaaatcttcttaattggacaagagatagccaaaacaagcttatatttatggagcgtatagaaaaatatgcacttttcaaaaacccacagaattatcttttggggaaaaaagaaacagctgagatggcagatagaaacaaagaagtcctcttggaggaatgtttttgtggaagttctgtaactgtaccagaaattgaaggagtcctttggttgaaggatgatggcaagaagtcctggaaaaagcgttattttctcttgcgagcatctggtatctactatgttcccaaaggaaaagcaaaggtctctcgggatctggtgtgctttctccagctggatcatgtcaacgtttattatggccaggactatcggaacaaatacaaagcacctacagactattgtctggtgctgaagcatccacaaatccagaagaaatctcaatatatcaaatacctttgttgtgatgatgtgaggacactgcatcagtgggtcaatgggatccgcattgcaaagtatgggaagcagctctatatgaactaccaagaagccttgaagaggacagagtcagcctatgattggacttccttatccagctccagcattaaatcgggatccagttcttccagcatcccagagtctcagtcaaaccactccaatcagtctgatagcggagtttctgacacccagccagcaggacacgtccgttcccagagcattgtgagctccgtattctctgaagcctggaaacgaggcactcagttggaagagtccagcaaggtaacagcttcgttttaatttacattgaaaattctgtggtattcttttgggtttaaattgttgctctcttatgtctttatcggggatcttatttggccttatttcagtctcctttattaattttcaatcttcctaattgtagtgggtaaagacagttcagagagacctgttgatttgacttccccttggaaatgagtattttacaaattggctctaatgacttaaaatctcaaaaaaacaaaaaaaactggcagtttaattctttcatcagtggctcagatttttaagaaataacaatttcttcctttccacctttaagcagtttggatggcaaacaccatctat

SEQ ID NO: 457151 - DNA, 2691 bp, Homo sapiens
caaccccgccttctgcgtctcggctggacgcgagcacactcggctccgccgccgccgccgccgccgcggggcgctgcggccgccccgcccccgctcccgccgccgcccgccagtcagtcagtcagtcagtcagtcagtcagtcagtcagtcagtcactgagcgcgcggcgcgggagctgctggcagtcgctgcgtctctggcgagggagcgccgcgcctggggaggaggcggaggcagcggctggaggagcgcgagcggcggtttccttgcccggggccgcgggaaggccgaccgactgccgcgatggagcagctatcagatgaagaaattgatcatggtgctgaagaagacagtgacaaggaagatcaggacctggacaaaatgtttggagcctggcttggagaactagacaaactcactcagagtttggattctgacaagcccatggaaccagtaaaaagatctcctcttcgccaggaaacaaacatggccaacttttcttaccgcttctccatatacaacttgaatgaagctctgaatcagggagagactgtggatctggatgccttgatggctgatctttgctctatagagcaggagctcagcagcattggttcaggaaacagtaagcgtcaaatcacagaaacgaaagctactcagaaattgcctgttagccgacatacattgaaacatggcaccttgaaaggattatcttcttcatctaataggatagctaaaccttcccatgccagctactccttggacgacgtcactgcacagttagaacaggcctctttgagtatggatgaggctgctcagcaatctgtactagaagatactaaacccttagtaactaatcagcacagaagaaccgcgtcagcaggcacagtgagtgatgctgaagtacactctattagtaattcctcccattccagcatcacttccgcagcctccagcatggactctttggatattgataaagtaacacgccctcaagagctggatttgacacatcaagggcagccaattactgaggaagaacaggcagcaaaattgaaagctgagaagatcagagttgccctagagaaaattaaagaggcacaagtgaaaaagctggtgatcagagtccacatgtctgatgacagttctaaaacaatgatggtggatgagaggcagacagtaagacaagtactggataacctgatggacaaatcccactgcggttatagtttagactggtcactggtagaaaccgtttctgaattacaaatggagagaatctttgaagaccatgaaaacttggttgaaaatcttcttaattggacaagagatagccaaaacaagcttatatttatggagcgtatagaaaaatatgcacttttcaaaaacccacagaattatcttttggggaaaaaagaaacagctgagatggcagatagaaacaaagaagtcctcttggaggaatgtttttgtggaagttctgtaactgtaccagaaattgaaggagtcctttggttgaaggatgatggcaagaagtcctggaaaaagcgttattttctcttgcgagcatctggtatctactatgttcccaaaggaaaagcaaaggtctctcgggatctggtgtgctttctccagctggatcatgtcaacgtttattatggccaggactatcggaacaaatacaaagcacctacagactattgtctggtgctgaagcatccacaaatccagaagaaatctcaatatatcaaatacctttgttgtgatgatgtgaggacactgcatcagtgggtcaatgggatccgcattgcaaagtatgggaagcagctctatatgaactaccaagaagccttgaagaggacagagtcagcctatgattggacttccttatccagctccagcattaaatcgggatccagttcttccagcatcccagagtctcagtcaaaccactccaatcagtctgatagcggagtttctgacacccagccagcaggacacgtccgttcccagagcattgtgagctccgtattctctgaagcctggaaacgaggcactcagttggaagagtccagcaagtaaaacaaatgtaaagaatgtcccccctttacctgcattgctggacttctgtgcatgttggatgcaattgtctcacaccaacacgagtgtgtgtgtcaagcttattcattcctgtgtgactgtgcacgcctgctcaacattctcatactctcctgtgtcagcttactagcatcaaaaagccatcctcattccaccaggaagccctcctaaacccagttatagcatctgcttgatgtggatgcagtcatggactgaaaggtaaactggagccatcacatctccccttggaagtccagtgctcagaggaccgccacagagggttccatgtagggcaggctgtgtcaaagtcatgcagccaaggtcagaagtcatgcatcctgtcaccattcaaacagcttttgcagccggacatttttcctagattgttagatggtctagctattttaccgtggggtaaaacaagttttctgtttccttcttgcccgcacaatcagattttagccttcctgacattgtccatctttatgatcaccaccaacttctgcatccttttcatgcatgtcccagactccctgctttttagttttacacaatcaaagcttacctctgta

SEQ ID NO: 457152 - DNA, 472 bp, Homo sapiens
tcatctgataaaatggtgagctgtgagcttctaagtaaatgtctccctcaagttcctctggttcataatattccttgcagatgttgaacgatgggctggattgttttggaaccttgttccagcagagcccatgtgttcatgaagaaaacatttgcttacagcttatgactaccattgcctctctttcagtgttttttgttgttgttgttgttttggtttttgttttgttttgttttgtttgagaaggagtctcactgcactccagcctgggcgatagagcgagactcagtctcaaaaacaaacaaaacaaaaaatacaaaaattggctgggcatggtgacacatgcccgtaatcccagctacttggaaggctgaggtgcaagaatcacttgaacctgggaggcagatgttgcagtgagccgagatcgatcgtgccaccgcactccagctgggcgactgagcgagactgtctc

SEQ ID NO: 457153 - DNA, 311 bp, Homo sapiens
tcatctgataaaatggtgagctgtgagcttctaagtaaatgtctccctcaagttcctctggttcataatattccttgcagatgttgaacgatgggctggattgttttggaaccttgttccagcagagcccatgtgttcatgaagaaaacatttgcttacagcttatgactaccattgcctctctttcagtgttttttgttgttgttgttgttttggtttttgttttgttttgttttgtttgagaaggagtctcactctgtcacccaggctggagtgcagtggtgtgatcttggctcactgcaacctctgcc

SEQ ID NO: 457154 - DNA, 753 bp, Homo sapiens
  misc_feature (19)..(19): n is a, c, g, or t
aacagtggtatcaacgcanagtgcccattacggccggcattttgggaaaattatggactgggactcttcagaaattctgtcttttcttctggaagaaaatgtccctcccttacccccatccttaactttgtatcctggcttataacaggccatccatttttgtagcacacttttcaaaaacaattatataccctggtcccatctttctagggcctggatctgcttatagagcaggaagaataaagccaccaacttttacctagcccggctaatcatggaagtgtgtccaggcttcaagtaacttgagttttaattttttttttttcttggcagagtaatgtaaaatttaaatggggaaagatatttaatatttaatactaagctttaaaaagaaacctgctatcattgctatgtatcttgatgcaaagactatgatgttaataaaagaaagtacagaagagacttggcaaaaacaaaagaaaacactccacacacacaacaacaacgcaacgacccaaaaacaaaacaaaagaaacaaaaaaacaccaaaccaccaaaaacacacgaagaaaaacgacaaaacaagaatgccgaggcggccggcgcgcgcgatcgaagcagaagagaaagaaatgaggcaaccaccgacggaggagggcagcgcgccaacaaagaacatgaaagaaacggcacgaggagccgcacacagagaaagacgcggcgacgacaagaggggcggcgccacaaagaaag

SEQ ID NO: 457155 - DNA, 413 bp, Homo sapiens
  misc_feature (371)..(371): n is a, c, g, or t
  misc_feature (392)..(392): n is a, c, g, or t
tgatcagaactgtgcttgaaggcacttccttctacatcattaatcccactgtcaaaacaatacgcaagcatttcggaaagcgactgtcgtgattgttttgtgcgagtatctgtgacgggtgcattttttttcctccctcctataggtttcgtgctgtttctctttttgggaatcttgaccatgctcagaccaaatatgtacttcatggcccctctacaggagaaggtggtttttgggatgttctttttgggtgcagtgctctgcctcagcttctcctggctctttcacaccgtctattgtcattcagagaaagtctctcggactttttccaagtgagtcaaaaggatgtccaaagggtcgagatcgtgccnttgtcgcatctgtgattacgngctggctgggtgaactcatga

SEQ ID NO: 457156 - DNA, 2200 bp, Homo sapiens
ccaggcagagcccgcgaggaggtgacgcggctgcggaggtgacgcgggaggtcgcgcgccccttccggcgcggggagggcgctgaagatcggggccgctcggccgcaggccgcctccagcgccgcgggatgtagcgcgggggaccgcggcccccagcagagcccgcctgcccggcttttagaagaccaaactggacaatggactttgctcactatgatgacatgatctccattgacctccatttgtctaccatcagagggagatctctgccccctggggctgagagaccccaacctttccccaagctgaagctgcagggtattgaggtaccagccagatgtcttcccacaaaggatctgtggtggcacaggggaatggggctcctgccagtaacagggaagctgacacggtggaactggctgaactgggacccctgctagaagagaagggcaaacgggtaatcgccaacccacccaaagctgaagaagagcaaacatgcccagtgccccaggaagaagaggaggaggtgcgggtactgacacttcccctgcaagcccaccacgccatggagaagatggaagagtttgtgtacaaggtctgggagggacgttggagggtcatcccatatgatgtgctccctgactggctaaaggacaacgactatctgctacatggtcatagacctcccatgccctcctttcgggcttgcttcaagagcatcttccgcattcatacagaaactggcaacatctggacccatctgcttggtttcgtgctgtttctctttttgggaatcttgaccatgctcagaccaaatatgtacttcatggcccctctacaggagaaggtggtttttgggatgttctttttgggtgcagtgctctgcctcagcttctcctggctctttcacaccgtctattgtcattcagagaaagtctctcggactttttccaaactggactattcagggattgctcttctaattatggggagctttgtcccctggctctattattccttctactgctccccacagccacggctcatctacctctccatcgtctgtgtcctgggcatttctgccatcattgtggcgcagtgggaccggtttgccactcctaagcaccggcagacaagagcaggcgtgttcctgggacttggcttgagtggcgtcgtgcccaccatgcactttactatcgctgagggctttgtcaaggccaccacagtgggccagatgggctggttcttcctcatggctgtgatgtacatcactggagctggcctttatgctgctcgaattcctgagcgcttctttcctggaaaatttgacatatggttccagtctcatcagattttccatgtcctggtggtggcagcagcctttgtccacttctatggagtctccaaccttcaggaattccgttacggcctagaaggcggctgtactgatgacacccttctctgagccttcccacctgcggggtggaggaggaacttcccaagtgcttttaaaaataacttctttgctgaagtgagaggaagagtctgagttgtctgtttctagaagaaacctcttagagaattcagtaccaaccaagcttcagcccactttcacacccactgggcaataaactttccatttccattctcctagctggggatggggcatggtcaaacttagccatcccctcctcagcaaggcatctaccggcccctcacagagacagtactttgaaactcatgttgagattttaccctctcctccaaccattttgggaaaattatggactgggactcttcagaaattctgtcttttcttctggaagaaaatgtccctcccttacccccatccttaactttgtatcctggcttataacaggccatccatttttgtagcacacttttcaaaaacaattatataccctggtcccatctttctagggcctggatctgcttatagagcaggaagaataaagccaccaacttttacctagcccggctaatcatggaagtgtgtccaggcttcaagtaacttgagttttaattttttttttttcttggcagagtaatgtaaaatttaaatggggaaagatatttaatatttaatactaagctttaaaaagaaacctgctatcattgctatgtatcttgatgcaaagactatgatgttaataaaagaaagtacagaagagacttggca

SEQ ID NO: 457157 - DNA, 2561 bp, Homo sapiens
  misc_feature (2392)..(2392): n is a, c, g, or t
  misc_feature (2396)..(2396): n is a, c, g, or t
ccaggcagagcccgcgaggaggtgacgcggctgcggaggtgacgcgggaggtcgcgcgccccttccggcgcggggagggcgctgaagatcggggccgctcggccgcaggccgcctccagcgccgcgggatgtagcgcgggggaccgcggcccccagcagagcccgcctgcccggcttgtctaccatcagagggagatctctgccccctggggctgagagaccccaacctttccccaagctgaagctgcagggtattgaggtaccagccagatgtcttcccacaaaggatctgtggtggcacaggggaatggggctcctgccagtaacagggaagctgacacggtggaactggctgaactgggacccctgctagaagagaagggcaaacgggtaatcgccaacccacccaaagctgaagaagagcaaacatgcccagtgccccaggaagaagaggaggaggtgcgggtactgacacttcccctgcaagcccaccacgccatggagaagatggaagagtttgtgtacaaggtctgggagggacgttggagggtcatcccatatgatgtgctccctgactggctaaaggacaacgactatctgctacatggtcatagacctcccatgccctcctttcgggcttgcttcaagagcatcttccgcattcatacagaaactggcaacatctggacccatctgcttggtttcgtgctgtttctctttttgggaatcttgaccatgctcagaccaaatatgtacttcatggcccctctacaggagaaggtggtttttgggatgttctttttgggtgcagtgctctgcctcagcttctcctggctctttcacaccgtctattgtcattcagagaaagtctctcggactttttccaaactggactattcagggattgctcttctaattatggggagctttgtcccctggctctattattccttctactgctccccacagccacggctcatctacctctccatcgtctgtgtcctgggcatttctgccatcattgtggcgcagtgggaccggtttgccactcctaagcaccggcagacaagagcaggcgtgttcctgggacttggcttgagtggcgtcgtgcccaccatgcactttactatcgctgagggctttgtcaaggccaccacagtgggccagatgggctggttcttcctcatggctgtgatgtacatcactggagctggcctttatgctgctcgaattcctgagcgcttctttcctggaaaatttgacatatggttccagtctcatcagattttccatgtcctggtggtggcagcagcctttgtccacttctatggagtctccaaccttcaggaattccgttacggcctagaaggcggctgtactgatgacacccttctctgagccttcccacctgcggggtggaggaggaacttcccaagtgcttttaaaaataacttctttgctgaagtgagaggaagagtctgagttgtctgtttctagaagaaacctcttagagaattcagtaccaaccaagcttcagcccactttcacacccactgggcaataaactttccatttccattctcctagctggggatggggcatggtcaaacttagccatcccctcctcagcaaggcatctaccggcccctcacagagacagtactttgaaactcatgttgagattttaccctctcctccaaccattttgggaaaattatggactgggactcttcagaaattctgtcttttcttctggaagaaaatgtccctcccttacccccatccttaactttgtatcctggcttataacaggccatccatttttgtagcacacttttcaaaaacaattatataccctggtcccatctttctagggcctggatctgcttatagagcaggaagaataaagccaccaacttttacctagcccggctaatcatggaagtgtgtccaggcttcaagtaacttgagttttaattttttttttttcttggcagagtaatgtaaaatttaaatggggaaagatatttaatatttaatactaagctttaaaaagaaacctgctatcattgctatgtatcttgatgcaaagactatgatgttaataaaagaaagtacagaagagacttggcaaaaaaaaaaaaaataaaacaaaaaaaaaagggggggggggcaaaaaatttatccccgggggggcccattttcgttccccgttttttgtgaaaagggggccccttaaggggggggatataaaaagaaggggcggggggcgcggtataaaaggtgggggcggaaccccggcccggcgggactctggggagaggaccctactcctgggcgtgggccatcttgggcccctcccccgaagaattaacagtcgggggacataacntacnggtgacggggaccacaggcattggcggggggaattcggttcgcttgttgaaattcgagggctcatacaacacggaccgcacaacaagaatctcgcacacacacaagtatcaacttaaacaatcagcacccgtatgtcacacatacatcagctgtgtcgacacgcc

SEQ ID NO: 457158 - DNA, 2502 bp, Homo sapiens
  misc_feature (2146)..(2146): n is a, c, g, or t
  misc_feature (2154)..(2154): n is a, c, g, or t
ccaggcagagcccgcgaggaggtgacgcggctgcggaggtgacgcgggaggtcgcgcgccccttccggcgcggggagggcgctgaagatcggggccgctcggccgcaggccgcctccagcgccgcgggatgtagcgcgggggaccgcggcccccagcagagcccgcctgcccggcttgtctaccatcagagggagatctctgccccctggggctgagagaccccaacctttccccaagctgaagctgcagggtattgaggtaccagccagatgtcttcccacaaaggatctgtggtggcacaggggaatggggctcctgccagtaacagggaagctgacacggtggaactggctgaactgggacccctgctagaagagaagggcaaacgggtaatcgccaacccacccaaagctgaagaagagcaaacatgcccagtgccccaggaagaagaggaggaggtgcgggtactgacacttcccctgcaagcccaccacgccatggagaagatggaagagtttgtgtacaaggtctgggagggacgttggagggtcatcccatatgatgtgctccctgactggctaaaggacaacgactatctgctacatggtcatagacctcccatgccctcctttcgggcttgcttcaagagcatcttccgcattcatacagaaactggcaacatctggacccatctgcttggtttcgtgctgtttctctttttgggaatcttgaccatgctcagaccaaatatgtacttcatggcccctctacaggagaaggtggtttttgggatgttctttttgggtgcagtgctctgcctcagcttctcctggctctttcacaccgtctattgtcattcagagaaagtctctcggactttttccaaactggactattcagggattgctcttctaattatggggagctttgtcccctggctctattattccttctactgctccccacagccacggctcatctacctctccatcgtctgtgtcctgggcatttctgccatcattgtggcgcagtgggaccggtttgccactcctaagcaccggcagacaagagcaggcgtgttcctgggacttggcttgagtggcgtcgtgcccaccatgcactttactatcgctgagggctttgtcaaggccaccacagtgggccagatgggctggttcttcctcatggctgtgatgtacatcactggagctggcctttatgctgctcgaattcctgagcgcttctttcctggaaaatttgacatatggttccagtctcatcagattttccatgtcctggtggtggcagcagcctttgtccacttctatggagtctccaaccttcaggaattccgttacggcctagaaggcggctgtactgatgacacccttctctgagccttcccacctgcggggtggaggaggaacttcccaagtgcttttaaaaataacttctttgctgaagtgagaggaagagtctgagttgtctgtttctagaagaaacctcttagagaattcagtaccaaccaagcttcagcccactttcacacccactgggcaataaactttccatttccattctcctagctggggatggggcatggtcaaacttagccatcccctcctcagcaaggcatctaccggcccctcacagagacagtactttgaaactcatgttgagattttaccctctcctccaaccattttgggaaaattatggactgggactcttcagaaattctgtcttttcttctggaagaaaatgtccctcccttacccccatccttaactttgtatcctggcttataacaggccatccatttttgtagcacacttttcaaaaacaattatataccctggtcccatctttctagggcctggatctgcttatagagcaggaagaataaagccaccaacttttacctagcccggctaatcatggaagtgtgtccaggcttcaagtaacttgagttttaattttttttttttcttggcagagtaatgtaaaatttaaatggggaaagatatttaatatttaatactaagctttaaaaagaaacctgctatcattgctatgtatcttgatgcaaagactatgatgttaataaaagaaagtacagaagagacttggcagaaacacaacacnaaaacacncacacaaaacacagcaaacaccaacacaaccaacaacataacagaggaggcggcgaccccaataaagtacacccagggagcacaccatatatcgaccacagaatgtccgcgaccaaaggggcccacatatggaggactcatataaacaccatcgccctgtccccgctataaaaacacctgctgagctggaaaacacctatcaccatgggcaaccctgtgaggaacacccctacaagacgcgagtgtgcacactacggggcacacatcacctgcaagaaaatatacatccctgagccaatctcactacgcgcagatccgggtaccccccgctgatattctcctgaccaa

SEQ ID NO: 457159 - DNA, 2044 bp, Homo sapiens
ccaggcagagcccgcgaggaggtgacgcggctgcggaggtgacgcgggaggtcgcgcgccccttccggcgcggggagggcgctgaagatcggggccgctcggccgcaggccgcctccagcgccgcgggatgtagcgcgggggaccgcggcccccagcagagcccgcctgcccggcttgtctaccatcagagggagatctctgccccctggggctgagagaccccaacctttccccaagctgaagctgcagggtattgaggtaccagccagatgtcttcccacaaaggatctgtggtggcacaggggaatggggctcctgccagtaacagggaagctgacacggtggaactggctgaactgggacccctgctagaagagaagggcaaacgggtaatcgccaacccacccaaagctgaagaagagcaaacatgcccagtgccccaggaagaagaggaggaggtgcgggtactgacacttcccctgcaagcccaccacgccatggagaagatggaagagtttgtgtacaaggtctgggagggacgttggagggtcatcccatatgatgtgctccctgactggctaaaggacaacgactatctgctacatggtcatagacctcccatgccctcctttcgggcttgcttcaagagcatcttccgcattcatacagaaactggcaacatctggacccatctgcttggtttcgtgctgtttctctttttgggaatcttgaccatgctcagaccaaatatgtacttcatggcccctctacaggagaaggtggtttttgggatgttctttttgggtgcagtgctctgcctcagcttctcctggctctttcacaccgtctattgtcattcagagaaagtctctcggactttttccaaactggactattcagggattgctcttctaattatggggagctttgtcccctggctctattattccttctactgctccccacagccacggctcatctacctctccatcgtctgtgtcctgggcatttctgccatcattgtggcgcagtgggaccggtttgccactcctaagcaccggcagacaagagcaggcgtgttcctgggacttggcttgagtggcgtcgtgcccaccatgcactttactatcgctgagggctttgtcaaggccaccacagtgggccagatgggctggttcttcctcatggctgtgatgtacatcactggagctggcctttatgctgctcgaattcctgagcgcttctttcctggaaaatttgacatatggttccagtctcatcagattttccatgtcctggtggtggcagcagcctttgtccacttctatggagtctccaaccttcaggaattccgttacggcctagaaggcggctgtactgatgacacccttctctgagccttcccacctgcggggtggaggaggaacttcccaagtgcttttaaaaataacttctttgctgaagtgagaggaagagtctgagttgtctgtttctagaagaaacctcttagagaattcagtaccaaccaagcttcagcccactttcacacccactgggcaataaactttccatttccattctcctagctggggatggggcatggtcaaacttagccatcccctcctcagcaaggcatctaccggcccctcacagagacagtactttgaaactcatgttgagattttaccctctcctccaaccattttgggaaaattatggactgggactcttcagaaattctgtcttttcttctggaagaaaatgtccctcccttacccccatccttaactttgtatcctggcttataacaggccatccatttttgtagcacacttttcaaaaacaattatataccctggtcccatctttctagggcctggatctgcttatagagcaggaagaataaagccaccaacttttacctagtttcacaccaaggaaatagctatgacgtagatcacccctgaattaacgtcccgtgtacgatatggatggacggctggcataacggaattcacgagataatgttaacagtttatactc

SEQ ID NO: 457160 - DNA, 1993 bp, Homo sapiens
  misc_feature (1889)..(1889): n is a, c, g, or t
  misc_feature (1892)..(1892): n is a, c, g, or t
  misc_feature (1894)..(1894): n is a, c, g, or t
ccaggcagagcccgcgaggaggtgacgcggctgcggaggtgacgcgggaggtcgcgcgccccttccggcgcggggagggcgctgaagatcggggccgctcggccgcaggccgcctccagcgccgcgggatgtagcgcgggggaccgcggcccccagcagagcccgcctgcccggcttgtctaccatcagagggagatctctgccccctggggctgagagaccccaacctttccccaagctgaagctgcagggtattgaggtaccagccagatgtcttcccacaaaggatctgtggtggcacaggggaatggggctcctgccagtaacagggaagctgacacggtggaactggctgaactgggacccctgctagaagagaagggcaaacgggtaatcgccaacccacccaaagctgaagaagagcaaacatgcccagtgccccaggaagaagaggaggaggtgcgggtactgacacttcccctgcaagcccaccacgccatggagaagatggaagagtttgtgtacaaggtctgggagggacgttggagggtcatcccatatgatgtgctccctgactggctaaaggacaacgactatctgctacatggtcatagacctcccatgccctcctttcgggcttgcttcaagagcatcttccgcattcatacagaaactggcaacatctggacccatctgcttggtttcgtgctgtttctctttttgggaatcttgaccatgctcagaccaaatatgtacttcatggcccctctacaggagaaggtggtttttgggatgttctttttgggtgcagtgctctgcctcagcttctcctggctctttcacaccgtctattgtcattcagagaaagtctctcggactttttccaaactggactattcagggattgctcttctaattatggggagctttgtcccctggctctattattccttctactgctccccacagccacggctcatctacctctccatcgtctgtgtcctgggcatttctgccatcattgtggcgcagtgggaccggtttgccactcctaagcaccggcagacaagagcaggcgtgttcctgggacttggcttgagtggcgtcgtgcccaccatgcactttactatcgctgagggctttgtcaaggccaccacagtgggccagatgggctggttcttcctcatggctgtgatgtacatcactggagctggcctttatgctgctcgaattcctgagcgcttctttcctggaaaatttgacatatggttccagtctcatcagattttccatgtcctggtggtggcagcagcctttgtccacttctatggagtctccaaccttcaggaattccgttacggcctagaaggcggctgtactgatgacacccttctctgagccttcccacctgcggggtggaggaggaacttcccaagtgcttttaaaaataacttctttgctgaagtgagaggaagagtctgagttgtctgtttctagaagaaacctcttagagaattcagtaccaaccaagcttcagcccactttcacacccactgggcaataaactttccatttccattctcctagctggggatggggcatggtcaaacttagccatcccctcctcagcaaggcatctaccggcccctcacagagacagtactttgaaactcatgttgagattttaccctctcctccaaccattttgggaaaattatggactgggactcttcagaaattctgtcttttcttctggaagaaaatgtccctcccttacccccatccttaactttgtatcctggcttataacaggccatccatttttgtagcacacttttcaaaaacaattatataccctggtcccatctttctagggcctggattgtatnagngngagaaaaggccactttacctacaccggaaacagggaggtcggcacaaccaggtatcatttggggaagaaaagggcggatagtacaagggaaaacgtctg

SEQ ID NO: 457161 - DNA, 1098 bp, Homo sapiens
  misc_feature (22)..(23): n is a, c, g, or t
  misc_feature (33)..(33): n is a, c, g, or t
ccatctactgtcccggagattnnccggcagacnagagcaggcgtgttcctgggacttggcttgagtggcgtcgtgcccaccatgcactttactatcgctgagggctttgtcaaggccaccacagtgggccagatgggctggttcttcctcatggctgtgatgtacatcactggagctggcctttatgctgctcgaattcctgagcgcttctttcctggaaaatttgacatatggttccagtctcatcagattttccatgtcctggtggtggcagcagcctttgtccacttctatggagtctccaaccttcaggaattccgttacggcctagaaggcggctgtactgatgacacccttctctgagccttcccacctgcggggtggaggaggaacttcccaagtgcttttaaaaataacttctttgctgaagtgagaggaagagtctgagttgtctgtttctagaagaaacctcttagagaattcagtaccaaccaagcttcagcccactttcacacccactgggcaataaactttccatttccattctcctagctggggatggggcatggtcaaacttagccatcccctcctcagcaaggcatctaccggcccctcacagagacagtactttgaaactcatgttgagattttaccctctcctccaaccattttgggaaaattatggactgggactcttcagaaattctgtcttttcttctggaagaaaatgtccctcccttacccccatccttaactttgtatcctggcttataacaggccatccatttttgtagcacacttttcaaaaacaattatataccctggtcccatctttctagggcctggatctgcttatagagcaggaagaataaagccaccaacttttacctagcccggctaatcatggaagtgtgtccaggcttcaagtaacttgagttttaattttttttttttcttggcagagtaatgtaaaatttaaatggggaaagatatttaatatttaatactaagctttaaaaagaaacctgctatcattgctatgtatcttgatgcaaagactatgatgttaataaaagaaagtacagaagagacttggca

SEQ ID NO: 457162 - DNA, 1074 bp, Homo sapiens
catcattgtggcgcagtgcacgagacaagagcaggcgtgttcctgggacttggtcgtgccacatgctatatcgctgagggctttgtcaaggccaccacagtgggccagatgggctggttcttcctcatggctgtgatgtacatcactggagctggcctttatgctgctcgaattcctgagcgcttctttcctggaaaatttgacatatggttccagtctcatcagattttccatgtcctggtggtggcagcagcctttgtccacttctatggagtctccaaccttcaggaattccgttacggcctagaaggcggctgtactgatgacacccttctctgagccttcccacctgcggggtggaggaggaacttcccaagtgcttttaaaaataacttctttgctgaagtgagaggaagagtctgagttgtctgtttctagaagaaacctcttagagaattcagtaccaaccaagcttcagcccactttcacacccactgggcaataaactttccatttccattctcctagctggggatggggcatggtcaaacttagccatcccctcctcagcaaggcatctaccggcccctcacagagacagtactttgaaactcatgttgagattttaccctctcctccaaccattttgggaaaattatggactgggactcttcagaaattctgtcttttcttctggaagaaaatgtccctcccttacccccatccttaactttgtatcctggcttataacaggccatccatttttgtagcacacttttcaaaaacaattatataccctggtcccatctttctagggcctggatctgcttatagagcaggaagaataaagccaccaacttttacctagcccggctaatcatggaagtgtgtccaggcttcaagtaacttgagttttaattttttttttttcttggcagagtaatgtaaaatttaaatggggaaagatatttaatatttaatactaagctttaaaaagaaacctgctatcattgctatgtatcttgatgcaaagactatgatgttaataaaagaaagtacagaagagacttggca

SEQ ID NO: 457163 - DNA, 914 bp, Homo sapiens
ttattcctccttgcattatcctaaaggctcttttctttttattcctacagttccagtctcatcagattttccatgtcctggtggtggcagcagcctttgtccacttctatggagtctccaaccttcaggaattccgttacggcctagaaggcggctgtactgatgacacccttctctgagccttcccacctgcggggtggaggaggaacttcccaagtgcttttaaaaataacttctttgctgaagtgagaggaagagtctgagttgtctgtttctagaagaaacctcttagagaattcagtaccaaccaagcttcagcccactttcacacccactgggcaataaactttccatttccattctcctagctggggatggggcatggtcaaacttagccatcccctcctcagcaaggcatctaccggcccctcacagagacagtactttgaaactcatgttgagattttaccctctcctccaaccattttgggaaaattatggactgggactcttcagaaattctgtcttttcttctggaagaaaatgtccctcccttacccccatccttaactttgtatcctggcttataacaggccatccatttttgtagcacacttttcaaaaacaattatataccctggtcccatctttctagggcctggatctgcttatagagcaggaagaataaagccaccaacttttacctagcccggctaatcatggaagtgtgtccaggcttcaagtaacttgagttttaattttttttttttcttggcagagtaatgtaaaatttaaatggggaaagatatttaatatttaatactaagctttaaaaagaaacctgctatcattgctatgtatcttgatgcaaagactatgatgttaataaaagaaagtacagaagagacttggca

SEQ ID NO: 457164 - DNA, 742 bp, Homo sapiens
  misc_feature (19)..(19): n is a, c, g, or t
aacagtggtatcaacgcanagtgcccattacggccggttcccaagtgcttttaaaaataacttctttgctgaagtgagaggaagagtctgagttgtctgtttctagaagaaacctcttagagaattcagtaccaaccaagcttcagcccactttcacacccactgggcaataaactttccatttccattctcctagctggggatggggcatggtcaaacttagccatcccctcctcagcaaggcatctaccggcccctcacagagacagtactttgaaactcatgttgagattttaccctctcctccaaccattttgggaaaattatggactgggactcttcagaaattctgtcttttcttctggaagaaaatgtccctcccttacccccatccttaactttgtatcctggcttataacaggccatccatttttgtagcacacttttcaaaaacaattatataccctggtcccatctttctagggcctggatctgcttatagagcaggaagaataaagccaccaacttttacctagcccggctaatcatggaagtgtgtccaggcttcaagtaacttgagttttaattttttttttttcttggcagagtaatgtaaaatttaaatggggaaagatatttaatatttaatactaagctttaaaaagaaacctgctatcattgctatgtatcttgatgcaaagactatgatgttaataaaagaaagtacagaagagacttggca

SEQ ID NO: 457165 - DNA, 968 bp, Homo sapiens
  misc_feature (926)..(926): n is a, c, g, or t
  misc_feature (947)..(947): n is a, c, g, or t
ccaggcagagcccgcgaggaggtgacgcggctgcggaggtgacgcgggaggtcgcgcgccccttccggcgcggggagggcgctgaagatcggggccgctcggccgcaggccgcctccagcgccgcgggatgtagcgcgggggaccgcggcccccagcagagcccgcctgcccggcttgtctaccatcagagggagatctctgccccctggggctgagagaccccaacctttccccaagctgaagctgcagggtattgaggtaccagccagatgtcttcccacaaaggatctgtggtggcacaggggaatggggctcctgccagtaacagggaagctgacacggtggaactggctgaactgggacccctgctagaagagaagggcaaacgggtaatcgccaacccacccaaagctgaagaagagcaaacatgcccagtgccccaggaagaagaggaggaggtgcgggtactgacacttcccctgcaagcccaccacgccatggagaagatggaagagtttgtgtacaaggtctgggagggacgttggagggtcatcccatatgatgtgctccctgactggctaaaggacaacgactatctgctacatggtcatagacctcccatgccctcctttcgggcttgcttcaagagcatcttccgcattcatacagaaactggcaacatctggacccatctgcttggtttcgtgctgtttctctttttgggaatcttgaccatgctcagaccaaatatgtacttcatggcccctctacaggagaaggtggtttttgggatgttctttttgggtgcagtgctctgcctcagcttctcctggctctttcacaccgtctattgtcattcagagaaagtctctcggactttttccaagtgagtcaaaaggatgtccaaagggtcgagatcgtgccnttgtcgcatctgtgattacgngctggctgggtgaactcatga

SEQ ID NO: 457166 - DNA, 2133 bp, Homo sapiens
ccaggcagagcccgcgaggaggtgacgcggctgcggaggtgacgcgggaggtcgcgcgccccttccggcgcggggagggcgctgaagatcggggccgctcggccgcaggccgcctccagcgccgcgggatgtagcgcgggggaccgcggcccccagcagagcccgcctgcccggcttgtctaccatcagagggagatctctgccccctggggctgagagaccccaacctttccccaagctgaagctgcagggtattgaggtaccagccagatgtcttcccacaaaggatctgtggtggcacaggggaatggggctcctgccagtaacagggaagctgacacggtggaactggctgaactgggacccctgctagaagagaagggcaaacgggtaatcgccaacccacccaaagctgaagaagagcaaacatgcccagtgccccaggaagaagaggaggaggtgcgggtactgacacttcccctgcaagcccaccacgccatggagaagatggaagagtttgtgtacaaggtctgggagggacgttggagggtcatcccatatgatgtgctccctgactggctaaaggacaacgactatctgctacatggtcatagacctcccatgccctcctttcgggcttgcttcaagagcatcttccgcattcatacagaaactggcaacatctggacccatctgcttggtttcgtgctgtttctctttttgggaatcttgaccatgctcagaccaaatatgtacttcatggcccctctacaggagaaggtggtttttgggatgttctttttgggtgcagtgctctgcctcagcttctcctggctctttcacaccgtctattgtcattcagagaaagtctctcggactttttccaaactggactattcagggattgctcttctaattatggggagctttgtcccctggctctattattccttctactgctccccacagccacggctcatctacctctccatcgtctgtgtcctgggcatttctgccatcattgtggcgcagtgggaccggtttgccactcctaagcaccggcagacaagagcaggcgtgttcctgggacttggcttgagtggcgtcgtgcccaccatgcactttactatcgctgagggctttgtcaaggccaccacagtgggccagatgggctggttcttcctcatggctgtgatgtacatcactggagctggcctttatgctgctcgaattcctgagcgcttctttcctggaaaatttgacatatggttccagtctcatcagattttccatgtcctggtggtggcagcagcctttgtccacttctatggagtctccaaccttcaggaattccgttacggcctagaaggcggctgtactgatgacacccttctctgagccttcccacctgcggggtggaggaggaacttcccaagtgcttttaaaaataacttctttgctgaagtgagaggaagagtctgagttgtctgtttctagaagaaacctcttagagaattcagtaccaaccaagcttcagcccactttcacacccactgggcaataaactttccatttccattctcctagctggggatggggcatggtcaaacttagccatcccctcctcagcaaggcatctaccggcccctcacagagacagtactttgaaactcatgttgagattttaccctctcctccaaccattttgggaaaattatggactgggactcttcagaaattctgtcttttcttctggaagaaaatgtccctcccttacccccatccttaactttgtatcctggcttataacaggccatccatttttgtagcacacttttcaaaaacaattatataccctggtcccatctttctagggcctggatctgcttatagagcaggaagaataaagccaccaacttttacctagcccggctaatcatggaagtgtgtccaggcttcaagtaacttgagttttaattttttttttttcttggcagagtaatgtaaaatttaaatggggaaagatatttaatatttaatactaagctttaaaaagaaacctgctatcattgctatgtatcttgatgcaaagactatgatgttaataaaagaaagtacagaagagacttggca

SEQ ID NO: 457167 - DNA, 2009 bp, Homo sapiens
gctatagtcggatgtgcgcctcgccggcgtgtccccgactcccggcagtccttgtctaccatcagagggagatctctgccccctggggctgagagaccccaacctttccccaagctgaagctgcagggtattgaggtaccagccagatgtcttcccacaaaggatctgtggtggcacaggggaatggggctcctgccagtaacagggaagctgacacggtggaactggctgaactgggacccctgctagaagagaagggcaaacgggtaatcgccaacccacccaaagctgaagaagagcaaacatgcccagtgccccaggaagaagaggaggaggtgcgggtactgacacttcccctgcaagcccaccacgccatggagaagatggaagagtttgtgtacaaggtctgggagggacgttggagggtcatcccatatgatgtgctccctgactggctaaaggacaacgactatctgctacatggtcatagacctcccatgccctcctttcgggcttgcttcaagagcatcttccgcattcatacagaaactggcaacatctggacccatctgcttggtttcgtgctgtttctctttttgggaatcttgaccatgctcagaccaaatatgtacttcatggcccctctacaggagaaggtggtttttgggatgttctttttgggtgcagtgctctgcctcagcttctcctggctctttcacaccgtctattgtcattcagagaaagtctctcggactttttccaaactggactattcagggattgctcttctaattatggggagctttgtcccctggctctattattccttctactgctccccacagccacggctcatctacctctccatcgtctgtgtcctgggcatttctgccatcattgtggcgcagtgggaccggtttgccactcctaagcaccggcagacaagagcaggcgtgttcctgggacttggcttgagtggcgtcgtgcccaccatgcactttactatcgctgagggctttgtcaaggccaccacagtgggccagatgggctggttcttcctcatggctgtgatgtacatcactggagctggcctttatgctgctcgaattcctgagcgcttctttcctggaaaatttgacatatggttccagtctcatcagattttccatgtcctggtggtggcagcagcctttgtccacttctatggagtctccaaccttcaggaattccgttacggcctagaaggcggctgtactgatgacacccttctctgagccttcccacctgcggggtggaggaggaacttcccaagtgcttttaaaaataacttctttgctgaagtgagaggaagagtctgagttgtctgtttctagaagaaacctcttagagaattcagtaccaaccaagcttcagcccactttcacacccactgggcaataaactttccatttccattctcctagctggggatggggcatggtcaaacttagccatcccctcctcagcaaggcatctaccggcccctcacagagacagtactttgaaactcatgttgagattttaccctctcctccaaccattttgggaaaattatggactgggactcttcagaaattctgtcttttcttctggaagaaaatgtccctcccttacccccatccttaactttgtatcctggcttataacaggccatccatttttgtagcacacttttcaaaaacaattatataccctggtcccatctttctagggcctggatctgcttatagagcaggaagaataaagccaccaacttttacctagcccggctaatcatggaagtgtgtccaggcttcaagtaacttgagttttaattttttttttttcttggcagagtaatgtaaaatttaaatggggaaagatatttaatatttaatactaagctttaaaaagaaacctgctatcattgctatgtatcttgatgcaaagactatgatgttaataaaagaaagtacagaagagacttggca

SEQ ID NO: 457168 - DNA, 2417 bp, Homo sapiens
ccaggcagagcccgcgaggaggtgacgcggctgcggaggtgacgcgggaggtcgcgcgccccttccggcgcggggagggcgctgaagatcggggccgctcggccgcaggccgcctccagcgccgcgggatgtagcgcgggggaccgcggcccccagcagagcccgcctgcccggcttgtctaccatcagagggagatctctgccccctggggctgagagaccccaacctttccccaagctgaagctgcagggtattgaggtaccagccagatgtcttcccacaaaggatctgtggtggcacaggggaatggggctcctgccagtaacagggaagctgacacggtggaactggctgaactgggacccctgctagaagagaagggcaaacgggtaatcgccaacccacccaaagctgaagaagagcaaacatgcccagtgccccaggaagaagaggaggaggtgcgggtactgacacttcccctgcaagcccaccacgccatggagaagatggaagagtttgtgtacaaggtctgggagggacgttggagggtcatcccatatgatgtgctccctgactggctaaaggacaacgactatctgctacatggtcatagacctcccatgccctcctttcgggcttgcttcaagagcatcttccgcattcatacagaaactggcaacatctggacccatctgcttggtttcgtgctgtttctctttttgggaatcttgaccatgctcagaccaaatatgtacttcatggcccctctacaggagaaggtggtttttgggatgttctttttgggtgcagtgctctgcctcagcttctcctggctctttcacaccgtctattgtcattcagagaaagtctctcggactttttccaaactggactattcagggattgctcttctaattatggggagctttgtcccctggctctattattccttctactgctccccacagccacggctcatctacctctccatcgtctgtgtcctgggcatttctgccatcattgtggcgcagtgggaccggtttgccactcctaagcaccggcagacaagagcaggcgtgttcctgggacttggcttgagtggcgtcgtgcccaccatgcactttactatcgctgagggctttgtcaaggccaccacagtgggccagatgggctggttcttcctcatggctgtgatgtacatcactggagctggcctttatgctgctcgaattcctgagcgcttctttcctggaaaatttgacatatggttccagtctcatcagattttccatgtcctggtggtggcagcagcctttgtccacttctatggagtctccaaccttcaggaattccgttacggcctagaaggcggctgtactgatgacacccttctctgagccttcccacctgcggggtggaggaggaacttcccaagtgcttttaaaaataacttctttgctgaagtgagaggaagagtctgagttgtctgtttctagaagaaacctcttagagaattcagtaccaaccaagcttcagcccactttcacacccactgggcaataaactttccatttccattctcctagctggggatggggcatggtcaaacttagccatcccctcctcagcaaggcatctaccggcccctcacagagacagtactttgaaactcatgttgagattttaccctctcctccaaccattttgggaaaattatggactgggactcttcagaaattctgtcttttcttctggaagaaaatgtccctcccttacccccatccttaactttgtatcctggcttataacaggccatccatttttgtagcacacttttcaaaaacaattatataccctggtcccatctttctagggcctggatctgcttatagagcaggaagaataaagccaccaacttttacctagcccggctaatcatggaagtgtgtccaggcttcaagtaacttgagttttaattttttttttttcttggcagagtaatgtaaaatttaaatggggaaagatatttaatatttaatactaagctttaaaaagaaacctgctatcattgctatgtatcttgatgcaaagactatgatgttaataaaagaaagtacagaagagacttggcaaaaacaaaagaaaacactccacacacacaacaacaacgcaacgacccaaaaacaaaacaaaagaaacaaaaaaacaccaaaccaccaaaaacacacgaagaaaaacgacaaaacaagaatgccgaggcggccggcgcgcgcgatcgaagcagaagagaaagaaatgaggcaaccaccgacggaggagggcagcgcgccaacaaagaacatgaaagaaacggcacgaggagccgcacacagagaaagacgcggcgacgacaagaggggcggcgccacaaagaaag

SEQ ID NO: 457169 - DNA, 1741 bp, Homo sapiens
ccaggcagagcccgcgaggaggtgacgcggctgcggaggtgacgcgggaggtcgcgcgccccttccggcgcggggagggcgctgaagatcggggccgctcggccgcaggccgcctccagcgccgcgggatgtagcgcgggggaccgcggcccccagcagagcccgcctgcccggcttgtctaccatcagagggagatctctgccccctggggctgagagaccccaacctttccccaagctgaagctgcagggtattgaggtaccagccagatgtcttcccacaaaggatctgtggtggcacaggggaatggggctcctgccagtaacagggaagctgacacggtggaactggctgaactgggacccctgctagaagagaagggcaaacgggtaatcgccaacccacccaaagctgaagaagagcaaacatgcccagtgccccaggaagaagaggaggaggtgcgggtactgacacttcccctgcaagcccaccacgccatggagaagatggaagagtttgtgtacaagggggagctttgtcccctggctctattattccttctactgctccccacagccacggctcatctacctctccatcgtctgtgtcctgggcatttctgccatcattgtggcgcagtgggaccggtttgccactcctaagcaccggcagacaagagcaggcgtgttcctgggacttggcttgagtggcgtcgtgcccaccatgcactttactatcgctgagggctttgtcaaggccaccacagtgggccagatgggctggttcttcctcatggctgtgatgtacatcactggagctggcctttatgctgctcgaattcctgagcgcttctttcctggaaaatttgacatatggttccagtctcatcagattttccatgtcctggtggtggcagcagcctttgtccacttctatggagtctccaaccttcaggaattccgttacggcctagaaggcggctgtactgatgacacccttctctgagccttcccacctgcggggtggaggaggaacttcccaagtgcttttaaaaataacttctttgctgaagtgagaggaagagtctgagttgtctgtttctagaagaaacctcttagagaattcagtaccaaccaagcttcagcccactttcacacccactgggcaataaactttccatttccattctcctagctggggatggggcatggtcaaacttagccatcccctcctcagcaaggcatctaccggcccctcacagagacagtactttgaaactcatgttgagattttaccctctcctccaaccattttgggaaaattatggactgggactcttcagaaattctgtcttttcttctggaagaaaatgtccctcccttacccccatccttaactttgtatcctggcttataacaggccatccatttttgtagcacacttttcaaaaacaattatataccctggtcccatctttctagggcctggatctgcttatagagcaggaagaataaagccaccaacttttacctagcccggctaatcatggaagtgtgtccaggcttcaagtaacttgagttttaattttttttttttcttggcagagtaatgtaaaatttaaatggggaaagatatttaatatttaatactaagctttaaaaagaaacctgctatcattgctatgtatcttgatgcaaagactatgatgttaataaaagaaagtacagaagagacttggca

SEQ ID NO: 457170 - DNA, 1141 bp, Homo sapiens
  misc_feature (15)..(15): n is a, c, g, or t
caggctggtaccccncggagtatggatatcgtcgaccacgcgctccgggtttgccactcctaagcaccggcagacaagagcaggcgtgttcctgggacttggcttgagtggcgtcgtgcccaccatgcactttactatcgctgagggctttgtcaaggccaccacagtgggccagatgggctggttcttcctcatggctgtgatgtacatcactggagctggcctttatgctgctcgaattcctgagcgcttctttcctggaaaatttgacatatggttccagtctcatcagattttccatgtcctggtggtggcagcagcctttgtccacttctatggagtctccaaccttcaggaattccgttacggcctagaaggcggctgtactgatgacacccttctctgagccttcccacctgcggggtggaggaggaacttcccaagtgcttttaaaaataacttctttgctgaagtgagaggaagagtctgagttgtctgtttctagaagaaacctcttagagaattcagtaccaaccaagcttcagcccactttcacacccactgggcaataaactttccatttccattctcctagctggggatggggcatggtcaaacttagccatcccctcctcagcaaggcatctaccggcccctcacagagacagtactttgaaactcatgttgagattttaccctctcctccaaccattttgggaaaattatggactgggactcttcagaaattctgtcttttcttctggaagaaaatgtccctcccttacccccatccttaactttgtatcctggcttataacaggccatccatttttgtagcacacttttcaaaaacaattatataccctggtcccatctttctagggcctggatctgcttatagagcaggaagaataaagccaccaacttttacctagcccggctaatcatggaagtgtgtccaggcttcaagtaacttgagttttaattttttttttttcttggcagagtaatgtaaaatttaaatggggaaagatatttaatatttaatactaagctttaaaaagaaacctgctatcattgctatgtatcttgatgcaaagactatgatgttaataaaagaaagtacagaagagacttggca

SEQ ID NO: 457171 - DNA, 1255 bp, Homo sapiens
ccaggcagagcccgcgaggaggtgacgcggctgcggaggtgacgcgggaggtcgcgcgccccttccggcgcggggagggcgctgaagatcggggccgctcggccgcaggccgcctccagcgccgcgggatgtagcgcgggggaccgcggcccccagcagagcccgcctgcccggcttgtctaccatcagagggagatctctgccccctggggctgagagaccccaacctttccccaagctgaagctgcagggtattgaggtaccagccagatgtcttcccacaaaggatctgtggtggcacaggggaatggggctcctgccagtaacagggaagctgacacggtggaactggctgaactgggacccctgctagaagagaagggcaaacgggtaatcgccaacccacccaaagctgaagaagagcaaacatgcccagtgccccaggaagaagaggaggaggtgcgggtactgacacttcccctgcaagcccaccacgccatggagaagatggaagagtttgtgtacaaggtctgggagggacgttggagggtcatcccatatgatgtgctccctgactggctaaaggacaacgactatctgctacatggtcatagacctcccatgccctcctttcgggcttgcttcaagagcatcttccgcattcatacagaaactggcaacatctggacccatctgcttggtttcgtgctgtttctctttttgggaatcttgaccatgctcagaccaaatatgtacttcatggcccctctacaggagaaggtggtttttgggatgttctttttgggtgcagtgctctgcctcagcttctcctggctctttcacaccgtctattgtcattcagagaaagtctctcggactttttccaaactggactattcagggattgctcttctaattatggggagctttgtcccctggctctattattccttctactgctccccacagccacggctcatctacctctccatcgtctgtgtcctgggcatttctgccatcattgtggcgcagtgggaccggtttgccactcctaagcaccggcagacaagagcaggcgtgttcctgggacttggcttgagtggcaagttcgtagggtggaggccaccaaaacgctatggaataaagtattgtctagttgcacgtgggcaggagaggctccatggaggtgatgacaagtaagagaagccagaaagatgggagtatattggggtggtgacaaagcgagtggagatgg

SEQ ID NO: 457172 - DNA, 607 bp, Homo sapiens
ctcagggcctggcggatagtaagtgctcatttaggcaaatgtattccatggcctatggcagtacctgacagttaacttctagagttgagcctctttatgtgaagaaccccatacaaggtactgagaagaaatgttatgagcaagagcgaggagcacagactgaacagacacattctctctcgtgaaaaaattataaatgcctgaaatacacccagaaagtagctctcagtgtgaaaatttcagaaatatacacatcagctgtgaggtgtaggcgtaagtggtcagtcccgaagttgagtttgagctgggtggaatgacattgtgaggcaacggggactggtggagggccagccggggagcaaggtcatgctccgctgaggagtgtgtgctttttggattgtagaagagtatcagctccctcgaaaacacatccaaggtctagaaaaggccctcaaacctggcaagaagaagtgacagactcttttgtctcacgtggtggatccggtggaaatccaagctctgggctggtaatttttatgagcattttcagcttttgcaaatacaaaatataattctttacaaaaataaatttttattctaatctaaa

SEQ ID NO: 457173 - DNA, 653 bp, Homo sapiens
gctatctagaggatcccttgtcttgccacaaagtatgccaactgacataaagaagtcaagctacaaaaagctctctaagttcctgcagcaaatgcagcaggagcagattatacaggtgaaggagctgagcaaaggggtggagagcattgtggctgtggactggaaacacccgaggattacatctttcgtcatacccgagccctccccgacctcccagactatccaggagggtagcagggaacagccctatcaccctccagatataaaacccctctactgtgtcccagccagcatgaccctgctcttccaggagtctggccacaagaaggggagctttctggagggcagtgaggtccgaacgatcgtcattaactacgccaagaaaaatgacctggttgatgcagacaacaaaaatcttgtgagattggatcccatcctatgtgactgcatcttagagaaaaatgaacagcatacagtcatgaagcttccatgggacagtcttctgaccaggtgtttggaaaaattacagcctgcctatcaagtgacccttcccggacaagagcccattgtgaagaaagggagaatctgtccaattgacatcaccctagcacaaagagcgtctaataaaaaggtaattttagaaagacacaatg

SEQ ID NO: 457174 - DNA, 1951 bp, Homo sapiens
aggggcgttccctgggccctgcccctccctgccctgctttagttccaggccaccccagcagacatgtttgccaaggcctttcgggtcaagtccaacacggccatcaaggggtcggacaggagaaagcttcgagctgatgtgacaactgctttccccacccttggaactgatcaagtctctgagttagtacctggaaaggaggagctcaacattgtgaagttgtatgctcacaaaggggatgcagtgactgtgtacgtgagtggtggtaaccccatcctctttgaactggagaaaaatctgtatccaacagtgtacacgctgtggtcctatcctgatcttctgccaacctttacaacatggcctctggtgctcgagaaactggtagggggagcagatttgatgctgcctggactggtgatgccccctgctggtctgcctcaggtacagaagggcgacctctgtgccatttctttggtggggaacagagcccctgtagccattggagttgcagccatgtccacagctgagatgctcacgtcaggcctgaagggaaggggcttctctgtgctccacacttaccaggaccacttgtggcggtctggaaacaagtcctctccaccttccattgctccactggccctggattcagcagatctcagtgaagagaaggggtctgtccagatggactccaccctgcagggagacatgaggcacatgaccctggagggggaagaggagaatggggaggttcaccaggcacgtgaagacaagtctctctcagaagccccagaagacaccagcaccaggggcctgaaccaagactccacagatagcaaaacgcttcaagaacaaatggatgagctgttacagcaatgcttcttacatgccttgaagtgccgagtcaaaaaggctgacctccctttactcaccagcactttccttggcagccacatgttctcctgctgccccgaaggacgacaactggacataaagaagtcaagctacaaaaagctctctaagttcctgcagcaaatgcagcaggagcagattatacaggtgaaggagctgagcaaaggggtggagagcattgtggctgtggactggaaacacccgaggattacatctttcgtcatacccgagccctccccgacctcccagactatccaggagggtagcagggaacagccctatcaccctccagatataaaacccctctactgtgtcccagccagcatgaccctgctcttccaggagtctggccacaagaaggggagctttctggagggcagtgaggtccgaacgatcgtcattaactacgccaagaaaaatgacctggttgatgcagacaacaaaaatcttgtgagattggatcccatcctatgtgactgcatcttagagaaaaatgaacagcatacagtcatgaagcttccatgggacagtcttctgaccaggtgtttggaaaaattacagcctgcctatcaagtgacccttcccggacaagagcccattgtgaagaaagggagaatctgtccaattgacatcaccctagcacaaagagcgtctaataaaaaggtgaccgtggtccggaacttggaggcctatggtctggacccatactcagtggctgccatccttcagcagcgatgccaggctagcaccaccgtcaatcctgcccctggggccaaggacagccttcaggtgcagatccagggaaaccaggtccaccacctcggctggctattgcttgaagagtatcagctccctcgaaaacacatccaaggtctagaaaaggccctcaaacctggcaagaagaagtgacagactcttttgtctcacgtggtggatccggtggaaatccaagctctgggctggtaatttttatgagcattttcagcttttgcaaatacaaaatataattctttacaaaaataaatttttattctaatctaaa

SEQ ID NO: 457175 - DNA, 2093 bp, Homo sapiens
aggggcgttccctgggccctgcccctccctgccctgctttagttccaggtaccgccactgggggcggccgcggcctccccagcggcaacggccacgaagctgcgcggccctggtttccagccgggcccttttcgcggccgggccccagcatggctgcccccacggctgagggcctggcagctgctgcgccctcgctttcttgacattccctggcttctgtgctctcttccccaggccaccccagcagacatgtttgccaaggcctttcgggtcaagtccaacacggccatcaaggggtcggacaggagaaagcttcgagctgatgtgacaactgctttccccacccttggaactgatcaagtctctgagttagtacctggaaaggaggagctcaacattgtgaagttgtatgctcacaaaggggatgcagtgactgtgtacgtgagtggtggtaaccccatcctctttgaactggagaaaaatctgtatccaacagtgtacacgctgtggtcctatcctgatcttctgccaacctttacaacatggcctctggtgctcgagaaactggtagggggagcagatttgatgctgcctggactggtgatgccccctgctggtctgcctcagagcccctgtagccattggagttgcagccatgtccacagctgagatgctcacgtcaggcctgaagggaaggggcttctctgtgctccacacttaccaggaccacttgtggcggtctggaaacaagtcctctccaccttccattgctccactggccctggattcagcagatctcagtgaagagaaggggtctgtccagatggactccaccctgcagggagacatgaggcacatgaccctggagggggaagaggagaatggggaggttcaccaggcacgtgaagacaagtctctctcagaagccccagaagacaccagcaccaggggcctgaaccaagactccacagatagcaaaacgcttcaagaacaaatggatgagctgttacagcaatgcttcttacatgccttgaagtgccgagtcaaaaaggctgacctccctttactcaccagcactttccttggcagccacatgttctcctgctgccccgaaggacgacaactggacataaagaagtcaagctacaaaaagctctctaagttcctgcagcaaatgcagcaggagcagattatacaggtgaaggagctgagcaaaggggtggagagcattgtggctgtggactggaaacacccgaggattacatctttcgtcatacccgagccctccccgacctcccagactatccaggagggtagcagggaacagccctatcaccctccagatataaaacccctctactgtgtcccagccagcatgaccctgctcttccaggagtctggccacaagaaggggagctttctggagggcagtgaggtccgaacgatcgtcattaactacgccaagaaaaatgacctggttgatgcagacaacaaaaatcttgtgagattggatcccatcctatgtgactgcatcttagagaaaaatgaacagcatacagtcatgaagcttccatgggacagtcttctgaccaggtgtttggaaaaattacagcctgcctatcaagtgacccttcccggacaagagcccattgtgaagaaagggagaatctgtccaattgacatcaccctagcacaaagagcgtctaataaaaaggtgaccgtggtccggaacttggaggcctatggtctggacccatactcagtggctgccatccttcagcagcgatgccaggctagcaccaccgtcaatcctgcccctggggccaaggacagccttcaggtgcagatccagggaaaccaggtccaccacctcggctggctattgcttgaagagtatcagctccctcgaaaacacatccaaggtctagaaaaggccctcaaacctggcaagaagaagtgacagactcttttgtctcacgtggtggatccggtggaaatccaagctctgggctggtaatttttatgagcattttcagcttttgcaaatacaaaatataattctttacaaaaataaatttttattctaatctaaa

SEQ ID NO: 457176 - DNA, 2266 bp, Homo sapiens
  misc_feature (2148)..(2148): n is a, c, g, or t
  misc_feature (2151)..(2151): n is a, c, g, or t
  misc_feature (2225)..(2225): n is a, c, g, or t
aggggcgttccctgggccctgcccctccctgccctgctttagttccaggtaccgccactgggggcggccgcggcctccccagcggcaacggccacgaagctgcgcggccctggtttccagccgggcccttttcgcggccgggccccagcatggctgcccccacggctgagggcctggcagctgctgcgccctcgctttcttgacattccctggcttctgtgctctcttccccaggccaccccagcagacatgtttgccaaggcctttcgggtcaagtccaacacggccatcaaggggtcggacaggagaaagcttcgagctgatgtgacaactgctttccccacccttggaactgatcaagtctctgagttagtacctggaaaggaggagctcaacattgtgaagttgtatgctcacaaaggggatgcagtgactgtgtacgtgagtggtggtaaccccatcctctttgaactggagaaaaatctgtatccaacagtgtacacgctgtggtcctatcctgatcttctgccaacctttacaacatggcctctggtgctcgagaaactggtagggggagcagatttgatgctgcctggactggtgatgccccctgctggtctgcctcaggtacagaagggcgacctctgtgccatttctttggtggggaacagagcccctgtagccattggagttgcagccatgtccacagctgagatgctcacgtcaggcctgaagggaaggggcttctctgtgctccacacttaccaggaccacttgtggcggtctggaaacaagtcctctccaccttccattgctccactggccctggattcagcagatctcagtgaagagaaggggtctgtccagatggactccaccctgcagggagacatgaggcacatgaccctggagggggaagaggagaatggggaggttcaccaggcacgtgaagacaagtctctctcagaagccccagaagacaccagcaccaggggcctgaaccaagactccacagatagcaaaacgcttcaagaacaaatggatgagctgttacagcaatgcttcttacatgccttgaagtgccgagtcaaaaaggctgacctccctttactcaccagcactttccttggcagccacatgttctcctgctgccccgaaggacgacaactggacataaagaagtcaagctacaaaaagctctctaagttcctgcagcaaatgcagcaggagcagattatacaggtgaaggagctgagcaaaggggtggagagcattgtggctgtggactggaaacacccgaggattacatctttcgtcatacccgagccctccccgacctcccagactatccaggagggtagcagggaacagccctatcaccctccagatataaaacccctctactgtgtcccagccagcatgaccctgctcttccaggagtctggccacaagaaggggagctttctggagggcagtgaggtccgaacgatcgtcattaactacgccaagaaaaatgacctggttgatgcagacaacaaaaatcttgtgagattggatcccatcctatgtgactgcatcttagagaaaaatgaacagcatacagtcatgaagcttccatgggacagtcttctgaccaggtgtttggaaaaattacagcctgcctatcaagtgacccttcccggacaagagcccattgtgaagaaagggagaatctgtccaattgacatcaccctagcacaaagagcgtctaataaaaaggtgaccgtggtccggaacttggaggcctatggtctggacccatactcagtggctgccatccttcagcagcgatgccaggctagcaccaccgtcaatcctgcccctggggccaaggacagccttcaggtgcagatccagggaaaccaggtccaccacctcggctggctattgcttgaagagtatcagctccctcgaaaacacatccaaggtctagaaaaggccctcaaacctggcaagaagaagtgacagactcttttgtctcacgtggtggatccggtggaaatccaagctctgggctggtaatttttatgagcattttcagcttttgcaaatacaaaatataattctttacaaaaataaatttttattctaatctaaaaaaaaaaaaanctngagggggggccggtacccaattcgcctataggggagcgaatacaattactggccgcggttacacgtgtgctggncctgggtccacttaatcgcttgagacatcccctttgcactg

SEQ ID NO: 457177 - DNA, 2370 bp, Homo sapiens
aggggcgttccctgggccctgcccctccctgccctgctttagttccaggtaccgccactgggggcggccgcggcctccccagcggcaacggccacgaagctgcgcggccctggtttccagccgggcccttttcgcggccgggccccagcatggctgcccccacggctgagggcctggcagctgctgcgccctcgctttcttgacattccctggcttctgtgctctcttccccaggccaccccagcagacatgtttgccaaggcctttcgggtcaagtccaacacggccatcaaggggtcggacaggagaaagcttcgagctgatgtgacaactgctttccccacccttggaactgatcaagtctctgagttagtacctggaaaggaggagctcaacattgtgaagttgtatgctcacaaaggggatgcagtgactgtgtacgtgagtggtggtaaccccatcctctttgaactggagaaaaatctgtatccaacagtgtacacgctgtggtcctatcctgatcttctgccaacctttacaacatggcctctggtgctcgagaaactggtagggggagcagatttgatgctgcctggactggtgatgccccctgctggtctgcctcaggtacagaagggcgacctctgtgccatttctttggtggggaacagagcccctgtagccattggagttgcagccatgtccacagctgagatgctcacgtcaggcctgaagggaaggggcttctctgtgctccacacttaccaggaccacttgtggcggtctggaaacaagtcctctccaccttccattgctccactggccctggattcagcagatctcagtgaagagaaggggtctgtccagatggactccaccctgcagggagacatgaggcacatgaccctggagggggaagaggagaatggggaggttcaccaggcacgtgaagacaagtctctctcagaagccccagaagacaccagcaccaggggcctgaaccaagactccacagatagcaaaacgcttcaagaacaaatggatgagctgttacagcaatgcttcttacatgccttgaagtgccgagtcaaaaaggctgacctccctttactcaccagcactttccttggcagccacatgttctcctgctgccccgaaggacgacaactggacataaagaagtcaagctacaaaaagctctctaagttcctgcagcaaatgcagcaggagcagattatacaggtgaaggagctgagcaaaggggtggagagcattgtggctgtggactggaaacacccgaggattacatctttcgtcatacccgagccctccccgacctcccagactatccaggagggtagcagggaacagccctatcaccctccagatataaaacccctctactgtgtcccagccagcatgaccctgctcttccaggagtctggccacaagaaggggagctttctggagggcagtgaggtccgaacgatcgtcattaactacgccaagaaaaatgacctggttgatgcagacaacaaaaatcttgtgagattggatcccatcctatgtgactgcatcttagagaaaaatgaacagcatacagtcatgaagcttccatgggacagtcttctgaccaggtgtttggaaaaattacagcctgcctatcaagtgacccttcccggacaagagcccattgtgaagaaagggagaatctgtccaattgacatcaccctagcacaaagagcgtctaataaaaagataacaaaactgaggctgagtttaagaaacatgcctgtggtcccctgctagtaagaagctaagtaggaactggaatcaaatccatctaaggcccatgctcttctcaattcaccatgtagccaccatgggacggcatcttttgctgaaggggccggcctgccacacccataatgatcactgaaactctgtgctgcggggctgggatgagcagctcttaaaccaaagcctgtctctggaactgaaccttgattctgttgcagaccacccaagggcaagcagctctggccatctcccacttgccggagaaattaaaacgtttttgtggacctctaaagtcgtgtgtgcctgtggcacgatgcctgctgtgcctcatggagaagtgaccatactttccagctgttcagtcccagaccaccctgaaccagagtactgcagagttaattaaggatggacggtgggtaggtgagtgagtggatcccaataccccatcccaggccaactctctcctaagctctctcagttctttcaggccaatttagagagtattcctttgcaaatgatatatgccataagggattgatatgcagaatatataaactaccacaatacaaa

SEQ ID NO: 457178 - DNA, 1780 bp, Homo sapiens
aggggcgttccctgggccctgcccctccctgccctgctttagttccaggtaccgccactgggggcggccgcggcctccccagcggcaacggccacgaagctgcgcggccctggtttccagccgggcccttttcgcggccgggccccagcatggctgcccccacggctgagggcctggcagctgctgcgccctcgctttcttgacattccctggcttctgtgctctcttccccaggccaccccagcagacatgtttgccaaggcctttcgggtcaagtccaacacggccatcaaggggtcggacaggagaaagcttcgagctgatgtgacaactgctttccccacccttggaactgatcaagtctctgagttagtacctggaaaggaggagctcaacattgtgaagttgtatgctcacaaaggggatgcagtgactgtgtacgtgagtggtggtaaccccatcctctttgaactggagaaaaatctgtatccaacagtgtacacgctgtggtcctatcctgatcttctgccaacctttacaacatggcctctggtgctcgagaaactggtagggggagcagatttgatgctgcctggactggtgatgccccctgctggtctgcctcaggtacagaagggcgacctctgtgccatttctttggtggggaacagagcccctgtagccattggagttgcagccatgtccacagctgagatgctcacgtcaggcctgaagggaaggggcttctctgtgctccacacttaccaggaccacttgtggcggtctggaaacaagtcctctccaccttccattgctccactggccctggattcagcagatctcagtgaagagaaggggtctgtccagatggactccaccctgcagggagacatgaggcacatgaccctggagggggaagaggagaatggggaggttcaccaggcacgtgaagacaagtctctctcagaagccccagaagacaccagcaccaggggcctgaaccaagactccacagatagcaaaacgcttcaagaacaaatggatgagctgttacagcaatgcttcttacatgccttgaagtgccgagtcaaaaaggctgacctccctttactcaccagcactttccttggcagccacatgttctcctgctgccccgaaggacgacaactggacataaagaagtcaagctacaaaaagctctctaagttcctgcagcaaatgcagcaggagcagattatacaggtgaaggagctgagcaaaggggtggagagcattgtggctgtggactggaaacacccgaggattacatctttcgtcatacccgagccctccccgacctcccagactatccaggagggtagcagggaacagccctatcaccctccagatataaaacccctctactgtgtcccagccagcatgaccctgctcttccaggagtctggccacaagaaggggagctttctggagggcagtgaggtccgaacgatcgtcattaactacgccaagaaaaatgacctggttgatgcagacaacaaaaatcttgtgagattggatcccatcctatgtgactgcatcttagagaaaaatgaacagcatacagtcatgaagcttccatgggacagtcttctgaccaggtgtttggaaaaattacagcctgcctatcaagtgacccttcccggacaagagcccattgtgaagaaagggagaatctgtccaattgacatcaccctagcacaaagagcgtctaataaaaaggtaattttagaaagacacaatg

SEQ ID NO: 457179 - DNA, 1764 bp, Homo sapiens
aggggcgttccctgggccctgcccctccctgccctgctttagttccaggtaccgccactgggggcggccgcggcctccccagcggcaacggccacgaagctgcgcggccctggtttccagccgggcccttttcgcggccgggccccagcatggctgcccccacggctgagggcctggcagctgctgcgccctcgctttcttgacattccctggcttctgtgctctcttccccaggccaccccagcagacatgtttgccaaggcctttcgggtcaagtccaacacggccatcaaggggtcggacaggagaaagcttcgagctgatgtgacaactgctttccccacccttggaactgatcaagtctctgagttagtacctggaaaggaggagctcaacattgtgaagttgtatgctcacaaaggggatgcagtgactgtgtacgtgagtggtggtaaccccatcctctttgaactggagaaaaatctgtatccaacagtgtacacgctgtggtcctatcctgatcttctgccaacctttacaacatggcctctggtgctcgagaaactggtagggggagcagatttgatgctgcctggactggtgatgccccctgctggtctgcctcaggtacagaagggcgacctctgtgccatttctttggtggggaacagagcccctgtagccattggagttgcagccatgtccacagctgagatgctcacgtcaggcctgaagggaaggggcttctctgtgctccacacttaccaggaccacttgtggcggtctggaaacaagtcctctccaccttccattgctccactggccctggattcagcagatctcagtgaagagaaggggtctgtccagatggactccaccctgcagggagacatgaggcacatgaccctggagggggaagaggagaatggggaggttcaccaggcacgtgaagacaagtctctctcagaagccccagaagacaccagcaccaggggcctgaaccaagactccacagatagcaaaacgcttcaagaacaaatggatgagctgttacagcaatgcttcttacatgccttgaagtgccgagtcaaaaaggctgacctccctttactcaccagcactttccttggcagccacatgttctcctgctgccccgaaggacgacaactggacataaagaagtcaagctacaaaaagctctctaagttcctgcagcaaatgcagcaggagcagattatacaggtgaaggagctgagcaaaggggtggagagcattgtggctgtggactggaaacacccgaggattacatctttcgtcatacccgagccctccccgacctcccagactatccaggagggtagcagggaacagccctatcaccctccagatataaaacccctctactgtgtcccagccagcatgaccctgctcttccaggagtctggccacaagtgagtttttggagagcagcccttctctgcctgcttggtgttctggcctacagttcctctcaatctgagtagtgctcttttgcgactggcaaaacctgctctgcccctgttctccccttctccaaaatccagcttccagccttcttccctgggcaagttcctctggactaaatgaacgagtaggtctcacccttttctgcgtgtaattattcttcacatggtcatgctcacttcagtcaggaaaagggaagaaactagaggccgaaagctaaggaaagttccctgctcagcagggagtgagtctgggcatctg

SEQ ID NO: 457180 - DNA, 1384 bp, Homo sapiens
aggggcgttccctgggccctgcccctccctgccctgctttagttccaggtaccgccactgggggcggccgcggcctccccagcggcaacggccacgaagctgcgcggccctggtttccagccgggcccttttcgcggccgggccccagcatggctgcccccacggctgagggcctggcagctgctgcgccctcgctttcttgacattccctggcttctgtgctctcttccccaggccaccccagcagacatgtttgccaaggcctttcgggtcaagtccaacacggccatcaaggggtcggacaggagaaagcttcgagctgatgtgacaactgctttccccacccttggaactgatcaagtctctgagttagtacctggaaaggaggagctcaacattgtgaagttgtatgctcacaaaggggatgcagtgactgtgtacgtgagtggtggtaaccccatcctctttgaactggagaaaaatctgtatccaacagtgtacacgctgtggtcctatcctgatcttctgccaacctttacaacatggcctctggtgctcgagaaactggtagggggagcagatttgatgctgcctggactggtgatgccccctgctggtctgcctcaggtacagaagggcgacctctgtgccatttctttggtggggaacagagcccctgtagccattggagttgcagccatgtccacagctgagatgctcacgtcaggcctgaagggaaggggcttctctgtgctccacacttaccaggaccacttgtggcggtctggaaacaagtcctctccaccttccattgctccactggccctggattcagcagatctcagtgaagagaaggggtctgtccagatggactccaccctgcagggagacatgaggcacatgaccctggagggggaagaggagaatggggaggttcaccaggcacgtgaagacaagtctctctcagaagccccagaagacaccagcaccaggggcctgaaccaagactccacagatagcaaaacgcttcaagaacaaatggatgagctgttacagcaatgcttcttacatgccttgaagtgccgagtcaaaaaggctgacctccctttactcaccagcactttccttggcagccacatgttctcctgctgccccgaaggacgacaactggacataaccgaagtcacagctacaaaaagtctcttagtcctggcagccaactgcagacaggagccagattataccggtgacggagcctgagcaaggggtggacacagccttgtgctgtgacttggacaccccgagggattcattcttcgtatacccgggcctcacgtacatcacgcttatccgagggtgcgggacacccctcccctccgaatta

SEQ ID NO: 457181 - DNA, 855 bp, Homo sapiens
aggggcgttccctgggccctgcccctccctgccctgctttagttccaggtaccgccactgggggcggccgcggcctccccagcggcaacggccacgaagctgcgcggccctggtttccagccgggcccttttcgcggccgggccccagcatggctgcccccacggctgagggcctggcagctgctgcgccctcgctttcttgacattccctggcttctgtgctctcttccccaggccaccccagcagacatgtttgccaaggcctttcgggtcaagtccaacacggccatcaaggggtcggacaggagaaagcttcgagctgatgtgacaactgctttccccacccttggaactgatcaagtctctgagttagtacctggaaaggaggagctcaacattgtgaagttgtatgctcacaaaggggatgcagtgactgtgtacgtgagtggtggtaaccccatcctctttgaactggagaaaaatctgtatccaacagtgtacacgctgtggtcctatcctgatcttctgccaacctttacaacatggcctctggtgctcgagaaactggtagggggagcagatttgatgctgcctggactggtgatgccccctgctggtctgcctcaggtacagaagggcgacctctgtgccatttctttggtggggaacagagcccctgtagccattggagttgcagccatgtccacagctgagatgctcacgtcaggcctgaagggaaggggcttctctgtgctccacacttaccaggaccacttgtgggaggagacaagatttattctccccatttcagagatgaagaaactgaggcatggaacttttaggggcccagaattg

SEQ ID NO: 457182 - DNA, 304 bp, Homo sapiens
gtctgctcccgctgtactctccccaaggggtcctgacctattaataacagcctgtgctgggtactttcacataccttctcttacatactatgtatgtcattcttatttcacagataacaaaactgaggctgagtttaagaaacatgcctgtggtcccctgctagtaagaagctaagtaggaactggaatcaaatccatctaaggcccatgctcttctcaattcaccatgtagccaccatgggacggcatcttttgctgaaggggccggcctgccacacccataatgatcactgaaactctgtgc

SEQ ID NO: 457183 - DNA, 2137 bp, Homo sapiens
aggggcgttccctgggccctgcccctccctgccctgctttagttccaggtaccgccactgggggcggccgcggcctccccagcggcaacggccacgaagctgcgcggccctggtttccagccgggcccttttcgcggccgggccccagcatggctgcccccacggctgagggcctggcagctgctgcgccctcgctttcttgacattccctggcttctgtgctctcttccccaggccaccccagcagacatgtttgccaaggcctttcgggtcaagtccaacacggccatcaaggggtcggacaggagaaagcttcgagctgatgtgacaactgctttccccacccttggaactgatcaagtctctgagttagtacctggaaaggaggagctcaacattgtgaagttgtatgctcacaaaggggatgcagtgactgtgtacgtgagtggtggtaaccccatcctctttgaactggagaaaaatctgtatccaacagtgtacacgctgtggtcctatcctgatcttctgccaacctttacaacatggcctctggtgctcgagaaactggtagggggagcagatttgatgctgcctggactggtgatgccccctgctggtctgcctcaggtacagaagggcgacctctgtgccatttctttggtggggaacagagcccctgtagccattggagttgcagccatgtccacagctgagatgctcacgtcaggcctgaagggaaggggcttctctgtgctccacacttaccaggaccacttgtggcggtctggaaacaagtcctctccaccttccattgctccactggccctggattcagcagatctcagtgaagagaaggggtctgtccagatggactccaccctgcagggagacatgaggcacatgaccctggagggggaagaggagaatggggaggttcaccaggcacgtgaagacaagtctctctcagaagccccagaagacaccagcaccaggggcctgaaccaagactccacagatagcaaaacgcttcaagaacaaatggatgagctgttacagcaatgcttcttacatgccttgaagtgccgagtcaaaaaggctgacctccctttactcaccagcactttccttggcagccacatgttctcctgctgccccgaaggacgacaactggacataaagaagtcaagctacaaaaagctctctaagttcctgcagcaaatgcagcaggagcagattatacaggtgaaggagctgagcaaaggggtggagagcattgtggctgtggactggaaacacccgaggattacatctttcgtcatacccgagccctccccgacctcccagactatccaggagggtagcagggaacagccctatcaccctccagatataaaacccctctactgtgtcccagccagcatgaccctgctcttccaggagtctggccacaagaaggggagctttctggagggcagtgaggtccgaacgatcgtcattaactacgccaagaaaaatgacctggttgatgcagacaacaaaaatcttgtgagattggatcccatcctatgtgactgcatcttagagaaaaatgaacagcatacagtcatgaagcttccatgggacagtcttctgaccaggtgtttggaaaaattacagcctgcctatcaagtgacccttcccggacaagagcccattgtgaagaaagggagaatctgtccaattgacatcaccctagcacaaagagcgtctaataaaaaggtgaccgtggtccggaacttggaggcctatggtctggacccatactcagtggctgccatccttcagcagcgatgccaggctagcaccaccgtcaatcctgcccctggggccaaggacagccttcaggtgcagatccagggaaaccaggtccaccacctcggctggctattgcttgaagagtatcagctccctcgaaaacacatccaaggtctagaaaaggccctcaaacctggcaagaagaagtgacagactcttttgtctcacgtggtggatccggtggaaatccaagctctgggctggtaatttttatgagcattttcagcttttgcaaatacaaaatataattctttacaaaaataaatttttattctaatctaaa

SEQ ID NO: 457184 - DNA, 2053 bp, Homo sapiens
aggggcgttccctgggccctgcccctccctgccctgctttagttccaggtaccgccactgggggcggccgcggcctccccagcggcaacggccacgaagctgcgcggccctggtttccagccgggcccttttcgcggccgggccccagcatggctgcccccacggctgagggcctggcagctgctgcgccctcgctttcttgacattccctggcttctgtgctctcttccccaggccaccccagcagacatgtttgccaaggcctttcgggtcaagtccaacacggccatcaaggggtcggacaggagaaagcttcgagctgatgtgacaactgctttccccacccttggaactgatcaagtctctgagttagtacctggaaaggaggagctcaacattgtgaagttgtatgctcacaaaggggatgcagtgactgtgtacgtgagtggtggtaaccccatcctctttgaactggagaaaaatctgtatccaacagatttgatgctgcctggactggtgatgccccctgctggtctgcctcaggtacagaagggcgacctctgtgccatttctttggtggggaacagagcccctgtagccattggagttgcagccatgtccacagctgagatgctcacgtcaggcctgaagggaaggggcttctctgtgctccacacttaccaggaccacttgtggcggtctggaaacaagtcctctccaccttccattgctccactggccctggattcagcagatctcagtgaagagaaggggtctgtccagatggactccaccctgcagggagacatgaggcacatgaccctggagggggaagaggagaatggggaggttcaccaggcacgtgaagacaagtctctctcagaagccccagaagacaccagcaccaggggcctgaaccaagactccacagatagcaaaacgcttcaagaacaaatggatgagctgttacagcaatgcttcttacatgccttgaagtgccgagtcaaaaaggctgacctccctttactcaccagcactttccttggcagccacatgttctcctgctgccccgaaggacgacaactggacataaagaagtcaagctacaaaaagctctctaagttcctgcagcaaatgcagcaggagcagattatacaggtgaaggagctgagcaaaggggtggagagcattgtggctgtggactggaaacacccgaggattacatctttcgtcatacccgagccctccccgacctcccagactatccaggagggtagcagggaacagccctatcaccctccagatataaaacccctctactgtgtcccagccagcatgaccctgctcttccaggagtctggccacaagaaggggagctttctggagggcagtgaggtccgaacgatcgtcattaactacgccaagaaaaatgacctggttgatgcagacaacaaaaatcttgtgagattggatcccatcctatgtgactgcatcttagagaaaaatgaacagcatacagtcatgaagcttccatgggacagtcttctgaccaggtgtttggaaaaattacagcctgcctatcaagtgacccttcccggacaagagcccattgtgaagaaagggagaatctgtccaattgacatcaccctagcacaaagagcgtctaataaaaaggtgaccgtggtccggaacttggaggcctatggtctggacccatactcagtggctgccatccttcagcagcgatgccaggctagcaccaccgtcaatcctgcccctggggccaaggacagccttcaggtgcagatccagggaaaccaggtccaccacctcggctggctattgcttgaagagtatcagctccctcgaaaacacatccaaggtctagaaaaggccctcaaacctggcaagaagaagtgacagactcttttgtctcacgtggtggatccggtggaaatccaagctctgggctggtaatttttatgagcattttcagcttttgcaaatacaaaatataattctttacaaaaataaatttttattctaatctaaa

SEQ ID NO: 457185 - DNA, 1765 bp, Homo sapiens
aggggcgttccctgggccctgcccctccctgccctgctttagttccaggtaccgccactgggggcggccgcggcctccccagcggcaacggccacgaagctgcgcggccctggtttccagccgggcccttttcgcggccgggccccagcatggctgcccccacggctgagggcctggcagctgctgcgccctcgctttcttgacattccctggcttctgtgctctcttccccaggccaccccagcagacatgtttgccaaggcctttcgggtcaagtccaacacggccatcaaggggtcggacaggagaaagcttcgagctgatgtgacaactgctttccccacccttggaactgatcaagtctctgagttagtacctggaaaggaggagctcaacattgtgaagttgtatgctcacaaaggggatgcagtgactgtgtacgtgagtggtggtaaccccatcctctttgaactggagaaaaatctgtatccaacagtgtacacgctgtggtcctatcctgatcttctgccaacctttacaacatggcctctggtgctcgagaaactggtagggggagcagatttgatgctgcctggactggtgatgccccctgctggtctgcctcaggtacagaagggcgacctctgtgccatttctttggtggggaacagagcccctgtagccattggagttgcagccatgtccacagctgagatgctcacgtcaggcctgaagggaaggggcttctctgtgctccacacttaccaggaccacttgtgccccgaaggacgacaactggacataaagaagtcaagctacaaaaagctctctaagttcctgcagcaaatgcagcaggagcagattatacaggtgaaggagctgagcaaaggggtggagagcattgtggctgtggactggaaacacccgaggattacatctttcgtcatacccgagccctccccgacctcccagactatccaggagggtagcagggaacagccctatcaccctccagatataaaacccctctactgtgtcccagccagcatgaccctgctcttccaggagtctggccacaagaaggggagctttctggagggcagtgaggtccgaacgatcgtcattaactacgccaagaaaaatgacctggttgatgcagacaacaaaaatcttgtgagattggatcccatcctatgtgactgcatcttagagaaaaatgaacagcatacagtcatgaagcttccatgggacagtcttctgaccaggtgtttggaaaaattacagcctgcctatcaagtgacccttcccggacaagagcccattgtgaagaaagggagaatctgtccaattgacatcaccctagcacaaagagcgtctaataaaaaggtgaccgtggtccggaacttggaggcctatggtctggacccatactcagtggctgccatccttcagcagcgatgccaggctagcaccaccgtcaatcctgcccctggggccaaggacagccttcaggtgcagatccagggaaaccaggtccaccacctcggctggctattgcttgaagagtatcagctccctcgaaaacacatccaaggtctagaaaaggccctcaaacctggcaagaagaagtgacagactcttttgtctcacgtggtggatccggtggaaatccaagctctgggctggtaatttttatgagcattttcagcttttgcaaatacaaaatataattctttacaaaaataaatttttattctaatctaaa

SEQ ID NO: 457186 - DNA, 1614 bp, Homo sapiens
aggggcgttccctgggccctgcccctccctgccctgctttagttccaggtaccgccactgggggcggccgcggcctccccagcggcaacggccacgaagctgcgcggccctggtttccagccgggcccttttcgcggccgggccccagcatggctgcccccacggctgagggcctggcagctgctgcgccctcgctttcttgacattccctggcttctgtgctctcttccccaggccaccccagcagacatgtttgccaaggcctttcgggtcaagtccaacacggccatcaaggggtcggacaggagaaagcttcgagctgatgtgacaactgctttccccacccttggaactgatcaagtctctgagttagtacctggaaaggaggagctcaacattgtgaagttgtatgctcacaaaggggatgcagtgactgtgtacgtgagtggtggtaaccccatcctctttgaactggagaaaaatctgtatccaacagtgtacacgctgtggtcctatcctgatcttctgccaacctttacaacatggcctctggtgctcgagaaactggtagggggagcagatttgatgctgcctggactggtgatgccccctgctggtctgcctcaggtacagaagggcgacctctgtgccatttctttggtggggaacagagcccctgtagccattggagttgcagccatgtccacagctgagatgctcacgtcaggcctgaagggaaggggcttctctgtgctccacacttaccaggaccacttgtggcggtctggaaacaagtcctctccaccttccattgctccactggccctggattcagcagatctcagtgaagagaaggggtctgtccagatggactccaccctgcagggagacatgaggcacatgaccctggagggggaagaggagaatggggaggttcaccaggcacgtgaagacaagtctctctcagaagccccagaagacaccagcaccaggggcctgaaccaagactccacagatagcaaaacgcttcaagaacaaatggatgagctgttacagcaatgcttcttacatgccttgaagtgccgagtcaaaaaggctgacctccctttactcaccagcactttccttggcagccacatgttctcctgctgccccgaaggacgacaactggacataaagaagtcaagctacaaaaagctctctaagttcctgcagcaaatgcagcaggagcagattatacaggtgaaggagctgagcaaaggggtggagagcattgtggctgtggactggaaacacccgaggattacatctttcgtcatacccgagccctccccgacctcccagactatccaggagggtagcagggaacagccctatcaccctccagatataaaacccctctactgtgtcccagccagcatgaccctgctcttccaggagtctggccacaagaaggggagctttctggagggcagtgaggtccgaacgatcgtcattaactacgccaagaaaaatgacctggttgatgcagacaacaaaaatcttgtgagattggatcccatcctatgtgactgtatgcgggttcatttttctctaagatgcagtcagtcgacc

SEQ ID NO: 457187 - DNA, 2116 bp, Homo sapiens
aggggcgttccctgggccctgcccctccctgccctgctttagttccaggtaccgccactgggggcggccgcggcctccccagcggcaacggccacgaagctgcgcggccctggtttccagccgggcccttttcgcggccgggccccagcatggctgcccccacggctgagggcctggcagctgctgcgccctcgctttcttgacattccctggcttctgtgctctcttccccaggccaccccagcagacatgtttgccaaggcctttcgggtcaagtccaacacggccatcaaggggtcggacaggagaaagcttcgagctgatgtgacaactgctttccccacccttggaactgatcaagtctctgagttagtacctggaaaggaggagctcaacattgtgaagttgtatgctcacaaaggggatgcagtgactgtgtacgtgagtggtggtaaccccatcctctttgaactggagaaaaatctgtatccaacagtgtacacgctgtggtcctatcctgatcttctgccaacctttacaacatggcctctggtgctcgagaaactggtagggggagcagatttgatgctgcctggactggtgatgccccctgctggtctgcctcaggtacagaagggcgacctctgtgccatttctttggtggggaacagagcccctgtagccattggagttgcagccatgtccacagctgagatgctcacgtcaggcctgaagggaaggggcttctctgtgctccacacttaccaggaccacttgtggcggtctggaaacaagtcctctccaccttccattgctccactggccctggattcagcagatctcagtgaagagaaggggtctgtccagatggactccaccctgcagggagacatgaggcacatgaccctggagggggaagaggagaatggggaggttcaccaggcacgtgaagacaagtctctctcagaagccccagaagacaccagcaccaggggcctgaaccaagactccacagatagcaaaacgcttcaagaacaaatggatgagctgttacagcaatgcttcttacatgccttgaagtgccgagtcaaaaaggctgacctccctttactcaccagcactttccttggcagccacatgttctcctgctgccccgaaggacgacaactggacataaagaagtcaagctacaaaaaggaaggggagctttctggagggcagtgaggtccgaacgatcgtcattaactacgccaagaaaaatgacctggttgatgcagacaacaaaaatcttgtgagattggatcccatcctatgtgactgcatcttagagaaaaatgaacagcatacagtcatgaagcttccatgggacagtcttctgaccaggtgtttggaaaaattacagcctgcctatcaagtgacccttcccggacaagagcccattgtgaagaaagggagaatctgtccaattgacatcaccctagcacaaagagcgtctaataaaaagataacaaaactgaggctgagtttaagaaacatgcctgtggtcccctgctagtaagaagctaagtaggaactggaatcaaatccatctaaggcccatgctcttctcaattcaccatgtagccaccatgggacggcatcttttgctgaaggggccggcctgccacacccataatgatcactgaaactctgtgctgcggggctgggatgagcagctcttaaaccaaagcctgtctctggaactgaaccttgattctgttgcagaccacccaagggcaagcagctctggccatctcccacttgccggagaaattaaaacgtttttgtggacctctaaagtcgtgtgtgcctgtggcacgatgcctgctgtgcctcatggagaagtgaccatactttccagctgttcagtcccagaccaccctgaaccagagtactgcagagttaattaaggatggacggtgggtaggtgagtgagtggatcccaataccccatcccaggccaactctctcctaagctctctcagttctttcaggccaatttagagagtattcctttgcaaatgatatatgccataagggattgatatgcagaatatataaactaccacaatacaaa

SEQ ID NO: 457188 - DNA, 490 bp, Homo sapiens
gaaccatcagagaacacaggggctcagaaggctgctgaggctctggaaggccctctggagggaagggaatgcagtcaccaccgtcagtctctgtccccactgtccccccaggtgaccgtggtccggaacttggaggcctatggtctggacccatactcagtggctgccatccttcagcagcgatgccaggctagcaccaccgtcaatcctgcccctggggccaaggacagccttcaggtgcagatccagggaaaccaggtccaccacctcggctggctattgcttgaagagtatcagctccctcgaaaacacatccaaggtctagaaaaggccctcaaacctggcaagaagaagtgacagactcttttgtctcacgtggtggatccggtggaaatccaagctctgggctggtaatttttatgagcattttcagcttttgcaaatacaaaatataattctttacaaaaataaatttttattctaatctaaa

SEQ ID NO: 457189 - DNA, 1033 bp, Homo sapiens
  misc_feature (807)..(807): n is a, c, g, or t
aactagctagtacgaggctggtgtgaattcggccgaggagctgactggcaggtgctttaaccacaagctctgactccaggccctgtcccctgagctctgccctcggatgtccgaccgcccagagcctgcatgcgccgtggggcgccccaggaccaggagctggtgggtccggggccccctgggcgggggtcccggggcgcccctcctcccttgggacccgttgtcccggtcctggtctttcccccggatctagtattcagggcggaccagcggagcggaccccgacagctgctgaccctctataaccccacaggaactgcgcttcgcttccgagtcctgtgcacagcacctgccaaatacacggtgtttgacgcagagggatatgtgaagccccagtcttgcattgacattgtgattcgccatgtggcacccattcccagccactatgatgtccaggaccgcttccgcattgagctgtctgaggaaggagctgagggccgagtggtgggacgcaaggacattacctccattctgagagccccagcgtacccccttgagcttcagggacagccagatccagcgcctcgcccagggcctcctgctgggacaccaccacccacggccagacacttccaggagcacccccgccagcaactggccaccagctccttcctcctcttcttgctgacggggattgtgtctgtggccttcctgctgctcccactcccggacgaactcggcagccagctgcctcaagtcctgcacgtctccctgggacaaaagttggtggccgcctacgtcttggcntctcacatggtgtctcggactgagtcggttaaaccccaaaagacacccaacactcctggggggggtttaagaggcccgggagaaaactaactgggccaacctttttttttggaaaccttcttagaaaaccgggttgtctttccgggatacatttgtgaaaaaaaaaccccgttttgtggaaaaaaagacggtctttcccttaagatgctagtaagaaaaaaaaggt

SEQ ID NO: 457190 - DNA, 1255 bp, Homo sapiens
  misc_feature (19)..(19): n is a, c, g, or t
  misc_feature (21)..(21): n is a, c, g, or t
  misc_feature (36)..(36): n is a, c, g, or t
  misc_feature (49)..(49): n is a, c, g, or t
actaaagagctaccaacgntntggtcaacaacccanccgcggttttatntttatacaacacgcagtactatacgtctaggtacagctggtgcaatcggacgaggccggcggtcgaagacgaaggaacctggggcagagctggaagaggaaaggtcttgggggccctgggcctgggtctgcgggagccccatctagcggggttccaaggcggcggcggcatcagtcgaggccctgctccgggagctcatcttgtcccctttcgcccctcacgccccccagctctgactccaggccctgtcccctgagctctgccctcggatgtccgaccgcccagagcctgcatgcgccgtggggcgccccaggaccaggagctggtgggtccggggccccctgggcgggggtcccggggcgcccctcctcccttgggacccgttgtcccggtcctggtctttcccccggatctagtattcagggcggaccagcggagcggaccccgacagctgctgaccctctataaccccacaggaactgcgcttcgcttccgagtcctgtgcacagcacctgccaaatacacggtgtttgacgcagagggatatgtgaagccccagtcttgcattgacattgtgattcgccatgtggcacccattcccagccactatgatgtccaggaccgcttccgcattgagctgtctgaggaaggagctgagggccgagtggtgggacgcaaggacattacctccattctgagagccccagcgtacccccttgagcttcagggacagccagatccagcgcctcgcccagggcctcctgctgggacaccaccacccacggccagacacttccaggagcacccccgccagcaactggccaccagctccttcctcctcttcttgctgacggggattgtgtctgtggccttcctgctgctcccactcccggacgaactcggcagccagctgcctcaagtcctgcacgtctccctgggacaaaagttggtggccgcctacgtcttgggcctcctcaccatggtgttcctccggacctgagctccgtgctcaacccccagcccaccccaccctccctgggcagggtcttgaggcagccactgtgatgctcataccttaccttgcctcctaccctcttctctttcctgcctactccccactcctccctgacaaaaaacacccagggatttgtactcattttccaagttgaataaaatacatttttaaaatgataatcagaaatgtag

SEQ ID NO: 457191 - DNA, 1246 bp, Homo sapiens
cccggaaggggcgaggccagcggcggggcggggcttatggagatcgtgagctgggcgtgaggagaaggccgggttgggagctgcgaggggccgggtttagcggggtgggcgtggccgtcgaggtggggctcggcgggtccgaaggaacctggggcagagctggaagaggaaaggtcttgggggccctgggcctgggtctgcgggagccccatctagcggggttccaaggcggcggcggcatcagtcgaggccctgctccgggagctcatcttgtcccctttcgcccctcacgccccccagctctgactccaggccctgtcccctgagctctgccctcggatgtccgaccgcccagagcctgcatgcgccgtggggcgccccaggaccaggagctggtgggtccggggccccctgggcgggggtcccggggcgcccctcctcccttgggacccgttgtcccggtcctggtctttcccccggatctagtattcagggcggaccagcggagcggaccccgacagctgctgaccctctataaccccacaggaactgcgcttcgcttccgagtcctgtgcacagcacctgccaaatacacggtgtttgacgcagagggatatgtgaagccccagtcttgcattgacatccactatgatgtccaggaccgcttccgcattgagctgtctgaggaaggagctgagggccgagtggtgggacgcaaggacattacctccattctgagagccccagcgtacccccttgagcttcagggacagccagatccagcgcctcgcccagggcctcctgctgggacaccaccacccacggccagacacttccaggagcacccccgccagcaactggccaccagctccttcctcctcttcttgctgacggggattgtgtctgtggccttcctgctgctcccactcccggacgaactcggcagccagctgcctcaagtcctgcacgtctccctgggacaaaagttggtggccgcctacgtcttgggcctcctcaccatggtgttcctccggacctgagctccgtgctcaacccccagcccaccccaccctccctgggcagggtcttgaggcagccactgtgatgctcataccttaccttgcctcctaccctcttctctttcctgcctactccccactcctccctgacaaaaaacacccagggatttgtactcattttccaagttgaataaaatacatttttaaaatgataatcagaaatgtag

SEQ ID NO: 457192 - DNA, 1190 bp, Homo sapiens
  misc_feature (19)..(19): n is a, c, g, or t
  misc_feature (21)..(21): n is a, c, g, or t
  misc_feature (36)..(36): n is a, c, g, or t
  misc_feature (49)..(49): n is a, c, g, or t
actaaagagctaccaacgntntggtcaacaacccanccgcggttttatntttatacaacacgcagtactatacgtctaggtacagctggtgcaatcggacgaggccggcggtcgaagacgaaggaacctggggcagagctggaagaggaaaggtcttgggggccctgggcctgggtctgcgggagccccatctagcggggttccaaggcggcggcggcatcagtcgaggccctgctccgggagctcatcttgtcccctttcgcccctcacgccccccagctctgactccaggccctgtcccctgagctctgccctcggatgtccgaccgcccagagcctgcatgcgcccctcctcccttgggacccgttgtcccggtcctggtctttcccccggatctagtattcagggcggaccagcggagcggaccccgacagctgctgaccctctataaccccacaggaactgcgcttcgcttccgagtcctgtgcacagcacctgccaaatacacggtgtttgacgcagagggatatgtgaagccccagtcttgcattgacattgtgattcgccatgtggcacccattcccagccactatgatgtccaggaccgcttccgcattgagctgtctgaggaaggagctgagggccgagtggtgggacgcaaggacattacctccattctgagagccccagcgtacccccttgagcttcagggacagccagatccagcgcctcgcccagggcctcctgctgggacaccaccacccacggccagacacttccaggagcacccccgccagcaactggccaccagctccttcctcctcttcttgctgacggggattgtgtctgtggccttcctgctgctcccactcccggacgaactcggcagccagctgcctcaagtcctgcacgtctccctgggacaaaagttggtggccgcctacgtcttgggcctcctcaccatggtgttcctccggacctgagctccgtgctcaacccccagcccaccccaccctccctgggcagggtcttgaggcagccactgtgatgctcataccttaccttgcctcctaccctcttctctttcctgcctactccccactcctccctgacaaaaaacacccagggatttgtactcattttccaagttgaataaaatacatttttaaaatgataatcagaaatgtag

SEQ ID NO: 457193 - DNA, 1681 bp, Homo sapiens
cccggaaggggcgaggccagcggcggggcggggcttatggagatcgtgagctgggcgtgaggagaaggccgggttgggagctgcgaggggccgggtttagcggggtgggcgtggccgtcgaggtggggctcggcgggtccgaaggaacctggggcagagctggaagaggaaaggtcttgggggccctgggcctgggtctgcgggagccccatctagcggggttccaaggcggcggcggcatcagtcgaggccctgctccgggagctcatcttgtcccctttcgcccctcacgccccccagctctgactccaggccctgtcccctgagctctgccctcggatgtccgaccgcccagagcctgcatgcgccgtggggcgccccaggaccaggagctggtgggtccggggccccctgggcgggggtcccggggcgcccctcctcccttgggacccgttgtcccggtcctggtctttcccccggatctagtattcagggcggaccagcggagcggaccccgacagctgctgaccctctataaccccacaggaactgcgcttcgcttccgagtcctgtgcacagcacctgccaaatacacggtgtttgacgcagagggatatgtgaagccccagtcttgcattgacattgtgattcgccatgtggcacccattcccagccactatgatgtccaggaccgcttccgcattgagctgtctgaggaaggagctgagggccgagtggtgggacgcaaggacattacctccattctgagagccccagcgtacccccttgagcttcagggacagccagatccagcgcctcgcccagggcctcctgctgggacaccaccacccacggccagacacttccaggagcacccccgccagcaactggccaccagctccttcctcctcttcttgctgacggggattgtgtctgtggccttcctgctgctcccactcccggacgaactcggcagccagctgcctcaagtcctgcacgtctccctgggacaaaagttggtggccgcctacgtcttgggcctcctcaccatggtgttcctccggacctgagctccgtgctcaacccccagcccaccccaccctccctgggcagggtcttgaggcagccactgtgatgctcataccttaccttgcctcctaccctcttctctttcctgcctactccccactcctccctgacaaaaaacacccagggatttgtactcattttccaagttgaataaaatacatttttaaaatgataatcagaaatgtagaaaaaaaaaaaaaaaaaaaaaaaaaaaaaaaaaaaaaaaaaaaaaaaaaaaaaggggggggggggtaaaagattcccggggggggccccgtatacgcgcatccccgtagtttttgttgtacaaagagggggctcccgaatggggggtgctatttaaaacgcaagcgcaaggggcccgtgtgttaaaaaaaagctgtcggtcgggggcacactttgttaagtggggagcattatggggaggagaacccctatcattgcgggggggggaccatatgtggccacaactccgtaacgagagttataacgcctcaggggaaattaacaccttgcacgtcgtaatagtggttaacaccagctggatttgttcgcggaaatttggtcacggatatgtcttggaccatttcca

SEQ ID NO: 457194 - DNA, 1205 bp, Homo sapiens
cccggaaggggcgaggccagcggcggggcggggcttatggagatcgtgagctgggcgtgaggagaaggccgggttgggagctgcgaggggccgggtttagcggggtgggcgtggccgtcgaggtggggctcggcgggtccgaaggaacctggggcagagctggaagaggaaaggtcttgggggccctgggcctgggtctgcgggagccccatctagcggggttccaaggcggcggcggcatcagtcgaggccctgctccgggagctcatcttgtcccctttcgcccctcacgccccccagctctgactccaggccctgtcccctgagctctgccctcggatgtccgaccgcccagagcctgcatgcgccgtggggcgccccaggaccaggagctggtgggtccggggccccctgggcgggggtcccggggcgcccctcctcccttgggacccgttgtcccggtcctggtctttcccccggatctagtattcagggcggaccagcggagcggaccccgacagctgctgaccctctataaccccacaggaactgcgcttcgcttccgagtcctgtgcacagcacctgccaaatacacggtgtttgacgcagagggatatgtgaagccccagtcttgcattgacattgtgattcgccatgtggcacccattcccagccactatgatgtccaggaccgcttccgcattgagctgtctgaggaaggagctgagggccgagtggtgggacgcaaggacattacctccattctgagagccccagcgtacccccttgagcttcagggacagccagatccagcgcctcgcccagggcctcctgctgggacaccaccacccacggccagacacttccaggagcacccccgccagcaactggccaccagctccttcctcctcttcttgctgacggggattgtgtctgtggccttcctgctgctcccactcccggacgaactcggcagccagctgcctcaagtcctgcacgtctccctgggacaaaagttggtggccgcctacgtcttgggcagggtcttgaggcagccactgtgatgctcataccttaccttgcctcctaccctcttctctttcctgcctactccccactcctccctgacaaaaaacacccagggatttgtactcattttccaagttgaataaaatacatttttaaaatgataatcagaaatgtag

SEQ ID NO: 457195 - DNA, 1020 bp, Homo sapiens
cccggaaggggcgaggccagcggcggggcggggcttatggagatcgtgagctgggcgtgaggagaaggccgggttgggagctgcgaggggccgggtttagcggggtgggcgtggccgtcgaggtggggctcggcgggtccgaaggaacctggggcagagctggaagaggaaaggtcttgggggccctgggcctgggtctgcgggagccccatctagcggggttccaaggcggcggcggcatcagtcgaggccctgctccgggagctcatcttgtcccctttcgcccctcacgccccccagctctgactccaggccctgtcccctgagctctgccctcggatgtccgaccgcccagagcctgcatgcgccgtggggcgccccaggaccaggagctggtgggtccggggccccctgggcgggggtcccggggcgcccctcctcccttgggacccgttgtcccggtcctggtctttcccccggatctagtattcagggcggaccagcggagcggaccccgacagctgctgaccctctataaccccacaggaactgcgcttcgcttccgagtcctgtgcacagcacctgccaaatacacggtgtttgacgcagagggatatgtgaagccccagtcttgcattgacattgtgattcgccatgtggcacccattcccagccactatgatgtccaggaccgcttccgcattgagctgtctgaggaaggagctgagggccgagtggtgggacgcaaggacattacctccattctgagagccccagcgtacccccttgagcttcagggacagccagatccagcgcctcgcccagggcctcctgctgggacaccaccacccacggccagacacttccaggagcgtgagttgggagactgggatcttgagttctgtagggagggaggaactagcatttccctagagatgagataaattggatttgaagaagtctcctggttcagtcttttgtcttttggtggaaacattcctccgagttgagattttatat

SEQ ID NO: 457196 - DNA, 789 bp, Homo sapiens
cccggaaggggcgaggccagcggcggggcggggcttatggagatcgtgagctgggcgtgaggagaaggccgggttgggagctgcgaggggccgggtttagcggggtgggcgtggccgtcgaggtggggctcggcgggtccgaaggaacctggggcagagctggaagaggaaaggtcttgggggccctgggcctgggtctgcgggagccccatctagcggggttccaaggcggcggcggcatcagtcgaggccctgctccgggagctcatcttgtcccctttcgcccctcacgccccccagctctgactccaggccctgtcccctgagctctgccctcggatgtccgaccgcccagagcctgcatgcgccgtggggcgccccaggaccaggagctggtgggtccggggccccctgggcgggggtcccggggcgcccctcctcccttgggacccgttgtcccggtcctggtctttcccccggatctagtattcagggcggaccagcggagcggaccccgacagctgctgaccctctataaccccacaggaactgcgcttcgcttccgagtcctgtgcacagcacctgccaaatacacggtgtttgacgcagagggatatgtgaagccccagtcttgcattgacattgtgatgctcataccttaccttgcctcctaccctcttctctttcctgcctactccccactcctccctgacaaaaaacacccagggatttgtactcattttccaagttgaataaaatacatttttaaaatgataatcagaaatgtag

SEQ ID NO: 457197 - DNA, 1070 bp, Homo sapiens
agaggccgtacggcggaagtatagaaaaggactctctggaacatggcaacattaatctgaccacaagctgactggcaggtgctttaaccacaagctctgactccaggccctgtcccctgagctctgccctcggatgtccgaccgcccagagcctgcatgcgccgtggggcgccccaggaccaggagctggtgggtccggggccccctgggcgggggtcccggggcgcccctcctcccttgggacccgttgtcccggtcctggtctttcccccggatctagtattcagggcggaccagcggagcggaccccgacagctgctgaccctctataaccccacaggaactgcgcttcgcttccgagtcctgtgcacagcacctgccaaatacacggtgtttgacgcagagggatatgtgaagccccagtcttgcattgacattgtgattcgccatgtggcacccattcccagccactatgatgtccaggaccgcttccgcattgagctgtctgaggaaggagctgagggccgagtggtgggacgcaaggacattacctccattctgagagccccagcgtacccccttgagcttcagggacagccagatccagcgcctcgcccagggcctcctgctgggacaccaccacccacggccagacacttccaggagcacccccgccagcaactggccaccagctccttcctcctcttcttgctgacggggattgtgtctgtggccttcctgctgctcccactcccggacgaactcggcagccagctgcctcaagtcctgcacgtctccctgggacaaaagttggtggccgcctacgtcttgggcctcctcaccatggtgttcctccggacctgagctccgtgctcaacccccagcccaccccaccctccctgggcagggtcttgaggcagccactgtgatgctcataccttaccttgcctcctaccctcttctctttcctgcctactccccactcctccctgacaaaaaacacccagggatttgtactcattttccaagttgaataaaatacatttttaaaatgataatcagaaatgtag

SEQ ID NO: 457198 - DNA, 1276 bp, Homo sapiens
cccggaaggggcgaggccagcggcggggcggggcttatggagatcgtgagctgggcgtgaggagaaggccgggttgggagctgcgaggggccgggtttagcggggtgggcgtggccgtcgaggtggggctcggcgggtccgaaggaacctggggcagagctggaagaggaaaggtcttgggggccctgggcctgggtctgcgggagccccatctagcggggttccaaggcggcggcggcatcagtcgaggccctgctccgggagctcatcttgtcccctttcgcccctcacgccccccagctctgactccaggccctgtcccctgagctctgccctcggatgtccgaccgcccagagcctgcatgcgccgtggggcgccccaggaccaggagctggtgggtccggggccccctgggcgggggtcccggggcgcccctcctcccttgggacccgttgtcccggtcctggtctttcccccggatctagtattcagggcggaccagcggagcggaccccgacagctgctgaccctctataaccccacaggaactgcgcttcgcttccgagtcctgtgcacagcacctgccaaatacacggtgtttgacgcagagggatatgtgaagccccagtcttgcattgacattgtgattcgccatgtggcacccattcccagccactatgatgtccaggaccgcttccgcattgagctgtctgaggaaggagctgagggccgagtggtgggacgcaaggacattacctccattctgagagccccagcgtacccccttgagcttcagggacagccagatccagcgcctcgcccagggcctcctgctgggacaccaccacccacggccagacacttccaggagcacccccgccagcaactggccaccagctccttcctcctcttcttgctgacggggattgtgtctgtggccttcctgctgctcccactcccggacgaactcggcagccagctgcctcaagtcctgcacgtctccctgggacaaaagttggtggccgcctacgtcttgggcctcctcaccatggtgttcctccggacctgagctccgtgctcaacccccagcccaccccaccctccctgggcagggtcttgaggcagccactgtgatgctcataccttaccttgcctcctaccctcttctctttcctgcctactccccactcctccctgacaaaaaacacccagggatttgtactcattttccaagttgaataaaatacatttttaaaatgataatcagaaatgtag

SEQ ID NO: 457199 - DNA, 1032 bp, Homo sapiens
cccggaaggggcgaggccagcggcggggcggggcttatggagatcgtgagctgggcctctgactccaggccctgtcccctgagctctgccctcggatgtccgaccgcccagagcctgcatgcgccgtggggcgccccaggaccaggagctggtgggtccggggccccctgggcgggggtcccggggcgcccctcctcccttgggacccgttgtcccggtcctggtctttcccccggatctagtattcagggcggaccagcggagcggaccccgacagctgctgaccctctataaccccacaggaactgcgcttcgcttccgagtcctgtgcacagcacctgccaaatacacggtgtttgacgcagagggatatgtgaagccccagtcttgcattgacattgtgattcgccatgtggcacccattcccagccactatgatgtccaggaccgcttccgcattgagctgtctgaggaaggagctgagggccgagtggtgggacgcaaggacattacctccattctgagagccccagcgtacccccttgagcttcagggacagccagatccagcgcctcgcccagggcctcctgctgggacaccaccacccacggccagacacttccaggagcacccccgccagcaactggccaccagctccttcctcctcttcttgctgacggggattgtgtctgtggccttcctgctgctcccactcccggacgaactcggcagccagctgcctcaagtcctgcacgtctccctgggacaaaagttggtggccgcctacgtcttgggcctcctcaccatggtgttcctccggacctgagctccgtgctcaacccccagcccaccccaccctccctgggcagggtcttgaggcagccactgtgatgctcataccttaccttgcctcctaccctcttctctttcctgcctactccccactcctccctgacaaaaaacacccagggatttgtactcattttccaagttgaataaaatacatttttaaaatgataatcagaaatgtag

SEQ ID NO: 457200 - DNA, 855 bp, Homo sapiens
tgttggctggaggagtcagatgggtagggttgcacgtccagctttggtggactgggaaagtcatgtccagcctccggggcagaaggcagaggggacttaaatgacccacatggcagggcttgtctgtgtgtgtctctatcccccagtcctgtgcacagcacctgccaaatacacggtgtttgacgcagagggatatgtgaagccccagtcttgcattgacattgtgattcgccatgtggcacccattcccagccactatgatgtccaggaccgcttccgcattgagctgtctgaggaaggagctgagggccgagtggtgggacgcaaggacattacctccattctgagagccccagcgtacccccttgagcttcagggacagccagatccagcgcctcgcccagggcctcctgctgggacaccaccacccacggccagacacttccaggagcacccccgccagcaactggccaccagctccttcctcctcttcttgctgacggggattgtgtctgtggccttcctgctgctcccactcccggacgaactcggcagccagctgcctcaagtcctgcacgtctccctgggacaaaagttggtggccgcctacgtcttgggcctcctcaccatggtgttcctccggacctgagctccgtgctcaacccccagcccaccccaccctccctgggcagggtcttgaggcagccactgtgatgctcataccttaccttgcctcctaccctcttctctttcctgcctactccccactcctccctgacaaaaaacacccagggatttgtactcattttccaagttgaataaaatacatttttaaaatgataatcagaaatgtag

SEQ ID NO: 457201 - DNA, 1546 bp, Homo sapiens
cccggaaggggcgaggccagcggcggggcggggcttatggagatcgtgagctgggcgtgaggagaaggccgggttgggagctgcgaggggccgggtttagcggggtgggcgtggccgtcgaggtggggctcggcgggtccgaaggaacctggggcagagctggaagaggaaaggtcttgggggccctgggcctgggtctgcgggagccccatctagcggggttccaaggcggcggcggcatcagtcgaggccctgctccgggagctcatcttgtcccctttcgcccctcacgccccccagctctgactccaggccctgtcccctgagctctgccctcggatgtccgaccgcccagagcctgcatgcgccgtggggcgccccaggaccaggagctggtgggtccggggccccctgggcgggggtcccggggcgcccctcctcccttgggacccgttgtcccggtcctggtctttcccccggatctagtattcagggcggaccagcggagcggaccccgacagctgctgaccctctataaccccacaggaactgcgcttcgcttccgagtcctgtgcacagcacctgccaaatacacggtgtttgacgcagagggatatgtgaagccccagtcttgcattgacattgtgattcgccatgtggcacccattcccagccactatgatgtccaggaccgcttccgcattgagctgtctgaggaaggagctgagggccgagtggtgggacgcaaggacattacctccattctgagagccccagcgtacccccttgagcttcagggacagccagatccagcgcctcgcccagggcctcctgctgggacaccaccacccacggccagacacttccaggagcacccccgccagcaactggccaccagctccttcctcctcttcttgctgacggggattgtgtctgtggccttcctgctgctcccactcccggacgaactcggcagccagctgcctcaagtcctgcacgtctccctgggacaaaagttggtggccgcctacgtcttgggcctcctcaccatggtgttcctccggacctgagctccgtgctcaacccccagcccaccccaccctccctgggcagggtcttgaggcagccactgtgatgctcataccttaccttgcctcctaccctcttctctttcctgcctactccccactcctccctgacaaaaaacacccagggatttgtactcattttccaagttgaataaaatacatttttaaaatgataatcagaaatgtagagtaaagaattgaaaagcaaatctcactaatgatacacagatagataaagcaagtctatcaacattaaaaatactaaaaaataaagacacacacagagcattttagtgacatccactacttattgccgctatgagttagagtctatcagtgttcttgttataaccccctattttcagggggttaaaaatcagctttaaaaaaatacataaaaattttcatcttaaagcactttcattttataccaacgtggaaaagtggcctttttagga

SEQ ID NO: 457202 - DNA, 1205 bp, Homo sapiens
cccggaaggggcgaggccagcggcggggcggggcttatggagatcgtgagctgggcgtgaggagaaggccgggttgggagctgcgaggggccgggtttagcggggtgggcgtggccgtcgaggtggggctcggcgggtccgaaggaacctggggcagagctggaagaggaaaggtcttgggggccctgggcctgggtctgcgggagccccatctagcggggttccaaggcggcggcggcatcagtcgaggccctgctccgggagctcatcttgtcccctttcgcccctcacgccccccagctctgactccaggccctgtcccctgagctctgccctcggatgtccgaccgcccagagcctgcatgcgccgtggggcgccccaggaccaggagctggtgggtccggggccccctgggcgggggtcccggggcgcccctcctcccttgggacccgttgtcccggtcctggtctttcccccggatctagtattcagggcggaccagcggagcggaccccgacagctgctgaccctctataaccccacaggaactgcgcttcgcttccgagtcctgtgcacagcacctgccaaatacacggtgtttgacgcagagggatatgtgaagccccagtcttgcattgacattgtgattcgccatgtggcacccattcccagccactatgatgtccaggaccgcttccgcattgagctgtctgaggaaggagctgagggccgagtggtgggacgcaaggacattacctccattctgagagccccagcgtacccccttgagcttcagggacaacccccgccagcaactggccaccagctccttcctcctcttcttgctgacggggattgtgtctgtggccttcctgctgctcccactcccggacgaactcggcagccagctgcctcaagtcctgcacgtctccctgggacaaaagttggtggccgcctacgtcttgggcctcctcaccatggtgttcctccggacctgagctccgtgctcaacccccagcccaccccaccctccctgggcagggtcttgaggcagccactgtgatgctcataccttaccttgcctcctaccctcttctctttcctgcctactccccactcctccctgacaaaaaacacccagggatttgtactcattttccaagttgaataaaatacatttttaaaatgataatcagaaatgtag

SEQ ID NO: 457203 - DNA, 388 bp, Homo sapiens
tggggggaggcccagatttccttggattactgcctcattcaccccaatgggcttctctcctaccttgggaccagtgtgattcgccatgtggcacccattcccagccactatgatgtccaggaccgcttccgcattgagctgtctgaggaaggagctgagggccgagtggtgggacgcaaggacattacctccattctgagagccccagcgtacccccttgagcttcagggacagccagatccagcgcctcgcccagggcctcctgctgggacaccaccacccacggccagacacttccaggagcgtgagttgggagactgggatcttgagttctgtagggagggaggaactagcatttccctagagatgagataaattggatttgaag

SEQ ID NO: 457204 - DNA, 631 bp, Homo sapiens
tgctcctatcttggttctctaaaagtcgattctcaacaaagaagccatgatgacccttgtaaaatagatcattgccggtagagagcctgcttgccctgctctctacctcctgtttaaattgaaacctgtacactttaagctttttgctcatcgcttggttttgctcttttatgccttaaattatctttgcggcatttttgactcatctgctggggaagaccattccctcaagaaaacttccaacagcaactcaaagcaaactaagatgaaaaaatggggggaaagaatctgtccactgggaacgctttacgtcaccgtgttgctctggaagacagagactgctctgggcacctggcgaggcggctctgcagtgcaggctggggccggtccctgcggcctgctgggctctggcctcgtttggcccatcactcatgctgccgtctcaagcacaagggttgctgtggtgggttttccctctgtttcctgcttcctcactgtcctacccacctgtttcctacagggcagatggcctggcccgtaacactttcctgaaggcatgcgtgagtgaatagaactgttctaatgagtgtatgtttgaacgctttataaatttttaaatacatttctctaa

SEQ ID NO: 457205 - DNA, 615 bp, Homo sapiens
tgttcagggctcagagttggagtcaagtcgccactgtgtttcaggtttctggcagtcggattcatttgcctcacaatactttcctgttgttttttgcagcaaaccaaagagagagtgaagctattgatacagctggctgatggcttttgtgaaaaagggcatgcccatgcggcagagataaaaaaatgtgttactgctgtggataagaggtacagagatttctctctgcggatggagaagtacaggacctctttggaaaaagccctggggatttcttcagattccaacaaatcgagtaaaagtctccagctagatatcattccagccagtatccctggctcagaggtgaaacttcgagatgctgctcatgaacttaatgaagagaagcggaaatctgcccgcaggaaagagtaagccagtctttcagaatctaccaggattcactggaaaagtgaagagaatgtcatttggacagacatgcttctgtgtgtgctttgaagtcacatggcacccaggctttttgttgctctgggtggacttagttgtgtcagcacagacttcgctgcgttcactgtcctcttatcacctggttcagaaacagcatctagtttttat

SEQ ID NO: 457206 - DNA, 834 bp, Homo sapiens
catagatatgaaggaaaatgaagtaaggacaaggagaaaaaagagattgagaaaggcaatgaaaaaagggattattgaagagttgacaaaaaaagaataagggtatatgagaagtagcgaaaaaatagtaatcaacaatcggaagtagattaaggataaatagaatgaaaagggtgattacgaacgaaggagcaatgagtatgtatgggtatgaggagtaagggatataggaagatggtgtgataggaaatgtaagaagagagaagatggacggaggtggaaaaaaacgaaagtgatagaagaaatggaggaagagaatggtgaaaagagtcattatgggattagatgaaagtggagtgatgagaaaacagtcactgtcatttatcttttaacacgcagctcatcctatccataggagccctttcaaggcaggttgcttagctgtccttagccatcaccctcgtagtcttcagcgtcttccttgttgtttggtttgacagcgtattagtccattctcatgcgctgtaaagacatacgttagagtgcagtgatgtgtactccaaatacacgtttgtagaagtcaaattagcaacacattgctctccattgttttttaggcttgcacccttgctcggaggaatgcagacgtcttcctgaaatacctgcacaggaacagcgtgaacatgccaggaatggtgacgcacatcaaagctcctgaacagcaagtgaaaagtgagtagagctgggagtctccaggggtggcccatgccaacagtagcctagaataaaagaaaaaagaaactataaaataaccaaacaaaaaaaacaaacaaa

SEQ ID NO: 457207 - DNA, 10571 bp, Homo sapiens
cgcggccgcgggcgccgccgcagccatgagcggcagcagcggcggagccgccgcccccgccgcgtcctccggccccgccgcggcggccagcgcggctggctcgggctgcgggggcggtgccggcgagggggcagaggaggcggccaaggacctggccgacatcgcggccttcttccgatccgggtttcgaaaaaacgatgaaatgaaagctatggatgttttaccaattttgaaggaaaaagttgcatacctttcaggtgggagagataaacgtggaggtcccattttaacgtttccggcccgcagcaatcatgacagaatacgacaggaggatctcaggagactcatttcctatctagcctgtattcccagcgaggaggtctgcaagcgtggcttcacggtgatcgtggacatgcgtgggtccaagtgggactccatcaagccccttctgaagatcctgcaggagtccttcccctgctgcatccatgtggccctgatcatcaagccagacaacttctggcagaaacagaggactaattttggcagttctaaatttgaatttgagacaaatatggtctctttagaaggccttaccaaagtagttgatccttctcagctaactcctgagtttgatggctgcctggaatacaaccacgaagaatggattgaaatcagagttgcttttgaagactacattagcaatgccacccacatgctgtctcggctggaggaacttcaggacatcctagctaagaaggagctgcctcaggatttagagggggctcggaatatgatcgaggaacattctcagctgaagaagaaggtgattaaggcccccatcgaggacctggatttggagggacagaagctgcttcagaggatacagagcagtgaaagctttcccaaaaagaactcaggctcaggcaatgcggacctgcagaacctcttgcccaaggtgtccaccatgctggaccggctgcactcgacacggcagcatctgcaccagatgtggcatgtgaggaagctgaagctggaccagtgcttccagctgaggctgtttgaacaggatgctgagaagatgtttgactggatcacacacaacaaaggcctgtttctaaacagctacacagagattgggaccagccaccctcatgccatggagcttcagacgcagcacaatcactttgccatgaactgtatgaacgtgtatgtaaatataaaccgcatcatgtcggtggccaatcgtctggtggagtctggccactatgcctcgcagcagatcaggcagatcgcgagtcagctggagcaggagtggaaggcgtttgcggcagccctggatgagcggagcaccttgctggacatgtcctccattttccaccagaaggccgaaaagtatatgagcaacgtggattcatggtgtaaagcttgcggtgaggtagaccttccctcagagctgcaggacctagaagatgccattcatcaccaccagggaatatatgaacatatcactcttgcttattctgaggtcagccaagatgggaagtcgctccttgacaagctccagcggcccttgactcccggcagctccgattccctgacagcctctgccaactactccaaggccgtgcaccatgtcctggatgtcatccacgaggtgctgcaccaccagcggcagcgtgagaacatctggcaacaccgcaaggtccggctgcatcagaggctgcagctgtgtgttttccagcaggacgttcagcaggtgctagactggatcgagaaccacggagaagcatttctgagcaaacatacaggtgtggggaaatctcttcatcgggccagagcattgcagaaacgtcatgaagattttgaagaagtggcacagaacacatacaccaatgcggataaattactggaagcagcagaacagctggctcagactggggaatgtgaccccgaagagatttatcaggctgcccatcagctggaagaccggattcaagatttcgttcggcgtgttgagcagcgaaagatcctactggacatgtcagtgtcctttcacacccatgtgaaagagctgtggacgtggctggaggagctgcagaaggagctgctggacgacgtgtatgccgagtcggtggaggccgtgcaggacctcatcaagcgctttggccagcagcagcagaccaccctgcaggtgactgtcaacgtgatcaaggaaggggaggacctcatccagcagctcagggactctgccatctccagtaacaagaccccccacaacagctccatcaaccacattgagacggtgctgcagcagctggacgaggcgcagtcgcagatggaggagctcttccaggagcgcaagatcaagctggagctcttcctgcacgtgcgcatcttcgagagggacgccatcgacattatctcagacctcgagtcttggaatgatgagctttctcagcaaatgaatgacttcgacacagaagatctcacgattgcagagcagcgcctccagcaccatgcagacaaagccttgaccatgaacaacttgacttttgacgtcatccaccaagggcaagatcttctgcagtatgtcaatgaggtccaggcctctggtgtggagctgctgtgtgatagagatgtagacatggcaactcgggtccaggacctgctggagtttcttcatgaaaaacagcaggaattggatttagccgcagagcagcatcggaaacacctggagcagtgcgtgcagctgcgccacctgcaggcagaagtgaaacaggtgctgggttggatccgcaacggagagtccatgttaaatgccggacttatcacagccagctcgttacaagaggcagagcagctccagcgagagcacgagcagttccagcatgccattgagaaaacacatcagagcgcgctgcaggtgcagcagaaggcagaagccatgctacaggccaaccactacgacatggacatgatccgggactgcgccgagaaggtggcgtctcactggcaacagctcatgctcaagatggaagatcgcctcaagctcgtcaacgcctctgtcgctttctacaaaacctcagagcaggtctgcagcgtcctcgagagcctggaacaggagtacaagagagaagaagactggtgtggcggggcggataagctgggcccaaactctgagacggaccacgtgacgcccatgatcagcaagcacctggagcagaaggaggcattcctgaaggcttgcacccttgctcggaggaatgcagacgtcttcctgaaatacctgcacaggaacagcgtgaacatgccaggaatggtgacgcacatcaaagctcctgaacagcaagtgaaaaatatcttgaatgaactcttccaacgggagaacagggtattgcattactggaccatgaggaagagacggctggaccagtgtcagcagtacgtggtctttgagaggagtgccaagcaggctttggaatggatccatgacaatggcgagttctacctttccacacacacctccacgggctccagtatacagcacacccaggagctcctgaaagagcacgaggagttccagataactgcaaagcaaaccaaagagagagtgaagctattgatacagctggctgatggcttttgtgaaaaagggcatgcccatgcggcagagataaaaaaatgtgttactgctgtggataagaggtacagagatttctctctgcggatggagaagtacaggacctctttggaaaaagccctggggatttcttcagattccaacaaatcgagtaaaagtctccagctagatatcattccagccagtatccctggctcagaggtgaaacttcgagatgctgctcatgaacttaatgaagagaagcggaaatctgcccgcaggaaagagttcataatggctgagctcattcaaactgaaaaggcttatgtaagagacctccgggaatgtatggatacgtacctgtgggaaatgaccagtggcgtggaagagattccacctggcattgtaaacaaagaactcatcatcttcggaaacatgcaagaaatctacgaatttcataataacatattcctaaaggagctggaaaaatatgaacagttgccagaggatgttggacattgttttgttacttgggcagacaagtttcagatgtatgtcacatattgcaaaaataagcctgattctactcagctgatattggaacatgcagggtcctattttgacgagatacagcagcgacatggattagccaattccatttcttcctaccttattaaaccagttcagcgaataacgaagtatcagctccttttaaaagagctgctgacgtgctgtgaggaaggaaagggagagattaaagatggcctggaggtgatgctcagcgtgccgaagcgagccaatgatgccatgcacctcagcatgctggaagggtttgatgaaaacattgagtctcagggagaactcatcctacaggaatccttccaagtgtgggacccaaaaaccttaattcgaaagggtcgagaacggcatctcttcctttttgaaatgtccttagtatttagtaaagaagtgaaagattccagtgggagaagcaagtacctttataaaagcaaattgtttacctcagagttgggtgtcacagaacatgttgaaggagacccttgcaaatttgcactgtgggtggggagaacaccaacttcagataataaaattgtccttaaggcttccagcatagagaacaagcaggactggataaagcatatccgcgaagtcatccaggagcggacgatccacctgaagggagccctgaaggagcccattcacatccctaagaccgctcccgccacaagacagaagggaaggagggatggagaggatctggacagccaaggagacggcagcagccagcctgatacgatttccatcgcctcacggacgtctcagaacacgctggacagcgataagctctctggtggctgtgagctgacagtggtgatccatgacttcaccgcttgcaacagcaacgagctgaccatccgacggggccagaccgtggaagttctggagcggccgcatgacaagcctgactggtgtctggtgcggaccactgaccgctccccagcggcagaaggcctggtcccctgtggttcactgtgcatcgcccactccagaagtagcatggaaatggagggcatcttcaaccacaaagactcgctctccgtctccagcaatgacgccagtccacccgcatccgtggcttccctccagccccacatgatcggggcccagagctcgccgggccccaagcggccgggcaacaccctgcgcaagtggctcaccagccccgtgcggcggctcagcagcggcaaggccgacgggcacgtgaagaagctggcgcacaagcacaagaagagccgcgaggtccgcaagagcgccgacgccggctcgcagaaggactccgacgacagtgcggccaccccgcaggacgagacggtcgaggagagaggccggaacgagggcctgagcagcggtactctctccaaatcctcctcctcggggatgcagagctgtggagaagaggaaggcgaggagggggccgacgccgtgcccctgccgccacccatggccatccagcagcacagcctcctccagccagactcacaggatgacaaggcctcttctcggttattagtccgccccaccagctccgaaacaccgagtgcagccgagctcgtcagtgcaattgaggaactcgtgaaaagcaagatggcactggaggatcgccccagctcactccttgttgaccagggagatagtagcagcccttccttcaacccttcggataattcccttctctcttcctcctcgcccattgatgagatggaagaaaggaaatccagctctttaaagagaagacactacgttttgcaagaactagtggagacagagcgtgactatgtgcgggaccttggctatgtggttgagggctacatggcacttatgaaagaagatggtgttcctgatgacatgaaaggaaaagacaaaattgtgttcggcaacatccatcagatttacgactggcacagagacttttttttaggagagttagagaagtgccttgaagatccagaaaaactaggatccctttttgttaaacacgagagaaggttgcacatgtacatagcttattgtcaaaataaaccaaagtctgagcacattgtctcagaatacattgataccttttttgaggacttaaagcagcgtcttggccacaggttacagctcacagatctgttgatcaaaccagtgcagagaatcatgaagtatcagctgttactgaaggacttcctcaagtattccaaaaaggccagcctggatacatcagaattagagagagctgtggaagtcatgtgcatagtacccaggcggtgcaacgacatgatgaacgtggggcggctgcaaggattcgacgggaaaatcgttgcccagggtaaactgctcttgcaggacacattcttggtcacagaccaagatgcaggacttctgcctcgctgcagagagaggcgcatcttcctctttgagcagatcgtcatattcagcgaaccacttgataaaaagaagggcttctccatgccgggattcctgtttaagaacagtatcaaggtgagttgcctttgcctggaggaaaatgtggaaaatgatccctgtaaatttgctctgacatcgaggacgggtgacgtggtagagaccttcattttgcattcatctagtccaagtgtccggcaaacttggatccatgaaatcaaccaaattttagaaaaccagcgcaattttttaaatgccttgacatcgccaatcgagtaccagaggaaccacagcgggggcggcggcggcggcggcagcgggggcagcggcgggggtgggggcagcggcggcggcggggcccccagtggcggcagcggccacagtggcggccccagcagctgcggcggcgcccccagcacgagcaggagccggccctcccggatcccccagcctgtccgacaccacccccccgtgctggtctcctctgcagcctcgagccaggcagaggcagacaagatgtcagagtgaaagcagcagcagtagcaacatctccaccatgttggtgacacacgattacacggcagtgaaggaggatgagatcaacgtctaccaaggagaggtcgttcaaattctggccagcaaccagcagaacatgtttctggtgttccgagccgccactgaccagtgccccgcagctgagggctggattccaggctttgtcctgggccacaccagtgcagtcatcgtggagaacccggacgggactctcaagaagtcaacatcttggcacacagcactccgtttaaggaaaaaatctgagaaaaaagataaagacggcaaaagggaaggcaagttagagaacggttatcggaagtcacgggaaggactcagcaacaaggtatctgtgaagcttctcaatcccaactacatttatgacgttcccccagaattcgtcattccattgagtgaggtcacgtgtgagacaggggagaccgttgttcttagatgtcgagtctgtggccgccccaaagcctcaattacctggaagggccctgaacacaacaccttgaacaacgatggtcactacagcatctcctacagtgacctgggagaggccacgctgaagattgtgggcgtgaccacggaagatgacggcatctacacgtgcatcgctgtcaatgacatgggttcagcctcatcgtcggccagcctgagggtcctaggtccagggatggatgggatcatggtgacctggaaagacaactttgactccttctacagtgaagtggctgagcttggcaggggcagattctctgtcgttaagaaatgtgatcagaaaggaaccaagcgagcagtggccactaagtttgtgaacaagaagttgatgaagcgcgaccaggtcacccatgagcttggcatcctgcagagcctccagcaccccctgcttgtcggcctcctcgacacctttgagacccccaccagctacatcctggtcttagaaatggctgaccagggtcgcctcctggactgcgtggtgcgatggggaagcctcactgaagggaagatcagggcgcacctgggggaggttctggaagctgtccggtacctgcacaactgcaggatagcacacctggacctaaagcctgagaatatcctggtggatgagagtttagccaagccaaccatcaaactggctgactttggagatgctgttcagctcaacacgacctactacatccaccagttactggggaaccctgaattcgcagcccctgaaatcatcctcgggaaccctgtctccctgacctcggatacgtggagtgttggagtgctcacatacgtacttcttagtggcgtgtcccccttcctggatgacagtgtggaagagacctgcctgaacatttgccgcttagactttagcttcccagatgactactttaaaggagtgagccagaaggccaaggagttcgtgtgcttcctcctgcaggaggaccccgccaagcgtccctcggctgcgctggccctccaggagcagtggctgcaggccggcaacggcagaagcacgggcgtcctcgacacgtccagactgacttccttcattgagcggcgcaaacaccagaatgatgttcgacctatccgtagcattaaaaactttctgcagagcaggcttctgcctagagtttgacctatccagaagttctttctcattctctttcacctgccaatcagctgttaatctgaattttcaagagaaaacaagcaaacataactgatcagctgccggtatgttcatcgtgtgaaattgcattccaagtgagctgtgctcagcagtgcttggacacagagctgcaagctgcgctggggtggaggaccgtcacttacactctgcccaaggcagaggtcgcattgctgtatcacagtattttattcaggtttctgcaaaaaaataaaaagataacttttttaaacaaacatgaatagaattttgcaaatttaacgttttcaagatttattcaaggaaacaaaatgcctatgttcaaccactggtgttaatgaacaaagatactgtgcgtctctggggaagacgcacctaggtggcggccactcccatggccttgtctagggctcagagaccactcggctctgagcttccaggcgcctcgtctgtgtgcatctcacgcccgacgtggcttctgaaacgtgcattcaacctcaaacttttgcataaaatagaatgaatcgttttgctctgatgaaatgtaggccttacttgtatataagactgttcctgccttcggtctgtcattttcccacctgcctcccctacccaccccccacccaccacctggggcttcctctgggggtccgagggtcttcccatcacatgaagacatcaggttgggtcctgccccactgcccctccccctgttcctgccccaagccgtcaatcagattgtggagcagtacacagtcagatgaaaatactgtaaatgcactcattgggggttttttggttttacttcatatcatgtgcaatgttgtggctttaacattttatgcaactatttatgaagacctctgttgtacctgtaataaatatatagaaaaagcacatacttcgtatggtgagctttatggttttgtgtgtgtgttggggttggcgggtgggtgggtagggtcgtagccctgtgccatcggttcaaagagacttttcgtgaaatttgttggttttgaggactgtaaaagtgatttcatactctgaatataaaactggataatagggtaatgttttaaaatttattatgctattattcagaatgccaaagtattattttttttcccaaaatcagtctggacatttactactttttagactttttgacgttgaactttctgtataaaaattggctgggttttgagcttttggtaagaaataaaagccgattaagcactggccgccccgcggctggtacccaatgcccgagtcactgtggcagcattcgcactggtgtggggagtcctttcaactcaaggaggctgggtttctgggcaccctcgaagttttctggatgtctttttatctttctcgtgtgaactgcactacaaaagagaccagcccgcttcccaagccagccagacacctgggtcttgagccataaactggcgtagttaagctttgcagcttccagtgtattttatttattcttttgttgggtttttgtttgtttcttcttgtaaaattgtacagaaactttttaaaagaaattggattcgaaactggatgtgtattcgtaacctcataatttttatttgtgtattgtttcttttattatttcagttaaatttttacattattttgcatgtatatttctttgtacagagaccttacatgtttacacagtatgatgtgatgtaaatattttattttgccatcagttattttaaaaaattaaacatatttgcctga

SEQ ID NO: 457208 - DNA, 10442 bp, Homo sapiens
cgcggccgcgggcgccgccgcagccatgagcggcagcagcggcggagccgccgcccccgccgcgtcctccggccccgccgcggcggccagcgcggctggctcgggctgcgggggcggtgccggcgagggggcagaggaggcggccaaggacctggccgacatcgcggccttcttccgatccgggtttcgaaaaaacgatgaaatgaaagctatggatgttttaccaattttgaaggaaaaagttgcatacctttcaggtgggagagataaacgtggaggtcccattttaacgtttccggcccgcagcaatcatgacagaatacgacaggaggatctcaggagactcatttcctatctagcctgtattcccagcgaggaggtctgcaagcgtggcttcacggtgatcgtggacatgcgtgggtccaagtgggactccatcaagccccttctgaagatcctgcaggagtccttcccctgctgcatccatgtggccctgatcatcaagccagacaacttctggcagaaacagaggactaattttggcagttctaaatttgaatttgagacaaatatggtctctttagaaggccttaccaaagtagttgatccttctcagctaactcctgagtttgatggctgcctggaatacaaccacgaagaatggattgaaatcagagttgcttttgaagactacattagcaatgccacccacatgctgtctcggctggaggaacttcaggacatcctagctaagaaggagctgcctcaggatttagagggggctcggaatatgatcgaggaacattctcagctgaagaagaaggtgattaaggcccccatcgaggacctggatttggagggacagaagctgcttcagaggatacagagcagtgaaagctttcccaaaaagaactcaggctcaggcaatgcggacctgcagaacctcttgcccaaggtgtccaccatgctggaccggctgcactcgacacggcagcatctgcaccagatgtggcatgtgaggaagctgaagctggaccagtgcttccagctgaggctgtttgaacaggatgctgagaagatgtttgactggatcacacacaacaaaggcctgtttctaaacagctacacagagattgggaccagccaccctcatgccatggagcttcagacgcagcacaatcactttgccatgaactgtatgaacgtgtatgtaaatataaaccgcatcatgtcggtggccaatcgtctggtggagtctggccactatgcctcgcagcagatcaggcagatcgcgagtcagctggagcaggagtggaaggcgtttgcggcagccctggatgagcggagcaccttgctggacatgtcctccattttccaccagaaggccgaaaagtatatgagcaacgtggattcatggtgtaaagcttgcggtgaggtagaccttccctcagagctgcaggacctagaagatgccattcatcaccaccagggaatatatgaacatatcactcttgcttattctgaggtcagccaagatgggaagtcgctccttgacaagctccagcggcccttgactcccggcagctccgattccctgacagcctctgccaactactccaaggccgtgcaccatgtcctggatgtcatccacgaggtgctgcaccaccagcggcagcgtgagaacatctggcaacaccgcaaggtccggctgcatcagaggctgcagctgtgtgttttccagcaggacgttcagcaggtgctagactggatcgagaaccacggagaagcatttctgagcaaacatacaggtgtggggaaatctcttcatcgggccagagcattgcagaaacgtcatgaagattttgaagaagtggcacagaacacatacaccaatgcggataaattactggaagcagcagaacagctggctcagactggggaatgtgaccccgaagagatttatcaggctgcccatcagctggaagaccggattcaagatttcgttcggcgtgttgagcagcgaaagatcctactggacatgtcagtgtcctttcacacccatgtgaaagagctgtggacgtggctggaggagctgcagaaggagctgctggacgacgtgtatgccgagtcggtggaggccgtgcaggacctcatcaagcgctttggccagcagcagcagaccaccctgcaggtgactgtcaacgtgatcaaggaaggggaggacctcatccagcagctcagggactctgccatctccagtaacaagaccccccacaacagctccatcaaccacattgagacggtgctgcagcagctggacgaggcgcagtcgcagatggaggagctcttccaggagcgcaagatcaagctggagctcttcctgcacgtgcgcatcttcgagagggacgccatcgacattatctcagacctcgagtcttggaatgatgagctttctcagcaaatgaatgacttcgacacagaagatctcacgattgcagagcagcgcctccagcaccatgcagacaaagccttgaccatgaacaacttgacttttgacgtcatccaccaagggcaagatcttctgcagtatgtcaatgaggtccaggcctctggtgtggagctgctgtgtgatagagatgtagacatggcaactcgggtccaggacctgctggagtttcttcatgaaaaacagcaggaattggatttagccgcagagcagcatcggaaacacctggagcagtgcgtgcagctgcgccacctgcaggcagaagtgaaacaggtgctgggttggatccgcaacggagagtccatgttaaatgccggacttatcacagccagctcgttacaagaggcagagcagctccagcgagagcacgagcagttccagcatgccattgagaaaacacatcagagcgcgctgcaggtgcagcagaaggcagaagccatgctacaggccaaccactacgacatggacatgatccgggactgcgccgagaaggtggcgtctcactggcaacagctcatgctcaagatggaagatcgcctcaagctcgtcaacgcctctgtcgctttctacaaaacctcagagcaggtctgcagcgtcctcgagagcctggaacaggagtacaagagagaagaagactggtgtggcggggcggataagctgggcccaaactctgagacggaccacgtgacgcccatgatcagcaagcacctggagcagaaggaggcattcctgaaggcttgcacccttgctcggaggaatgcagacgtcttcctgaaatacctgcacaggaacagcgtgaacatgccaggaatggtgacgcacatcaaagctcctgaacagcaagtgaaaaatatcttgaatgaactcttccaacgggagaacagggtattgcattactggaccatgaggaagagacggctggaccagtgtcagcagtacgtggtctttgagaggagtgccaagcaggctttggaatggatccatgacaatggcgagttctacctttccacacacacctccacgggctccagtatacagcacacccaggagctcctgaaagagcacgaggagttccagataactgcaaagcaaaccaaagagagagtgaagctattgatacagctggctgatggcttttgtgaaaaagggcatgcccatgcggcagagataaaaaaatgtgttactgctgtggataagaggtacagagatttctctctgcggatggagaagtacaggacctctttggaaaaagccctggggatttcttcagattccaacaaatcgagtaaaagtctccagctagatatcattccagccagtatccctggctcagaggtgaaacttcgagatgctgctcatgaacttaatgaagagaagcggaaatctgcccgcaggaaagagttcataatggctgagctcattcaaactgaaaaggcttatgtaagagacctccgggaatgtatggatacgtacctgtgggaaatgaccagtggcgtggaagagattccacctggcattgtaaacaaagaactcatcatcttcggaaacatgcaagaaatctacgaatttcataataacatattcctaaaggagctggaaaaatatgaacagttgccagaggatgttggacattgttttgttacttgggcagacaagtttcagatgtatgtcacatattgcaaaaataagcctgattctactcagctgatattggaacatgcagggtcctattttgacgagatacagcagcgacatggattagccaattccatttcttcctaccttattaaaccagttcagcgaataacgaagtatcagctccttttaaaagagctgctgacgtgctgtgaggaaggaaagggagagattaaagatggcctggaggtgatgctcagcgtgccgaagcgagccaatgatgccatgcacctcagcatgctggaagggtttgatgaaaacattgagtctcagggagaactcatcctacaggaatccttccaagtgtgggacccaaaaaccttaattcgaaagggtcgagaacggcatctcttcctttttgaaatgtccttagtatttagtaaagaagtgaaagattccagtgggagaagcaagtacctttataaaagcaaattgtttacctcagagttgggtgtcacagaacatgttgaaggagacccttgcaaatttgcactgtgggtggggagaacaccaacttcagataataaaattgtccttaaggcttccagcatagagaacaagcaggactggataaagcatatccgcgaagtcatccaggagcggacgatccacctgaagggagccctgaaggagcccattcacatccctaagaccgctcccgccacaagacagaagggaaggagggatggagaggatctggacagccaaggagacggcagcagccagcctgatacgatttccatcgcctcacggacgtctcagaacacgctggacagcgataagctctctggtggctgtgagctgacagtggtgatccatgacttcaccgcttgcaacagcaacgagctgaccatccgacggggccagaccgtggaagttctggagcggccgcatgacaagcctgactggtgtctggtgcggaccactgaccgctccccagcggcagaaggcctggtcccctgtggttcactgtgcatcgcccactccagaagtagcatggaaatggagggcatcttcaaccacaaagactcgctctccgtctccagcaatgacgccagtccacccgcatccgtggcttccctccagccccacatgatcggggcccagagctcgccgggccccaagcggccgggcaacaccctgcgcaagtggctcaccagccccgtgcggcggctcagcagcggcaaggccgacgggcacgtgaagaagctggcgcacaagcacaagaagagccgcgaggtccgcaagagcgccgacgccggctcgcagaaggactccgacgacagtgcggccaccccgcaggacgagacggtcgaggagagaggccggaacgagggcctgagcagcggtactctctccaaatcctcctcctcggggatgcagagctgtggagaagaggaaggcgaggagggggccgacgccgtgcccctgccgccacccatggccatccagcagcacagcctcctccagccagactcacaggatgacaaggcctcttctcggttattagtccgccccaccagctccgaaacaccgagtgcagccgagctcgtcagtgcaattgaggaactcgtgaaaagcaagatggcactggaggatcgccccagctcactccttgttgaccagggagatagtagcagcccttccttcaacccttcggataattcccttctctcttcctcctcgcccattgatgagatggaagaaaggaaatccagctctttaaagagaagacactacgttttgcaagaactagtggagacagagcgtgactatgtgcgggaccttggctatgtggttgagggctacatggcacttatgaaagaagatggtgttcctgatgacatgaaaggaaaagacaaaattgtgttcggcaacatccatcagatttacgactggcacagagacttttttttaggagagttagagaagtgccttgaagatccagaaaaactaggatccctttttgttaaacacgagagaaggttgcacatgtacatagcttattgtcaaaataaaccaaagtctgagcacattgtctcagaatacattgataccttttttgaggacttaaagcagcgtcttggccacaggttacagctcacagatctgttgatcaaaccagtgcagagaatcatgaagtatcagctgttactgaaggacttcctcaagtattccaaaaaggccagcctggatacatcagaattagagagagctgtggaagtcatgtgcatagtacccaggcggtgcaacgacatgatgaacgtggggcggctgcaaggattcgacgggaaaatcgttgcccagggtaaactgctcttgcaggacacattcttggtcacagaccaagatgcaggacttctgcctcgctgcagagagaggcgcatcttcctctttgagcagatcgtcatattcagcgaaccacttgataaaaagaagggcttctccatgccgggattcctgtttaagaacagtatcaaggtgagttgcctttgcctggaggaaaatgtggaaaatgatccctgtaaatttgctctgacatcgaggacgggtgacgtggtagagaccttcattttgcattcatctagtccaagtgtccggcaaacttggatccatgaaatcaaccaaattttagaaaaccagcgcaattttttaaatgccttgacatcgccaatcgagtaccagaggaaccacagcgggggcggcggcggcggcggcagcgggggcagcggcgggggtgggggcagcggcggcggcggggcccccagtggcggcagcggccacagtggcggccccagcagctgcggcggcgcccccagcacgagcaggagccggccctcccggatcccccagcctgtccgacaccacccccccgtgctggtctcctctgcagcctcgagccaggcagaggcagacaagatgtcagagtgaaagcagcagcagtagcaacatctccaccatgttggtgacacacgattacacggcagtgaaggaggatgagatcaacgtctaccaaggagaggtcgttcaaattctggccagcaaccagcagaacatgtttctggtgttccgagccgccactgaccagtgccccgcagctgagggctggattccaggctttgtcctgggccacaccagtgcagtcatcgtggagaacccggacgggactctcaagaagtcaacatcttggcacacagcactccgtttaaggaaaaaatctgagaaaaaagataaagacggcaaaagggaaggcaagttagagaacggttatcggaagtcacgggaaggactcagcaacaaggtatctgtgaagcttctcaatcccaactacatttatgacgttcccccagaattcgtcattccattgagtgaggtcacgtgtgagacaggggagaccgttgttcttagatgtcgagtctgtggccgccccaaagcctcaattacctggaagggccctgaacacaacaccttgaacaacgatggtcactacagcatctcctacagtgacctgggagaggccacgctgaagattgtgggcgtgaccacggaagatgacggcatctacacgtgcatcgctgtcaatgacatgggttcagcctcatcgtcggccagcctgagggtcctaggtccagggatggatgggatcatggtgacctggaaagacaactttgactccttctacagtgaagtggctgagcttggcaggggcagattctctgtcgttaagaaatgtgatcagaaaggaaccaagcgagcagtggccactaagtttgtgaacaagaagttgatgaagcgcgaccaggtcacccatgagcttggcatcctgcagagcctccagcaccccctgcttgtcggcctcctcgacacctttgagacccccaccagctacatcctggtcttagaaatggctgaccagggtcgcctcctggactgcgtggtgcgatggggaagcctcactgaagggaagatcagggcgcacctgggggaggttctggaagctgtccggtacctgcacaactgcaggatagcacacctggacctaaagcctgagaatatcctggtggatgagagtttagccaagccaaccatcaaactggctgactttggagatgctgttcagctcaacacgacctactacatccaccagttactggggaaccctgaattcgcagcccctgaaatcatcctcgggaaccctgtctccctgacctcggatacgtggagtgttggagtgctcacatacgtacttcttagtggcgtgtcccccttcctggatgacagtgtggaagagacctgcctgaacatttgccgcttagactttagcttcccagatgactactttaaaggagtgagccagaaggccaaggagttcgtgtgcttcctcctgcaggaggaccccgccaagcgtccctcggctgcgctggccctccaggagcagtggctgcaggccggcaacggcagaagcacgggcgtcctcgacacgtccagactgacttccttcattgagcggcgcaaacaccagaatgatgttcgacctatccgtagcattaaaaactttctgcagagcaggcttctgcctagagtttgacctatccagaagttctttctcattctctttcacctgccaatcagctgttaatctgaattttcaagagaaaacaagcaaacataactgatcagctgccggtatgttcatcgtgtgaaattgcattccaagtgagctgtgctcagcagtgcttggacacagagctgcaagctgcgctggggtggaggaccgtcacttacactctgcccaaggcagaggtcgcattgctgtatcacagtattttattcaggtttctgcaaaaaaataaaaagataacttttttaaacaaacatgaatagaattttgcaaatttaacgttttcaagatttattcaaggaaacaaaatgcctatgttcaaccactggtgttaatgaacaaagatactgtgcgtctctggggaagacgcacctaggtggcggccactcccatggccttgtctagggctcagagaccactcggctctgagcttccaggcgcctcgtctgtgtgcatctcacgcccgacgtggcttctgaaacgtgcattcaacctcaaacttttgcataaaatagaatgaatcgttttgctctgatgaaatgtaggccttacttgtatataagactgttcctgccttcggtctgtcattttcccacctgcctcccctacccaccccccacccaccacctggggcttcctctgggggtccgagggtcttcccatcacatgaagacatcaggttgggtcctgccccactgcccctccccctgttcctgccccaagccgtcaatcagattgtggagcagtacacagtcagatgaaaatactgtaaatgcactcattgggggttttttggttttacttcatatcatgtgcaatgttgtggctttaacattttatgcaactatttatgaagacctctgttgtacctgtaataaatatatagaaaaagcacatacttcgtatggtgagctttatggttttgtgtgtgtgttggggttggcgggtgggtgggtagggtcgtagccctgtgccatcggttcaaagagacttttcgtgaaatttgttggttttgaggactgtaaaagtgatttcatactctgaatataaaactggataatagggtaatgttttaaaatttattatgctattattcagaatgccaaagtattattttttttcccaaaatcagtctggacatttactactttttagactttttgacgttgaactttctgtataaaaattggctgggttttgagcttttggtaagaaataaaagccgattaagcactggccgccccgcggctggtacccaatgcccgagtcactgtggcagcattcgcactggtgtggggagtcctttcaactcaaggaggctgggtttctgggcaccctcgaagttttctggatgtctttttatctttctcgtgtgaactgcactacaaaagagaccagcccgcttcccaagccagccagacacctgggtcttgagccataaactggcgtagttaagctttgcagcttccagtgtattttatttattcttttgttgggtttttgtttgtttcttcttgtaaaattgtacagaaactttttaaaagaaattggattcgaaactggatgtgtattcgtaacctcataataaatttagggttgatggaatcctctggacagcat

SEQ ID NO: 457209 - DNA, 12399 bp, Homo sapiens
cgcggccgcgggcgccgccgcagccatgagcggcagcagcggcggagccgccgcccccgccgcgtcctccggccccgccgcggcggccagcgcggctggctcgggctgcgggggcggtgccggcgagggggcagaggaggcggccaaggacctggccgacatcgcggccttcttccgatccgggtttcgaaaaaacgatgaaatgaaagctatggatgttttaccaattttgaaggaaaaagttgcatacctttcaggtgggagagataaacgtggaggtcccattttaacgtttccggcccgcagcaatcatgacagaatacgacaggaggatctcaggagactcatttcctatctagcctgtattcccagcgaggaggtctgcaagcgtggcttcacggtgatcgtggacatgcgtgggtccaagtgggactccatcaagccccttctgaagatcctgcaggagtccttcccctgctgcatccatgtggccctgatcatcaagccagacaacttctggcagaaacagaggactaattttggcagttctaaatttgaatttgagacaaatatggtctctttagaaggccttaccaaagtagttgatccttctcagctaactcctgagtttgatggctgcctggaatacaaccacgaagaatggattgaaatcagagttgcttttgaagactacattagcaatgccacccacatgctgtctcggctggaggaacttcaggacatcctagctaagaaggagctgcctcaggatttagagggggctcggaatatgatcgaggaacattctcagctgaagaagaaggtgattaaggcccccatcgaggacctggatttggagggacagaagctgcttcagaggatacagagcagtgaaagctttcccaaaaagaactcaggctcaggcaatgcggacctgcagaacctcttgcccaaggtgtccaccatgctggaccggctgcactcgacacggcagcatctgcaccagatgtggcatgtgaggaagctgaagctggaccagtgcttccagctgaggctgtttgaacaggatgctgagaagatgtttgactggatcacacacaacaaaggcctgtttctaaacagctacacagagattgggaccagccaccctcatgccatggagcttcagacgcagcacaatcactttgccatgaactgtatgaacgtgtatgtaaatataaaccgcatcatgtcggtggccaatcgtctggtggagtctggccactatgcctcgcagcagatcaggcagatcgcgagtcagctggagcaggagtggaaggcgtttgcggcagccctggatgagcggagcaccttgctggacatgtcctccattttccaccagaaggccgaaaagtatatgagcaacgtggattcatggtgtaaagcttgcggtgaggtagaccttccctcagagctgcaggacctagaagatgccattcatcaccaccagggaatatatgaacatatcactcttgcttattctgaggtcagccaagatgggaagtcgctccttgacaagctccagcggcccttgactcccggcagctccgattccctgacagcctctgccaactactccaaggccgtgcaccatgtcctggatgtcatccacgaggtgctgcaccaccagcggcagcgtgagaacatctggcaacaccgcaaggtccggctgcatcagaggctgcagctgtgtgttttccagcaggacgttcagcaggtgctagactggatcgagaaccacggagaagcatttctgagcaaacatacaggtgtggggaaatctcttcatcgggccagagcattgcagaaacgtcatgaagattttgaagaagtggcacagaacacatacaccaatgcggataaattactggaagcagcagaacagctggctcagactggggaatgtgaccccgaagagatttatcaggctgcccatcagctggaagaccggattcaagatttcgttcggcgtgttgagcagcgaaagatcctactggacatgtcagtgtcctttcacacccatgtgaaagagctgtggacgtggctggaggagctgcagaaggagctgctggacgacgtgtatgccgagtcggtggaggccgtgcaggacctcatcaagcgctttggccagcagcagcagaccaccctgcaggtgactgtcaacgtgatcaaggaaggggaggacctcatccagcagctcagggactctgccatctccagtaacaagaccccccacaacagctccatcaaccacattgagacggtgctgcagcagctggacgaggcgcagtcgcagatggaggagctcttccaggagcgcaagatcaagctggagctcttcctgcacgtgcgcatcttcgagagggacgccatcgacattatctcagacctcgagtcttggaatgatgagctttctcagcaaatgaatgacttcgacacagaagatctcacgattgcagagcagcgcctccagcaccatgcagacaaagccttgaccatgaacaacttgacttttgacgtcatccaccaagggcaagatcttctgcagtatgtcaatgaggtccaggcctctggtgtggagctgctgtgtgatagagatgtagacatggcaactcgggtccaggacctgctggagtttcttcatgaaaaacagcaggaattggatttagccgcagagcagcatcggaaacacctggagcagtgcgtgcagctgcgccacctgcaggcagaagtgaaacaggtgctgggttggatccgcaacggagagtccatgttaaatgccggacttatcacagccagctcgttacaagaggcagagcagctccagcgagagcacgagcagttccagcatgccattgagaaaacacatcagagcgcgctgcaggtgcagcagaaggcagaagccatgctacaggccaaccactacgacatggacatgatccgggactgcgccgagaaggtggcgtctcactggcaacagctcatgctcaagatggaagatcgcctcaagctcgtcaacgcctctgtcgctttctacaaaacctcagagcaggtctgcagcgtcctcgagagcctggaacaggagtacaagagagaagaagactggtgtggcggggcggataagctgggcccaaactctgagacggaccacgtgacgcccatgatcagcaagcacctggagcagaaggaggcattcctgaaggcttgcacccttgctcggaggaatgcagacgtcttcctgaaatacctgcacaggaacagcgtgaacatgccaggaatggtgacgcacatcaaagctcctgaacagcaagtgaaaaatatcttgaatgaactcttccaacgggagaacagggtattgcattactggaccatgaggaagagacggctggaccagtgtcagcagtacgtggtctttgagaggagtgccaagcaggctttggaatggatccatgacaatggcgagttctacctttccacacacacctccacgggctccagtatacagcacacccaggagctcctgaaagagcacgaggagttccagataactgcaaagcaaaccaaagagagagtgaagctattgatacagctggctgatggcttttgtgaaaaagggcatgcccatgcggcagagataaaaaaatgtgttactgctgtggataagaggtacagagatttctctctgcggatggagaagtacaggacctctttggaaaaagccctggggatttcttcagattccaacaaatcgagtaaaagtctccagctagatatcattccagccagtatccctggctcagaggtgaaacttcgagatgctgctcatgaacttaatgaagagaagcggaaatctgcccgcaggaaagagttcataatggctgagctcattcaaactgaaaaggcttatgtaagagacctccgggaatgtatggatacgtacctgtgggaaatgaccagtggcgtggaagagattccacctggcattgtaaacaaagaactcatcatcttcggaaacatgcaagaaatctacgaatttcataataacatattcctaaaggagctggaaaaatatgaacagttgccagaggatgttggacattgttttgttacttgggcagacaagtttcagatgtatgtcacatattgcaaaaataagcctgattctactcagctgatattggaacatgcagggtcctattttgacgagatacagcagcgacatggattagccaattccatttcttcctaccttattaaaccagttcagcgaataacgaagtatcagctccttttaaaagagctgctgacgtgctgtgaggaaggaaagggagagattaaagatggcctggaggtgatgctcagcgtgccgaagcgagccaatgatgccatgcacctcagcatgctggaagggtttgatgaaaacattgagtctcagggagaactcatcctacaggaatccttccaagtgtgggacccaaaaaccttaattcgaaagggtcgagaacggcatctcttcctttttgaaatgtccttagtatttagtaaagaagtgaaagattccagtgggagaagcaagtacctttataaaagcaaattgtttacctcagagttgggtgtcacagaacatgttgaaggagacccttgcaaatttgcactgtgggtggggagaacaccaacttcagataataaaattgtccttaaggcttccagcatagagaacaagcaggactggataaagcatatccgcgaagtcatccaggagcggacgatccacctgaagggagccctgaaggagcccattcacatccctaagaccgctcccgccacaagacagaagggaaggagggatggagaggatctggacagccaaggagacggcagcagccagcctgatacgatttccatcgcctcacggacgtctcagaacacgctggacagcgataagctctctggtggctgtgagctgacagtggtgatccatgacttcaccgcttgcaacagcaacgagctgaccatccgacggggccagaccgtggaagttctggagcggccgcatgacaagcctgactggtgtctggtgcggaccactgaccgctccccagcggcagaaggcctggtcccctgtggttcactgtgcatcgcccactccagaagtagcatggaaatggagggcatcttcaaccacaaagactcgctctccgtctccagcaatgacgccagtccacccgcatccgtggcttccctccagccccacatgatcggggcccagagctcgccgggccccaagcggccgggcaacaccctgcgcaagtggctcaccagccccgtgcggcggctcagcagcggcaaggccgacgggcacgtgaagaagctggcgcacaagcacaagaagagccgcgaggtccgcaagagcgccgacgccggctcgcagaaggactccgacgacagtgcggccaccccgcaggacgagacggtcgaggagagaggccggaacgagggcctgagcagcggtactctctccaaatcctcctcctcggggatgcagagctgtggagaagaggaaggcgaggagggggccgacgccgtgcccctgccgccacccatggccatccagcagcacagcctcctccagccagactcacaggatgacaaggcctcttctcggttattagtccgccccaccagctccgaaacaccgagtgcagccgagctcgtcagtgcaattgaggaactcgtgaaaagcaagatggcactggaggatcgccccagctcactccttgttgaccagggagatagtagcagcccttccttcaacccttcggataattcccttctctcttcctcctcgcccattgatgagatggaagaaaggaaatccagctctttaaagagaagacactacgttttgcaagaactagtggagacagagcgtgactatgtgcgggaccttggctatgtggttgagggctacatggcacttatgaaagaagatggtgttcctgatgacatgaaaggaaaagacaaaattgtgttcggcaacatccatcagatttacgactggcacagagacttttttttaggagagttagagaagtgccttgaagatccagaaaaactaggatccctttttgttaaacacgagagaaggttgcacatgtacatagcttattgtcaaaataaaccaaagtctgagcacattgtctcagaatacattgataccttttttgaggacttaaagcagcgtcttggccacaggttacagctcacagatctgttgatcaaaccagtgcagagaatcatgaagtatcagctgttactgaaggacttcctcaagtattccaaaaaggccagcctggatacatcagaattagagagagctgtggaagtcatgtgcatagtacccaggcggtgcaacgacatgatgaacgtggggcggctgcaaggattcgacgtaatgcggctcttgttttttaagagagctcctctgccttcatctctttcttttgtcttggattatttctctccacatagagaaagctgatccttttcacttggttttctggcttctctcactttacctcaatctgattgatattttatttcctttttttttttttttttttttttggtgcgtttggtttgcttttttgggacttgcctgtgctcaaagcccagtgtctcatggcagaaacaagcaggaccgggctttgtctcttgggcccagtactgtaagagctgagtttcctttcctcagcacttaagaccatggttagctatggatgtagtaggacctcggaggtccccactctctcatctctgggacttgatacttcctcattagtttaagatatgtttgcatgagttgctagactattcatattacatattagctattacatatcctcaagatgaattcagaaccagaatcttcttttaaaaatttgactacggagttaaggaggcaggagaagtttttattttcttgcctactgttttgctagagaattagcattgaaagttctggtgctatggttctctctgacgcacacacagaggccgttggagggcttctgaaaactcctgtgcatgcctgatgagttcctgctggcgacccagggaccacactttgagaaccactgttctagtataaaccagacatttaaaactccacttttaatctgtgactgtaattgaggcgccagaggtctatacaaatgttggcaagaattttatttagataattattctgtttagagccaagaacagtaaaagaaaaaaaaaattaaactccataaattaataaaagaaaaatacattattccataggaggaaatctaaagaaaacagcttcagataacttagaaggcaatgttttcttctccccttccttttccccctttatttcttgttttaggggaaaatcgttgcccagggtaaactgctcttgcaggacacattcttggtcacagaccaagatgcaggacttctgcctcgctgcagagagaggcgcatcttcctctttgagcagatcgtcatattcagcgaaccacttgataaaaagaagggcttctccatgccgggattcctgtttaagaacagtatcaaggtgagttgcctttgcctggaggaaaatgtggaaaatgatccctgtaaatttgctctgacatcgaggacgggtgacgtggtagagaccttcattttgcattcatctagtccaagtgtccggcaaacttggatccatgaaatcaaccaaattttagaaaaccagcgcaattttttaaatgccttgacatcgccaatcgagtaccagaggaaccacagcgggggcggcggcggcggcggcagcgggggcagcggcgggggtgggggcagcggcggcggcggggcccccagtggcggcagcggccacagtggcggccccagcagctgcggcggcgcccccagcacgagcaggagccggccctcccggatcccccagcctgtccgacaccacccccccgtgctggtctcctctgcagcctcgagccaggcagaggcagacaagatgtcaggtacgtccacccccgggccctccctgcctccccctggcgcggcccccgaggccggccccagcgcgcccagcaggcggccccccggcgcggacgccgaggggtccgagcgagaagcggagccgatccccaagatgaaggtgctggagagccccaggaaaggcgccgcgaacgcctcggggtcgagcccagacgcccccgccaaggacgcgcgcgctagcctgggcaccctgccgcttgggaagccccgggccggggccgcttcgccgctgaactcgccgctctccagcgcggtcccttctctcggcaaggagcccttcccccccagcagccccctgcagaaggggggctccttctggagctccatccccgcctcccccgccagccgacccggctccttcaccttcccgggggacagcgactccctccagcggcagacaccccgccacgcggcccctggcaaggatactgaccgcatgagcacgtgctcctcggccagcgagcagtccgtgcagtccacccagagcaacgggagtgaaagcagcagcagtagcaacatctccaccatgttggtgacacacgattacacggcagtgaaggaggatgagatcaacgtctaccaaggagaggtcgttcaaattctggccagcaaccagcagaacatgtttctggtgttccgagccgccactgaccagtgccccgcagctgagggctggattccaggctttgtcctgggccacaccagtgcagtcatcgtggagaacccggacgggactctcaagaagtcaacatcttggcacacagcactccgtttaaggaaaaaatctgagaaaaaagataaagacggcaaaagggaaggcaagttagagaacggttatcggaagtcacgggaaggactcagcaacaaggtatctgtgaagcttctcaatcccaactacatttatgacgttcccccagaattcgtcattccattgagtgaggtcacgtgtgagacaggggagaccgttgttcttagatgtcgagtctgtggccgccccaaagcctcaattacctggaagggccctgaacacaacaccttgaacaacgatggtcactacagcatctcctacagtgacctgggagaggccacgctgaagattgtgggcgtgaccacggaagatgacggcatctacacgtgcatcgctgtcaatgacatgggttcagcctcatcgtcggccagcctgagggtcctaggtccagggatggatgggatcatggtgacctggaaagacaactttgactccttctacagtgaagtggctgagcttggcaggggcagattctctgtcgttaagaaatgtgatcagaaaggaaccaagcgagcagtggccactaagtttgtgaacaagaagttgatgaagcgcgaccaggtcacccatgagcttggcatcctgcagagcctccagcaccccctgcttgtcggcctcctcgacacctttgagacccccaccagctacatcctggtcttagaaatggctgaccagggtcgcctcctggactgcgtggtgcgatggggaagcctcactgaagggaagatcagggcgcacctgggggaggttctggaagctgtccggtacctgcacaactgcaggatagcacacctggacctaaagcctgagaatatcctggtggatgagagtttagccaagccaaccatcaaactggctgactttggagatgctgttcagctcaacacgacctactacatccaccagttactggggaaccctgaattcgcagcccctgaaatcatcctcgggaaccctgtctccctgacctcggatacgtggagtgttggagtgctcacatacgtacttcttagtggcgtgtcccccttcctggatgacagtgtggaagagacctgcctgaacatttgccgcttagactttagcttcccagatgactactttaaaggagtgagccagaaggccaaggagttcgtgtgcttcctcctgcaggaggaccccgccaagcgtccctcggctgcgctggccctccaggagcagtggctgcaggccggcaacggcagaagcacgggcgtcctcgacacgtccagactgacttccttcattgagcggcgcaaacaccagaatgatgttcgacctatccgtagcattaaaaactttctgcagagcaggcttctgcctagagtttgacctatccagaagttctttctcattctctttcacctgccaatcagctgttaatctgaattttcaagagaaaacaagcaaacataactgatcagctgccggtatgttcatcgtgtgaaattgcattccaagtgagctgtgctcagcagtgcttggacacagagctgcaagctgcgctggggtggaggaccgtcacttacactctgcccaaggcagaggtcgcattgctgtatcacagtattttattcaggtttctgcaaaaaaataaaaagataacttttttaaacaaacatgaatagaattttgcaaatttaacgttttcaagatttattcaaggaaacaaaatgcctatgttcaaccactggtgttaatgaacaaagatactgtgcgtctctggggaagacgcacctaggtggcggccactcccatggccttgtctagggctcagagaccactcggctctgagcttccaggcgcctcgtctgtgtgcatctcacgcccgacgtggcttctgaaacgtgcattcaacctcaaacttttgcataaaatagaatgaatcgttttgctctgatgaaatgtaggccttacttgtatataagactgttcctgccttcggtctgtcattttcccacctgcctcccctacccaccccccacccaccacctggggcttcctctgggggtccgagggtcttcccatcacatgaagacatcaggttgggtcctgccccactgcccctccccctgttcctgccccaagccgtcaatcagattgtggagcagtacacagtcagatgaaaatactgtaaatgcactcattgggggttttttggttttacttcatatcatgtgcaatgttgtggctttaacattttatgcaactatttatgaagacctctgttgtacctgtaataaatatatagaaaaagcacatacttcgtatggtgagctttatggttttgtgtgtgtgttggggttggcgggtgggtgggtagggtcgtagccctgtgccatcggttcaaagagacttttcgtgaaatttgttggttttgaggactgtaaaagtgatttcatactctgaatataaaactggataatagggtaatgttttaaaatttattatgctattattcagaatgccaaagtattattttttttcccaaaatcagtctggacatttactactttttagactttttgacgttgaactttctgtataaaaattggctgggttttgagcttttggtaagaaataaaagccgattaagcactggccgccccgcggctggtacccaatgcccgagtcactgtggcagcattcgcactggtgtggggagtcctttcaactcaaggaggctgggtttctgggcaccctcgaagttttctggatgtctttttatctttctcgtgtgaactgcactacaaaagagaccagcccgcttcccaagccagccagacacctgggtcttgagccataaactggcgtagttaagctttgcagcttccagtgtattttatttattcttttgttgggtttttgtttgtttcttcttgtaaaattgtacagaaactttttaaaagaaattggattcgaaactggatgtgtattcgtaacctcataatttttatttgtgtattgtttcttttattatttcagttaaatttttacattattttgcatgtatatttctttgtacagagaccttacatgtttacacagtatgatgtgatgtaaatattttattttgccatcagttattttaaaaaattaaacatatttgcctgaaaaaaaaaaaaaaaaaaaaaaaaaaaaaaaaaaaaaaaaaaaaaaaaaaaaaaaaaaaaaaaaaaaagggggggggggctccttaagaaattctcatccccggggggggccgcccagtatttttgcgtcgtgccggcgctgtttttttttgatgaaacggagggtgcccccattatttgggcggcttttttttaaagacgaggagaccggcgcgggtgttttttcaaccgcctcgcttgtcggcgggggcaacatcgtgttgtgtggagcttttttggtggaggaccacccctcttctggggggggcgccaattgtgcgggaccgagttcctcgg

SEQ ID NO: 457210 - DNA, 10809 bp, Homo sapiens
tgcaatactacttcctattctgtaccttaccccagaaccaaagttctatacgatacttcaacattacctaactcctccctcacctggaatattaactctgctatgcttattaaccagagatatatcaaaaaagaagcagatgtaatggacctaaaaagcaaataagaacttcccagggagcttgtaagtattgcacagcgctctgagcaaacatacaggtgtggggaaatctcttcatcgggccagagcattgcagaaacgtcatgaagattttgaagaagtggcacagaacacatacaccaatgcggataaattactggaagcagcagaacagctggctcagactggggaatgtgaccccgaagagatttatcaggctgcccatcagctggaagaccggattcaagatttcgttcggcgtgttgagcagcgaaagatcctactggacatgtcagtgtcctttcacacccatgtgaaagagctgtggacgtggctggaggagctgcagaaggagctgctggacgacgtgtatgccgagtcggtggaggccgtgcaggacctcatcaagcgctttggccagcagcagcagaccaccctgcaggtgactgtcaacgtgatcaaggaaggggaggacctcatccagcagctcagggactctgccatctccagtaacaagaccccccacaacagctccatcaaccacattgagacggtgctgcagcagctggacgaggcgcagtcgcagatggaggagctcttccaggagcgcaagatcaagctggagctcttcctgcacgtgcgcatcttcgagagggacgccatcgacattatctcagacctcgagtcttggaatgatgagctttctcagcaaatgaatgacttcgacacagaagatctcacgattgcagagcagcgcctccagcaccatgcagacaaagccttgaccatgaacaacttgacttttgacgtcatccaccaagggcaagatcttctgcagtatgtcaatgaggtccaggcctctggtgtggagctgctgtgtgatagagatgtagacatggcaactcgggtccaggacctgctggagtttcttcatgaaaaacagcaggaattggatttagccgcagagcagcatcggaaacacctggagcagtgcgtgcagctgcgccacctgcaggcagaagtgaaacaggtgctgggttggatccgcaacggagagtccatgttaaatgccggacttatcacagccagctcgttacaagaggcagagcagctccagcgagagcacgagcagttccagcatgccattgagaaaacacatcagagcgcgctgcaggtgcagcagaaggcagaagccatgctacaggccaaccactacgacatggacatgatccgggactgcgccgagaaggtggcgtctcactggcaacagctcatgctcaagatggaagatcgcctcaagctcgtcaacgcctctgtcgctttctacaaaacctcagagcaggtctgcagcgtcctcgagagcctggaacaggagtacaagagagaagaagactggtgtggcggggcggataagctgggcccaaactctgagacggaccacgtgacgcccatgatcagcaagcacctggagcagaaggaggcattcctgaaggcttgcacccttgctcggaggaatgcagacgtcttcctgaaatacctgcacaggaacagcgtgaacatgccaggaatggtgacgcacatcaaagctcctgaacagcaagtgaaaaatatcttgaatgaactcttccaacgggagaacagggtattgcattactggaccatgaggaagagacggctggaccagtgtcagcagtacgtggtctttgagaggagtgccaagcaggctttggaatggatccatgacaatggcgagttctacctttccacacacacctccacgggctccagtatacagcacacccaggagctcctgaaagagcacgaggagttccagataactgcaaagcaaaccaaagagagagtgaagctattgatacagctggctgatggcttttgtgaaaaagggcatgcccatgcggcagagataaaaaaatgtgttactgctgtggataagaggtacagagatttctctctgcggatggagaagtacaggacctctttggaaaaagccctggggatttcttcagattccaacaaatcgagtaaaagtctccagctagatatcattccagccagtatccctggctcagaggtgaaacttcgagatgctgctcatgaacttaatgaagagaagcggaaatctgcccgcaggaaagagttcataatggctgagctcattcaaactgaaaaggcttatgtaagagacctccgggaatgtatggatacgtacctgtgggaaatgaccagtggcgtggaagagattccacctggcattgtaaacaaagaactcatcatcttcggaaacatgcaagaaatctacgaatttcataataacatattcctaaaggagctggaaaaatatgaacagttgccagaggatgttggacattgttttgttacttgggcagacaagtttcagatgtatgtcacatattgcaaaaataagcctgattctactcagctgatattggaacatgcagggtcctattttgacgagatacagcagcgacatggattagccaattccatttcttcctaccttattaaaccagttcagcgaataacgaagtatcagctccttttaaaagagctgctgacgtgctgtgaggaaggaaagggagagattaaagatggcctggaggtgatgctcagcgtgccgaagcgagccaatgatgccatgcacctcagcatgctggaagggtttgatgaaaacattgagtctcagggagaactcatcctacaggaatccttccaagtgtgggacccaaaaaccttaattcgaaagggtcgagaacggcatctcttcctttttgaaatgtccttagtatttagtaaagaagtgaaagattccagtgggagaagcaagtacctttataaaagcaaattgtttacctcagagttgggtgtcacagaacatgttgaaggagacccttgcaaatttgcactgtgggtggggagaacaccaacttcagataataaaattgtccttaaggcttccagcatagagaacaagcaggactggataaagcatatccgcgaagtcatccaggagcggacgatccacctgaagggagccctgaaggagcccattcacatccctaagaccgctcccgccacaagacagaagggaaggagggatggagaggatctggacagccaaggagacggcagcagccagcctgatacgatttccatcgcctcacggacgtctcagaacacgctggacagcgataagctctctggtggctgtgagctgacagtggtgatccatgacttcaccgcttgcaacagcaacgagctgaccatccgacggggccagaccgtggaagttctggagcggccgcatgacaagcctgactggtgtctggtgcggaccactgaccgctccccagcggcagaaggcctggtcccctgtggttcactgtgcatcgcccactccagaagtagcatggaaatggagggcatcttcaaccacaaagactcgctctccgtctccagcaatgacgccagtccacccgcatccgtggcttccctccagccccacatgatcggggcccagagctcgccgggccccaagcggccgggcaacaccctgcgcaagtggctcaccagccccgtgcggcggctcagcagcggcaaggccgacgggcacgtgaagaagctggcgcacaagcacaagaagagccgcgaggtccgcaagagcgccgacgccggctcgcagaaggactccgacgacagtgcggccaccccgcaggacgagacggtcgaggagagaggccggaacgagggcctgagcagcggtactctctccaaatcctcctcctcggggatgcagagctgtggagaagaggaaggcgaggagggggccgacgccgtgcccctgccgccacccatggccatccagcagcacagcctcctccagccagactcacaggatgacaaggcctcttctcggttattagtccgccccaccagctccgaaacaccgagtgcagccgagctcgtcagtgcaattgaggaactcgtgaaaagcaagatggcactggaggatcgccccagctcactccttgttgaccagggagatagtagcagcccttccttcaacccttcggataattcccttctctcttcctcctcgcccattgatgagatggaagaaaggaaatccagctctttaaagagaagacactacgttttgcaagaactagtggagacagagcgtgactatgtgcgggaccttggctatgtggttgagggctacatggcacttatgaaagaagatggtgttcctgatgacatgaaaggaaaagacaaaattgtgttcggcaacatccatcagatttacgactggcacagagacttttttttaggagagttagagaagtgccttgaagatccagaaaaactaggatccctttttgttaaacacgagagaaggttgcacatgtacatagcttattgtcaaaataaaccaaagtctgagcacattgtctcagaatacattgataccttttttgaggacttaaagcagcgtcttggccacaggttacagctcacagatctgttgatcaaaccagtgcagagaatcatgaagtatcagctgttactgaaggacttcctcaagtattccaaaaaggccagcctggatacatcagaattagagagagctgtggaagtcatgtgcatagtacccaggcggtgcaacgacatgatgaacgtggggcggctgcaaggattcgacgtaatgcggctcttgttttttaagagagctcctctgccttcatctctttcttttgtcttggattatttctctccacatagagaaagctgatccttttcacttggttttctggcttctctcactttacctcaatctgattgatattttatttcctttttttttttttttttttttttggtgcgtttggtttgcttttttgggacttgcctgtgctcaaagcccagtgtctcatggcagaaacaagcaggaccgggctttgtctcttgggcccagtactgtaagagctgagtttcctttcctcagcacttaagaccatggttagctatggatgtagtaggacctcggaggtccccactctctcatctctgggacttgatacttcctcattagtttaagatatgtttgcatgagttgctagactattcatattacatattagctattacatatcctcaagatgaattcagaaccagaatcttcttttaaaaatttgactacggagttaaggaggcaggagaagtttttattttcttgcctactgttttgctagagaattagcattgaaagttctggtgctatggttctctctgacgcacacacagaggccgttggagggcttctgaaaactcctgtgcatgcctgatgagttcctgctggcgacccagggaccacactttgagaaccactgttctagtataaaccagacatttaaaactccacttttaatctgtgactgtaattgaggcgccagaggtctatacaaatgttggcaagaattttatttagataattattctgtttagagccaagaacagtaaaagaaaaaaaaaattaaactccataaattaataaaagaaaaatacattattccataggaggaaatctaaagaaaacagcttcagataacttagaaggcaatgttttcttctccccttccttttccccctttatttcttgttttaggggaaaatcgttgcccagggtaaactgctcttgcaggacacattcttggtcacagaccaagatgcaggacttctgcctcgctgcagagagaggcgcatcttcctctttgagcagatcgtcatattcagcgaaccacttgataaaaagaagggcttctccatgccgggattcctgtttaagaacagtatcaaggtgagttgcctttgcctggaggaaaatgtggaaaatgatccctgtaaatttgctctgacatcgaggacgggtgacgtggtagagaccttcattttgcattcatctagtccaagtgtccggcaaacttggatccatgaaatcaaccaaattttagaaaaccagcgcaattttttaaatgccttgacatcgccaatcgagtaccagaggaaccacagcgggggcggcggcggcggcggcagcgggggcagcggcgggggtgggggcagcggcggcggcggggcccccagtggcggcagcggccacagtggcggccccagcagctgcggcggcgcccccagcacgagcaggagccggccctcccggatcccccagcctgtccgacaccacccccccgtgctggtctcctctgcagcctcgagccaggcagaggcagacaagatgtcaggtacgtccacccccgggccctccctgcctccccctggcgcggcccccgaggccggccccagcgcgcccagcaggcggccccccggcgcggacgccgaggggtccgagcgagaagcggagccgatccccaagatgaaggtgctggagagccccaggaaaggcgccgcgaacgcctcggggtcgagcccagacgcccccgccaaggacgcgcgcgctagcctgggcaccctgccgcttgggaagccccgggccggggccgcttcgccgctgaactcgccgctctccagcgcggtcccttctctcggcaaggagcccttcccccccagcagccccctgcagaaggggggctccttctggagctccatccccgcctcccccgccagccgacccggctccttcaccttcccgggggacagcgactccctccagcggcagacaccccgccacgcggcccctggcaaggatactgaccgcatgagcacgtgctcctcggccagcgagcagtccgtgcagtccacccagagcaacgggagtgaaagcagcagcagtagcaacatctccaccatgttggtgacacacgattacacggcagtgaaggaggatgagatcaacgtctaccaaggagaggtcgttcaaattctggccagcaaccagcagaacatgtttctggtgttccgagccgccactgaccagtgccccgcagctgagggctggattccaggctttgtcctgggccacaccagtgcagtcatcgtggagaacccggacgggactctcaagaagtcaacatcttggcacacagcactccgtttaaggaaaaaatctgagaaaaaagataaagacggcaaaagggaaggcaagttagagaacggttatcggaagtcacgggaaggactcagcaacaaggtatctgtgaagcttctcaatcccaactacatttatgacgttcccccagaattcgtcattccattgagtgaggtcacgtgtgagacaggggagaccgttgttcttagatgtcgagtctgtggccgccccaaagcctcaattacctggaagggccctgaacacaacaccttgaacaacgatggtcactacagcatctcctacagtgacctgggagaggccacgctgaagattgtgggcgtgaccacggaagatgacggcatctacacgtgcatcgctgtcaatgacatgggttcagcctcatcgtcggccagcctgagggtcctaggtccagggatggatgggatcatggtgacctggaaagacaactttgactccttctacagtgaagtggctgagcttggcaggggcagattctctgtcgttaagaaatgtgatcagaaaggaaccaagcgagcagtggccactaagtttgtgaacaagaagttgatgaagcgcgaccaggtcacccatgagcttggcatcctgcagagcctccagcaccccctgcttgtcggcctcctcgacacctttgagacccccaccagctacatcctggtcttagaaatggctgaccagggtcgcctcctggactgcgtggtgcgatggggaagcctcactgaagggaagatcagggcgcacctgggggaggttctggaagctgtccggtacctgcacaactgcaggatagcacacctggacctaaagcctgagaatatcctggtggatgagagtttagccaagccaaccatcaaactggctgactttggagatgctgttcagctcaacacgacctactacatccaccagttactggggaaccctgaattcgcagcccctgaaatcatcctcgggaaccctgtctccctgacctcggatacgtggagtgttggagtgctcacatacgtacttcttagtggcgtgtcccccttcctggatgacagtgtggaagagacctgcctgaacatttgccgcttagactttagcttcccagatgactactttaaaggagtgagccagaaggccaaggagttcgtgtgcttcctcctgcaggaggaccccgccaagcgtccctcggctgcgctggccctccaggagcagtggctgcaggccggcaacggcagaagcacgggcgtcctcgacacgtccagactgacttccttcattgagcggcgcaaacaccagaatgatgttcgacctatccgtagcattaaaaactttctgcagagcaggcttctgcctagagtttgacctatccagaagttctttctcattctctttcacctgccaatcagctgttaatctgaattttcaagagaaaacaagcaaacataactgatcagctgccggtatgttcatcgtgtgaaattgcattccaagtgagctgtgctcagcagtgcttggacacagagctgcaagctgcgctggggtggaggaccgtcacttacactctgcccaaggcagaggtcgcattgctgtatcacagtattttattcaggtttctgcaaaaaaataaaaagataacttttttaaacaaacatgaatagaattttgcaaatttaacgttttcaagatttattcaaggaaacaaaatgcctatgttcaaccactggtgttaatgaacaaagatactgtgcgtctctggggaagacgcacctaggtggcggccactcccatggccttgtctagggctcagagaccactcggctctgagcttccaggcgcctcgtctgtgtgcatctcacgcccgacgtggcttctgaaacgtgcattcaacctcaaacttttgcataaaatagaatgaatcgttttgctctgatgaaatgtaggccttacttgtatataagactgttcctgccttcggtctgtcattttcccacctgcctcccctacccaccccccacccaccacctggggcttcctctgggggtccgagggtcttcccatcacatgaagacatcaggttgggtcctgccccactgcccctccccctgttcctgccccaagccgtcaatcagattgtggagcagtacacagtcagatgaaaatactgtaaatgcactcattgggggttttttggttttacttcatatcatgtgcaatgttgtggctttaacattttatgcaactatttatgaagacctctgttgtacctgtaataaatatatagaaaaagcacatacttcgtatggtgagctttatggttttgtgtgtgtgttggggttggcgggtgggtgggtagggtcgtagccctgtgccatcggttcaaagagacttttcgtgaaatttgttggttttgaggactgtaaaagtgatttcatactctgaatataaaactggataatagggtaatgttttaaaatttattatgctattattcagaatgccaaagtattattttttttcccaaaatcagtctggacatttactactttttagactttttgacgttgaactttctgtataaaaattggctgggttttgagcttttggtaagaaataaaagccgattaagcactggccgccccgcggctggtacccaatgcccgagtcactgtggcagcattcgcactggtgtggggagtcctttcaactcaaggaggctgggtttctgggcaccctcgaagttttctggatgtctttttatctttctcgtgtgaactgcactacaaaagagaccagcccgcttcccaagccagccagacacctgggtcttgagccataaactggcgtagttaagctttgcagcttccagtgtattttatttattcttttgttgggtttttgtttgtttcttcttgtaaaattgtacagaaactttttaaaagaaattggattcgaaactggatgtgtattcgtaacctcataatttttatttgtgtattgtttcttttattatttcagttaaatttttacattattttgcatgtatatttctttgtacagagaccttacatgtttacacagtatgatgtgatgtaaatattttattttgccatcagttattttaaaaaattaaacatatttgcctgaaaaaaaaaaaaaaaaaaaaaaaaaaaaaaaaaaaaaaaaaaaaaaaaaaaaaaaaaaaaaaaaaaaagggggggggggctccttaagaaattctcatccccggggggggccgcccagtatttttgcgtcgtgccggcgctgtttttttttgatgaaacggagggtgcccccattatttgggcggcttttttttaaagacgaggagaccggcgcgggtgttttttcaaccgcctcgcttgtcggcgggggcaacatcgtgttgtgtggagcttttttggtggaggaccacccctcttctggggggggcgccaattgtgcgggaccgagttcctcgg

SEQ ID NO: 457211 - DNA, 8903 bp, Homo sapiens
tgttcagggctcagagttggagtcaagtcgccactgtgtttcaggtttctggcagtcggattcatttgcctcacaatactttcctgttgttttttgcagcaaaccaaagagagagtgaagctattgatacagctggctgatggcttttgtgaaaaagggcatgcccatgcggcagagataaaaaaatgtgttactgctgtggataagaggtacagagatttctctctgcggatggagaagtacaggacctctttggaaaaagccctggggatttcttcagattccaacaaatcgagtaaaagtctccagctagatatcattccagccagtatccctggctcagaggtgaaacttcgagatgctgctcatgaacttaatgaagagaagcggaaatctgcccgcaggaaagagttcataatggctgagctcattcaaactgaaaaggcttatgtaagagacctccgggaatgtatggatacgtacctgtgggaaatgaccagtggcgtggaagagattccacctggcattgtaaacaaagaactcatcatcttcggaaacatgcaagaaatctacgaatttcataataacatattcctaaaggagctggaaaaatatgaacagttgccagaggatgttggacattgttttgttacttgggcagacaagtttcagatgtatgtcacatattgcaaaaataagcctgattctactcagctgatattggaacatgcagggtcctattttgacgagatacagcagcgacatggattagccaattccatttcttcctaccttattaaaccagttcagcgaataacgaagtatcagctccttttaaaagagctgctgacgtgctgtgaggaaggaaagggagagattaaagatggcctggaggtgatgctcagcgtgccgaagcgagccaatgatgccatgcacctcagcatgctggaagggtttgatgaaaacattgagtctcagggagaactcatcctacaggaatccttccaagtgtgggacccaaaaaccttaattcgaaagggtcgagaacggcatctcttcctttttgaaatgtccttagtatttagtaaagaagtgaaagattccagtgggagaagcaagtacctttataaaagcaaattgtttacctcagagttgggtgtcacagaacatgttgaaggagacccttgcaaatttgcactgtgggtggggagaacaccaacttcagataataaaattgtccttaaggcttccagcatagagaacaagcaggactggataaagcatatccgcgaagtcatccaggagcggacgatccacctgaagggagccctgaaggagcccattcacatccctaagaccgctcccgccacaagacagaagggaaggagggatggagaggatctggacagccaaggagacggcagcagccagcctgatacgatttccatcgcctcacggacgtctcagaacacgctggacagcgataagctctctggtggctgtgagctgacagtggtgatccatgacttcaccgcttgcaacagcaacgagctgaccatccgacggggccagaccgtggaagttctggagcggccgcatgacaagcctgactggtgtctggtgcggaccactgaccgctccccagcggcagaaggcctggtcccctgtggttcactgtgcatcgcccactccagaagtagcatggaaatggagggcatcttcaaccacaaagactcgctctccgtctccagcaatgacgccagtccacccgcatccgtggcttccctccagccccacatgatcggggcccagagctcgccgggccccaagcggccgggcaacaccctgcgcaagtggctcaccagccccgtgcggcggctcagcagcggcaaggccgacgggcacgtgaagaagctggcgcacaagcacaagaagagccgcgaggtccgcaagagcgccgacgccggctcgcagaaggactccgacgacagtgcggccaccccgcaggacgagacggtcgaggagagaggccggaacgagggcctgagcagcggtactctctccaaatcctcctcctcggggatgcagagctgtggagaagaggaaggcgaggagggggccgacgccgtgcccctgccgccacccatggccatccagcagcacagcctcctccagccagactcacaggatgacaaggcctcttctcggttattagtccgccccaccagctccgaaacaccgagtgcagccgagctcgtcagtgcaattgaggaactcgtgaaaagcaagatggcactggaggatcgccccagctcactccttgttgaccagggagatagtagcagcccttccttcaacccttcggataattcccttctctcttcctcctcgcccattgatgagatggaagaaaggaaatccagctctttaaagagaagacactacgttttgcaagaactagtggagacagagcgtgactatgtgcgggaccttggctatgtggttgagggctacatggcacttatgaaagaagatggtgttcctgatgacatgaaaggaaaagacaaaattgtgttcggcaacatccatcagatttacgactggcacagagacttttttttaggagagttagagaagtgccttgaagatccagaaaaactaggatccctttttgttaaacacgagagaaggttgcacatgtacatagcttattgtcaaaataaaccaaagtctgagcacattgtctcagaatacattgataccttttttgaggacttaaagcagcgtcttggccacaggttacagctcacagatctgttgatcaaaccagtgcagagaatcatgaagtatcagctgttactgaaggacttcctcaagtattccaaaaaggccagcctggatacatcagaattagagagagctgtggaagtcatgtgcatagtacccaggcggtgcaacgacatgatgaacgtggggcggctgcaaggattcgacgtaatgcggctcttgttttttaagagagctcctctgccttcatctctttcttttgtcttggattatttctctccacatagagaaagctgatccttttcacttggttttctggcttctctcactttacctcaatctgattgatattttatttcctttttttttttttttttttttttggtgcgtttggtttgcttttttgggacttgcctgtgctcaaagcccagtgtctcatggcagaaacaagcaggaccgggctttgtctcttgggcccagtactgtaagagctgagtttcctttcctcagcacttaagaccatggttagctatggatgtagtaggacctcggaggtccccactctctcatctctgggacttgatacttcctcattagtttaagatatgtttgcatgagttgctagactattcatattacatattagctattacatatcctcaagatgaattcagaaccagaatcttcttttaaaaatttgactacggagttaaggaggcaggagaagtttttattttcttgcctactgttttgctagagaattagcattgaaagttctggtgctatggttctctctgacgcacacacagaggccgttggagggcttctgaaaactcctgtgcatgcctgatgagttcctgctggcgacccagggaccacactttgagaaccactgttctagtataaaccagacatttaaaactccacttttaatctgtgactgtaattgaggcgccagaggtctatacaaatgttggcaagaattttatttagataattattctgtttagagccaagaacagtaaaagaaaaaaaaaattaaactccataaattaataaaagaaaaatacattattccataggaggaaatctaaagaaaacagcttcagataacttagaaggcaatgttttcttctccccttccttttccccctttatttcttgttttaggggaaaatcgttgcccagggtaaactgctcttgcaggacacattcttggtcacagaccaagatgcaggacttctgcctcgctgcagagagaggcgcatcttcctctttgagcagatcgtcatattcagcgaaccacttgataaaaagaagggcttctccatgccgggattcctgtttaagaacagtatcaaggtgagttgcctttgcctggaggaaaatgtggaaaatgatccctgtaaatttgctctgacatcgaggacgggtgacgtggtagagaccttcattttgcattcatctagtccaagtgtccggcaaacttggatccatgaaatcaaccaaattttagaaaaccagcgcaattttttaaatgccttgacatcgccaatcgagtaccagaggaaccacagcgggggcggcggcggcggcggcagcgggggcagcggcgggggtgggggcagcggcggcggcggggcccccagtggcggcagcggccacagtggcggccccagcagctgcggcggcgcccccagcacgagcaggagccggccctcccggatcccccagcctgtccgacaccacccccccgtgctggtctcctctgcagcctcgagccaggcagaggcagacaagatgtcaggtacgtccacccccgggccctccctgcctccccctggcgcggcccccgaggccggccccagcgcgcccagcaggcggccccccggcgcggacgccgaggggtccgagcgagaagcggagccgatccccaagatgaaggtgctggagagccccaggaaaggcgccgcgaacgcctcggggtcgagcccagacgcccccgccaaggacgcgcgcgctagcctgggcaccctgccgcttgggaagccccgggccggggccgcttcgccgctgaactcgccgctctccagcgcggtcccttctctcggcaaggagcccttcccccccagcagccccctgcagaaggggggctccttctggagctccatccccgcctcccccgccagccgacccggctccttcaccttcccgggggacagcgactccctccagcggcagacaccccgccacgcggcccctggcaaggatactgaccgcatgagcacgtgctcctcggccagcgagcagtccgtgcagtccacccagagcaacgggagtgaaagcagcagcagtagcaacatctccaccatgttggtgacacacgattacacggcagtgaaggaggatgagatcaacgtctaccaaggagaggtcgttcaaattctggccagcaaccagcagaacatgtttctggtgttccgagccgccactgaccagtgccccgcagctgagggctggattccaggctttgtcctgggccacaccagtgcagtcatcgtggagaacccggacgggactctcaagaagtcaacatcttggcacacagcactccgtttaaggaaaaaatctgagaaaaaagataaagacggcaaaagggaaggcaagttagagaacggttatcggaagtcacgggaaggactcagcaacaaggtatctgtgaagcttctcaatcccaactacatttatgacgttcccccagaattcgtcattccattgagtgaggtcacgtgtgagacaggggagaccgttgttcttagatgtcgagtctgtggccgccccaaagcctcaattacctggaagggccctgaacacaacaccttgaacaacgatggtcactacagcatctcctacagtgacctgggagaggccacgctgaagattgtgggcgtgaccacggaagatgacggcatctacacgtgcatcgctgtcaatgacatgggttcagcctcatcgtcggccagcctgagggtcctaggtccagggatggatgggatcatggtgacctggaaagacaactttgactccttctacagtgaagtggctgagcttggcaggggcagattctctgtcgttaagaaatgtgatcagaaaggaaccaagcgagcagtggccactaagtttgtgaacaagaagttgatgaagcgcgaccaggtcacccatgagcttggcatcctgcagagcctccagcaccccctgcttgtcggcctcctcgacacctttgagacccccaccagctacatcctggtcttagaaatggctgaccagggtcgcctcctggactgcgtggtgcgatggggaagcctcactgaagggaagatcagggcgcacctgggggaggttctggaagctgtccggtacctgcacaactgcaggatagcacacctggacctaaagcctgagaatatcctggtggatgagagtttagccaagccaaccatcaaactggctgactttggagatgctgttcagctcaacacgacctactacatccaccagttactggggaaccctgaattcgcagcccctgaaatcatcctcgggaaccctgtctccctgacctcggatacgtggagtgttggagtgctcacatacgtacttcttagtggcgtgtcccccttcctggatgacagtgtggaagagacctgcctgaacatttgccgcttagactttagcttcccagatgactactttaaaggagtgagccagaaggccaaggagttcgtgtgcttcctcctgcaggaggaccccgccaagcgtccctcggctgcgctggccctccaggagcagtggctgcaggccggcaacggcagaagcacgggcgtcctcgacacgtccagactgacttccttcattgagcggcgcaaacaccagaatgatgttcgacctatccgtagcattaaaaactttctgcagagcaggcttctgcctagagtttgacctatccagaagttctttctcattctctttcacctgccaatcagctgttaatctgaattttcaagagaaaacaagcaaacataactgatcagctgccggtatgttcatcgtgtgaaattgcattccaagtgagctgtgctcagcagtgcttggacacagagctgcaagctgcgctggggtggaggaccgtcacttacactctgcccaaggcagaggtcgcattgctgtatcacagtattttattcaggtttctgcaaaaaaataaaaagataacttttttaaacaaacatgaatagaattttgcaaatttaacgttttcaagatttattcaaggaaacaaaatgcctatgttcaaccactggtgttaatgaacaaagatactgtgcgtctctggggaagacgcacctaggtggcggccactcccatggccttgtctagggctcagagaccactcggctctgagcttccaggcgcctcgtctgtgtgcatctcacgcccgacgtggcttctgaaacgtgcattcaacctcaaacttttgcataaaatagaatgaatcgttttgctctgatgaaatgtaggccttacttgtatataagactgttcctgccttcggtctgtcattttcccacctgcctcccctacccaccccccacccaccacctggggcttcctctgggggtccgagggtcttcccatcacatgaagacatcaggttgggtcctgccccactgcccctccccctgttcctgccccaagccgtcaatcagattgtggagcagtacacagtcagatgaaaatactgtaaatgcactcattgggggttttttggttttacttcatatcatgtgcaatgttgtggctttaacattttatgcaactatttatgaagacctctgttgtacctgtaataaatatatagaaaaagcacatacttcgtatggtgagctttatggttttgtgtgtgtgttggggttggcgggtgggtgggtagggtcgtagccctgtgccatcggttcaaagagacttttcgtgaaatttgttggttttgaggactgtaaaagtgatttcatactctgaatataaaactggataatagggtaatgttttaaaatttattatgctattattcagaatgccaaagtattattttttttcccaaaatcagtctggacatttactactttttagactttttgacgttgaactttctgtataaaaattggctgggttttgagcttttggtaagaaataaaagccgattaagcactggccgccccgcggctggtacccaatgcccgagtcactgtggcagcattcgcactggtgtggggagtcctttcaactcaaggaggctgggtttctgggcaccctcgaagttttctggatgtctttttatctttctcgtgtgaactgcactacaaaagagaccagcccgcttcccaagccagccagacacctgggtcttgagccataaactggcgtagttaagctttgcagcttccagtgtattttatttattcttttgttgggtttttgtttgtttcttcttgtaaaattgtacagaaactttttaaaagaaattggattcgaaactggatgtgtattcgtaacctcataatttttatttgtgtattgtttcttttattatttcagttaaatttttacattattttgcatgtatatttctttgtacagagaccttacatgtttacacagtatgatgtgatgtaaatattttattttgccatcagttattttaaaaaattaaacatatttgcctgaaaaaaaaaaaaaaaaaaaaaaaaaaaaaaaaaaaaaaaaaaaaaaaaaaaaaaaaaaaaaaaaaaaagggggggggggctccttaagaaattctcatccccggggggggccgcccagtatttttgcgtcgtgccggcgctgtttttttttgatgaaacggagggtgcccccattatttgggcggcttttttttaaagacgaggagaccggcgcgggtgttttttcaaccgcctcgcttgtcggcgggggcaacatcgtgttgtgtggagcttttttggtggaggaccacccctcttctggggggggcgccaattgtgcgggaccgagttcctcgg

SEQ ID NO: 457212 - DNA, 12297 bp, Homo sapiens
cgcggccgcgggcgccgccgcagccatgagcggcagcagcggcggagccgccgcccccgccgcgtcctccggccccgccgcggcggccagcgcggctggctcgggctgcgggggcggtgccggcgagggggcagaggaggcggccaaggacctggccgacatcgcggccttcttccgatccgggtttcgaaaaaacgatgaaatgaaagctatggatgttttaccaattttgaaggaaaaagttgcatacctttcaggtgggagagataaacgtggaggtcccattttaacgtttccggcccgcagcaatcatgacagaatacgacaggaggatctcaggagactcatttcctatctagcctgtattcccagcgaggaggtctgcaagcgtggcttcacggtgatcgtggacatgcgtgggtccaagtgggactccatcaagccccttctgaagatcctgcaggagtccttcccctgctgcatccatgtggccctgatcatcaagccagacaacttctggcagaaacagaggactaattttggcagttctaaatttgaatttgagacaaatatggtctctttagaaggccttaccaaagtagttgatccttctcagctaactcctgagtttgatggctgcctggaatacaaccacgaagaatggattgaaatcagagttgcttttgaagactacattagcaatgccacccacatgctgtctcggctggaggaacttcaggacatcctagctaagaaggagctgcctcaggatttagagggggctcggaatatgatcgaggaacattctcagctgaagaagaaggtgattaaggcccccatcgaggacctggatttggagggacagaagctgcttcagaggatacagagcagtgaaagctttcccaaaaagaactcaggctcaggcaatgcggacctgcagaacctcttgcccaaggtgtccaccatgctggaccggctgcactcgacacggcagcatctgcaccagatgtggcatgtgaggaagctgaagctggaccagtgcttccagctgaggctgtttgaacaggatgctgagaagatgtttgactggatcacacacaacaaaggcctgtttctaaacagctacacagagattgggaccagccaccctcatgccatggagcttcagacgcagcacaatcactttgccatgaactgtatgaacgtgtatgtaaatataaaccgcatcatgtcggtggccaatcgtctggtggagtctggccactatgcctcgcagcagatcaggcagatcgcgagtcagctggagcaggagtggaaggcgtttgcggcagccctggatgagcggagcaccttgctggacatgtcctccattttccaccagaaggccgaaaagtatatgagcaacgtggattcatggtgtaaagcttgcggtgaggtagaccttccctcagagctgcaggacctagaagatgccattcatcaccaccagggaatatatgaacatatcactcttgcttattctgaggtcagccaagatgggaagtcgctccttgacaagctccagcggcccttgactcccggcagctccgattccctgacagcctctgccaactactccaaggccgtgcaccatgtcctggatgtcatccacgaggtgctgcaccaccagcggcagcgtgagaacatctggcaacaccgcaaggtccggctgcatcagaggctgcagctgtgtgttttccagcaggacgttcagcaggtgctagactggatcgagaaccacggagaagcatttctgagcaaacatacaggtgtggggaaatctcttcatcgggccagagcattgcagaaacgtcatgaagattttgaagaagtggcacagaacacatacaccaatgcggataaattactggaagcagcagaacagctggctcagactggggaatgtgaccccgaagagatttatcaggctgcccatcagctggaagaccggattcaagatttcgttcggcgtgttgagcagcgaaagatcctactggacatgtcagtgtcctttcacacccatgtgaaagagctgtggacgtggctggaggagctgcagaaggagctgctggacgacgtgtatgccgagtcggtggaggccgtgcaggacctcatcaagcgctttggccagcagcagcagaccaccctgcaggtgactgtcaacgtgatcaaggaaggggaggacctcatccagcagctcagggactctgccatctccagtaacaagaccccccacaacagctccatcaaccacattgagacggtgctgcagcagctggacgaggcgcagtcgcagatggaggagctcttccaggagcgcaagatcaagctggagctcttcctgcacgtgcgcatcttcgagagggacgccatcgacattatctcagacctcgagtcttggaatgatgagctttctcagcaaatgaatgacttcgacacagaagatctcacgattgcagagcagcgcctccagcaccatgcagacaaagccttgaccatgaacaacttgacttttgacgtcatccaccaagggcaagatcttctgcagtatgtcaatgaggtccaggcctctggtgtggagctgctgtgtgatagagatgtagacatggcaactcgggtccaggacctgctggagtttcttcatgaaaaacagcaggaattggatttagccgcagagcagcatcggaaacacctggagcagtgcgtgcagctgcgccacctgcaggcagaagtgaaacaggtgctgggttggatccgcaacggagagtccatgttaaatgccggacttatcacagccagctcgttacaagaggcagagcagctccagcgagagcacgagcagttccagcatgccattgagaaaacacatcagagcgcgctgcaggtgcagcagaaggcagaagccatgctacaggccaaccactacgacatggacatgatccgggactgcgccgagaaggtggcgtctcactggcaacagctcatgctcaagatggaagatcgcctcaagctcgtcaacgcctctgtcgctttctacaaaacctcagagcaggtctgcagcgtcctcgagagcctggaacaggagtacaagagagaagaagactggtgtggcggggcggataagctgggcccaaactctgagacggaccacgtgacgcccatgatcagcaagcacctggagcagaaggaggcattcctgaaggcttgcacccttgctcggaggaatgcagacgtcttcctgaaatacctgcacaggaacagcgtgaacatgccaggaatggtgacgcacatcaaagctcctgaacagcaagtgaaaaatatcttgaatgaactcttccaacgggagaacagggtattgcattactggaccatgaggaagagacggctggaccagtgtcagcagtacgtggtctttgagaggagtgccaagcaggctttggaatggatccatgacaatggcgagttctacctttccacacacacctccacgggctccagtatacagcacacccaggagctcctgaaagagcacgaggagttccagataactgcaaagcaaaccaaagagagagtgaagctattgatacagctggctgatggcttttgtgaaaaagggcatgcccatgcggcagagataaaaaaatgtgttactgctgtggataagaggtacagagatttctctctgcggatggagaagtacaggacctctttggaaaaagccctggggatttcttcagattccaacaaatcgagtaaaagtctccagctagatatcattccagccagtatccctggctcagaggtgaaacttcgagatgctgctcatgaacttaatgaagagaagcggaaatctgcccgcaggaaagagttcataatggctgagctcattcaaactgaaaaggcttatgtaagagacctccgggaatgtatggatacgtacctgtgggaaatgaccagtggcgtggaagagattccacctggcattgtaaacaaagaactcatcatcttcggaaacatgcaagaaatctacgaatttcataataacatattcctaaaggagctggaaaaatatgaacagttgccagaggatgttggacattgttttgttacttgggcagacaagtttcagatgtatgtcacatattgcaaaaataagcctgattctactcagctgatattggaacatgcagggtcctattttgacgagatacagcagcgacatggattagccaattccatttcttcctaccttattaaaccagttcagcgaataacgaagtatcagctccttttaaaagagctgctgacgtgctgtgaggaaggaaagggagagattaaagatggcctggaggtgatgctcagcgtgccgaagcgagccaatgatgccatgcacctcagcatgctggaagggtttgatgaaaacattgagtctcagggagaactcatcctacaggaatccttccaagtgtgggacccaaaaaccttaattcgaaagggtcgagaacggcatctcttcctttttgaaatgtccttagtatttagtaaagaagtgaaagattccagtgggagaagcaagtacctttataaaagcaaattgtttacctcagagttgggtgtcacagaacatgttgaaggagacccttgcaaatttgcactgtgggtggggagaacaccaacttcagataataaaattgtccttaaggcttccagcatagagaacaagcaggactggataaagcatatccgcgaagtcatccaggagcggacgatccacctgaagggagccctgaaggagcccattcacatccctaagaccgctcccgccacaagacagaagggaaggagggatggagaggatctggacagccaaggagacggcagcagccagcctgatacgatttccatcgcctcacggacgtctcagaacacgctggacagcgataagctctctggtggctgtgagctgacagtggtgatccatgacttcaccgcttgcaacagcaacgagctgaccatccgacggggccagaccgtggaagttctggagcggccgcatgacaagcctgactggtgtctggtgcggaccactgaccgctccccagcggcagaaggcctggtcccctgtggttcactgtgcatcgcccactccagaagtagcatggaaatggagggcatcttcaaccacaaagactcgctctccgtctccagcaatgacgccagtccacccgcatccgtggcttccctccagccccacatgatcggggcccagagctcgccgggccccaagcggccgggcaacaccctgcgcaagtggctcaccagccccgtgcggcggctcagcagcggcaaggccgacgggcacgtgaagaagctggcgcacaagcacaagaagagccgcgaggtccgcaagagcgccgacgccggctcgcagaaggactccgacgacagtgcggccaccccgcaggacgagacggtcgaggagagaggccggaacgagggcctgagcagcggtactctctccaaatcctcctcctcggggatgcagagctgtggagaagaggaaggcgaggagggggccgacgccgtgcccctgccgccacccatggccatccagcagcacagcctcctccagccagactcacaggatgacaaggcctcttctcggttattagtccgccccaccagctccgaaacaccgagtgcagccgagctcgtcagtgcaattgaggaactcgtgaaaagcaagatggcactggaggatcgccccagctcactccttgttgaccagggagatagtagcagcccttccttcaacccttcggataattcccttctctcttcctcctcgcccattgatgagatggaagaaaggaaatccagctctttaaagagaagacactacgttttgcaagaactagtggagacagagcgtgactatgtgcgggaccttggctatgtggttgagggctacatggcacttatgaaagaagatggtgttcctgatgacatgaaaggaaaagacaaaattgtgttcggcaacatccatcagatttacgactggcacagagacttttttttaggagagttagagaagtgccttgaagatccagaaaaactaggatccctttttgttaaacacgagagaaggttgcacatgtacatagcttattgtcaaaataaaccaaagtctgagcacattgtctcagaatacattgataccttttttgaggacttaaagcagcgtcttggccacaggttacagctcacagatctgttgatcaaaccagtgcagagaatcatgaagtatcagctgttactgaaggacttcctcaagtattccaaaaaggccagcctggatacatcagaattagagagagctgtggaagtcatgtgcatagtacccaggcggtgcaacgacatgatgaacgtggggcggctgcaaggattcgacgtaatgcggctcttgttttttaagagagctcctctgccttcatctctttcttttgtcttggattatttctctccacatagagaaagctgatccttttcacttggttttctggcttctctcactttacctcaatctgattgatattttatttcctttttttttttttttttttttttggtgcgtttggtttgcttttttgggacttgcctgtgctcaaagcccagtgtctcatggcagaaacaagcaggaccgggctttgtctcttgggcccagtactgtaagagctgagtttcctttcctcagcacttaagaccatggttagctatggatgtagtaggacctcggaggtccccactctctcatctctgggacttgatacttcctcattagtttaagatatgtttgcatgagttgctagactattcatattacatattagctattacatatcctcaagatgaattcagaaccagaatcttcttttaaaaatttgactacggagttaaggaggcaggagaagtttttattttcttgcctactgttttgctagagaattagcattgaaagttctggtgctatggttctctctgacgcacacacagaggccgttggagggcttctgaaaactcctgtgcatgcctgatgagttcctgctggcgacccagggaccacactttgagaaccactgttctagtataaaccagacatttaaaactccacttttaatctgtgactgtaattgaggcgccagaggtctatacaaatgttggcaagaattttatttagataattattctgtttagagccaagaacagtaaaagaaaaaaaaaattaaactccataaattaataaaagaaaaatacattattccataggaggaaatctaaagaaaacagcttcagataacttagaaggcaatgttttcttctccccttccttttccccctttatttcttgttttaggggaaaatcgttgcccagggtaaactgctcttgcaggacacattcttggtcacagaccaagatgcaggacttctgcctcgctgcagagagaggcgcatcttcctctttgagcagatcgtcatattcagcgaaccacttgataaaaagaagggcttctccatgccgggattcctgtttaagaacagtatcaaggtgagttgcctttgcctggaggaaaatgtggaaaatgatccctgtaaatttgctctgacatcgaggacgggtgacgtggtagagaccttcattttgcattcatctagtccaagtgtccggcaaacttggatccatgaaatcaaccaaattttagaaaaccagcgcaattttttaaatgccttgacatcgccaatcgagtaccagaggaaccacagcgggggcggcggcggcggcggcagcgggggcagcggcgggggtgggggcagcggcggcggcggggcccccagtggcggcagcggccacagtggcggccccagcagctgcggcggcgcccccagcacgagcaggagccggccctcccggatcccccagcctgtccgacaccacccccccgtgctggtctcctctgcagcctcgagccaggcagaggcagacaagatgtcaggtacgtccacccccgggccctccctgcctccccctggcgcggcccccgaggccggccccagcgcgcccagcaggcggccccccggcgcggacgccgaggggtccgagcgagaagcggagccgatccccaagatgaaggtgctggagagccccaggaaaggcgccgcgaacgcctcggggtcgagcccagacgcccccgccaaggacgcgcgcgctagcctgggcaccctgccgcttgggaagccccgggccggggccgcttcgccgctgaactcgccgctctccagcgcggtcccttctctcggcaaggagcccttcccccccagcagccccctgcagaaggggggctccttctggagctccatccccgcctcccccgccagccgacccggctccttcaccttcccgggggacagcgactccctccagcggcagacaccccgccacgcggcccctggcaaggatactgaccgcatgagcacgtgctcctcggccagcgagcagtccgtgcagtccacccagagcaacgggagtgaaagcagcagcagtagcaacatctccaccatgttggtgacacacgattacacggcagtgaaggaggatgagatcaacgtctaccaaggagaggtcgttcaaattctggccagcaaccagcagaacatgtttctggtgttccgagccgccactgaccagtgccccgcagctgagggctggattccaggctttgtcctgggccacaccagtgcagtcatcgtggagaacccggacgggactctcaagaagtcaacatcttggcacacagcactccgtttaaggaaaaaatctgagaaaaaagataaagacggcaaaagggaaggcaagttagagaacggttatcggaagtcacgggaaggactcagcaacaaggtatctgtgaagcttctcaatcccaactacatttatgacgttcccccagaattcgtcattccattgagtgaggtcacgtgtgagacaggggagaccgttgttcttagatgtcgagtctgtggccgccccaaagcctcaattacctggaagggccctgaacacaacaccttgaacaacgatggtcactacagcatctcctacagtgacctgggagaggccacgctgaagattgtgggcgtgaccacggaagatgacggcatctacacgtgcatcgctgtcaatgacatgggttcagcctcatcgtcggccagcctgagggtcctaggtccagggatggatgggatcatggtgacctggaaagacaactttgactccttctacagtgaagtggctgagcttggcaggggcagattctctgtcgttaagaaatgtgatcagaaaggaaccaagcgagcagtggccactaagtttgtgaacaagaagttgatgaagcgcgaccaggtcacccatgagcttggcatcctgcagagcctccagcaccccctgcttgtcggcctcctcgacacctttgagacccccaccagctacatcctggtcttagaaatggctgaccagggtcgcctcctggactgcgtggtgcgatggggaagcctcactgaagggaagatcagggcgcacctgggggaggttctggaagctgtccggtacctgcacaactgcaggatagcacacctggacctaaagcctgagaatatcctggtggatgagagtttagccaagccaaccatcaaactggctgactttggagatgctgttcagctcaacacgacctactacatccaccagttactggggaaccctgaattcgcagcccctgaaatcatcctcgggaaccctgtctccctgacctcggatacgtggagtgttggagtgctcacatacgtacttcttagtggcgtgtcccccttcctggatgacagtgtggaagagacctgcctgaacatttgccgcttagactttagcctccaggagcagtggctgcaggccggcaacggcagaagcacgggcgtcctcgacacgtccagactgacttccttcattgagcggcgcaaacaccagaatgatgttcgacctatccgtagcattaaaaactttctgcagagcaggcttctgcctagagtttgacctatccagaagttctttctcattctctttcacctgccaatcagctgttaatctgaattttcaagagaaaacaagcaaacataactgatcagctgccggtatgttcatcgtgtgaaattgcattccaagtgagctgtgctcagcagtgcttggacacagagctgcaagctgcgctggggtggaggaccgtcacttacactctgcccaaggcagaggtcgcattgctgtatcacagtattttattcaggtttctgcaaaaaaataaaaagataacttttttaaacaaacatgaatagaattttgcaaatttaacgttttcaagatttattcaaggaaacaaaatgcctatgttcaaccactggtgttaatgaacaaagatactgtgcgtctctggggaagacgcacctaggtggcggccactcccatggccttgtctagggctcagagaccactcggctctgagcttccaggcgcctcgtctgtgtgcatctcacgcccgacgtggcttctgaaacgtgcattcaacctcaaacttttgcataaaatagaatgaatcgttttgctctgatgaaatgtaggccttacttgtatataagactgttcctgccttcggtctgtcattttcccacctgcctcccctacccaccccccacccaccacctggggcttcctctgggggtccgagggtcttcccatcacatgaagacatcaggttgggtcctgccccactgcccctccccctgttcctgccccaagccgtcaatcagattgtggagcagtacacagtcagatgaaaatactgtaaatgcactcattgggggttttttggttttacttcatatcatgtgcaatgttgtggctttaacattttatgcaactatttatgaagacctctgttgtacctgtaataaatatatagaaaaagcacatacttcgtatggtgagctttatggttttgtgtgtgtgttggggttggcgggtgggtgggtagggtcgtagccctgtgccatcggttcaaagagacttttcgtgaaatttgttggttttgaggactgtaaaagtgatttcatactctgaatataaaactggataatagggtaatgttttaaaatttattatgctattattcagaatgccaaagtattattttttttcccaaaatcagtctggacatttactactttttagactttttgacgttgaactttctgtataaaaattggctgggttttgagcttttggtaagaaataaaagccgattaagcactggccgccccgcggctggtacccaatgcccgagtcactgtggcagcattcgcactggtgtggggagtcctttcaactcaaggaggctgggtttctgggcaccctcgaagttttctggatgtctttttatctttctcgtgtgaactgcactacaaaagagaccagcccgcttcccaagccagccagacacctgggtcttgagccataaactggcgtagttaagctttgcagcttccagtgtattttatttattcttttgttgggtttttgtttgtttcttcttgtaaaattgtacagaaactttttaaaagaaattggattcgaaactggatgtgtattcgtaacctcataatttttatttgtgtattgtttcttttattatttcagttaaatttttacattattttgcatgtatatttctttgtacagagaccttacatgtttacacagtatgatgtgatgtaaatattttattttgccatcagttattttaaaaaattaaacatatttgcctgaaaaaaaaaaaaaaaaaaaaaaaaaaaaaaaaaaaaaaaaaaaaaaaaaaaaaaaaaaaaaaaaaaaagggggggggggctccttaagaaattctcatccccggggggggccgcccagtatttttgcgtcgtgccggcgctgtttttttttgatgaaacggagggtgcccccattatttgggcggcttttttttaaagacgaggagaccggcgcgggtgttttttcaaccgcctcgcttgtcggcgggggcaacatcgtgttgtgtggagcttttttggtggaggaccacccctcttctggggggggcgccaattgtgcgggaccgagttcctcgg

SEQ ID NO: 457213 - DNA, 8128 bp, Homo sapiens
cagcccttttgcaaccaggaaagactcattttgcacgtttgttgcttgtaagattgcaaatagtcgaatcttgattgtcagatagtaggattttcacatgttggtttccttcccctgaattttttgctcgttgacctgcactggggtctccagtaagagacgctcacaggaagcgaaggatgaaaccagtcacctgtagcctaagaacacaatgtcctcattataactcacatgacagctgagatcactagtgacgttcttataacctaacatggccacaagtaaccaaaacctgtttccttggtctctgttctgcatccttctagaattttactgtcacctaattatataattgtctttttatccagacctcagagttgggtgtcacagaacatgttgaaggagacccttgcaaatttgcactgtgggtggggagaacaccaacttcagataataaaattgtccttaaggcttccagcatagagaacaagcaggactggataaagcatatccgcgaagtcatccaggagcggacgatccacctgaagggagccctgaaggagcccattcacatccctaagaccgctcccgccacaagacagaagggaaggagggatggagaggatctggacagccaaggagacggcagcagccagcctgatacgatttccatcgcctcacggacgtctcagaacacgctggacagcgataagctctctggtggctgtgagctgacagtggtgatccatgacttcaccgcttgcaacagcaacgagctgaccatccgacggggccagaccgtggaagttctggagcggccgcatgacaagcctgactggtgtctggtgcggaccactgaccgctccccagcggcagaaggcctggtcccctgtggttcactgtgcatcgcccactccagaagtagcatggaaatggagggcatcttcaaccacaaagactcgctctccgtctccagcaatgacgccagtccacccgcatccgtggcttccctccagccccacatgatcggggcccagagctcgccgggccccaagcggccgggcaacaccctgcgcaagtggctcaccagccccgtgcggcggctcagcagcggcaaggccgacgggcacgtgaagaagctggcgcacaagcacaagaagagccgcgaggtccgcaagagcgccgacgccggctcgcagaaggactccgacgacagtgcggccaccccgcaggacgagacggtcgaggagagaggccggaacgagggcctgagcagcggtactctctccaaatcctcctcctcggggatgcagagctgtggagaagaggaaggcgaggagggggccgacgccgtgcccctgccgccacccatggccatccagcagcacagcctcctccagccagactcacaggatgacaaggcctcttctcggttattagtccgccccaccagctccgaaacaccgagtgcagccgagctcgtcagtgcaattgaggaactcgtgaaaagcaagatggcactggaggatcgccccagctcactccttgttgaccagggagatagtagcagcccttccttcaacccttcggataattcccttctctcttcctcctcgcccattgatgagatggaagaaaggaaatccagctctttaaagagaagacactacgttttgcaagaactagtggagacagagcgtgactatgtgcgggaccttggctatgtggttgagggctacatggcacttatgaaagaagatggtgttcctgatgacatgaaaggaaaagacaaaattgtgttcggcaacatccatcagatttacgactggcacagagacttttttttaggagagttagagaagtgccttgaagatccagaaaaactaggatccctttttgttaaacacgagagaaggttgcacatgtacatagcttattgtcaaaataaaccaaagtctgagcacattgtctcagaatacattgataccttttttgaggacttaaagcagcgtcttggccacaggttacagctcacagatctgttgatcaaaccagtgcagagaatcatgaagtatcagctgttactgaaggacttcctcaagtattccaaaaaggccagcctggatacatcagaattagagagagctgtggaagtcatgtgcatagtacccaggcggtgcaacgacatgatgaacgtggggcggctgcaaggattcgacgtaatgcggctcttgttttttaagagagctcctctgccttcatctctttcttttgtcttggattatttctctccacatagagaaagctgatccttttcacttggttttctggcttctctcactttacctcaatctgattgatattttatttcctttttttttttttttttttttttggtgcgtttggtttgcttttttgggacttgcctgtgctcaaagcccagtgtctcatggcagaaacaagcaggaccgggctttgtctcttgggcccagtactgtaagagctgagtttcctttcctcagcacttaagaccatggttagctatggatgtagtaggacctcggaggtccccactctctcatctctgggacttgatacttcctcattagtttaagatatgtttgcatgagttgctagactattcatattacatattagctattacatatcctcaagatgaattcagaaccagaatcttcttttaaaaatttgactacggagttaaggaggcaggagaagtttttattttcttgcctactgttttgctagagaattagcattgaaagttctggtgctatggttctctctgacgcacacacagaggccgttggagggcttctgaaaactcctgtgcatgcctgatgagttcctgctggcgacccagggaccacactttgagaaccactgttctagtataaaccagacatttaaaactccacttttaatctgtgactgtaattgaggcgccagaggtctatacaaatgttggcaagaattttatttagataattattctgtttagagccaagaacagtaaaagaaaaaaaaaattaaactccataaattaataaaagaaaaatacattattccataggaggaaatctaaagaaaacagcttcagataacttagaaggcaatgttttcttctccccttccttttccccctttatttcttgttttaggggaaaatcgttgcccagggtaaactgctcttgcaggacacattcttggtcacagaccaagatgcaggacttctgcctcgctgcagagagaggcgcatcttcctctttgagcagatcgtcatattcagcgaaccacttgataaaaagaagggcttctccatgccgggattcctgtttaagaacagtatcaaggtgagttgcctttgcctggaggaaaatgtggaaaatgatccctgtaaatttgctctgacatcgaggacgggtgacgtggtagagaccttcattttgcattcatctagtccaagtgtccggcaaacttggatccatgaaatcaaccaaattttagaaaaccagcgcaattttttaaatgccttgacatcgccaatcgagtaccagaggaaccacagcgggggcggcggcggcggcggcagcgggggcagcggcgggggtgggggcagcggcggcggcggggcccccagtggcggcagcggccacagtggcggccccagcagctgcggcggcgcccccagcacgagcaggagccggccctcccggatcccccagcctgtccgacaccacccccccgtgctggtctcctctgcagcctcgagccaggcagaggcagacaagatgtcaggtacgtccacccccgggccctccctgcctccccctggcgcggcccccgaggccggccccagcgcgcccagcaggcggccccccggcgcggacgccgaggggtccgagcgagaagcggagccgatccccaagatgaaggtgctggagagccccaggaaaggcgccgcgaacgcctcggggtcgagcccagacgcccccgccaaggacgcgcgcgctagcctgggcaccctgccgcttgggaagccccgggccggggccgcttcgccgctgaactcgccgctctccagcgcggtcccttctctcggcaaggagcccttcccccccagcagccccctgcagaaggggggctccttctggagctccatccccgcctcccccgccagccgacccggctccttcaccttcccgggggacagcgactccctccagcggcagacaccccgccacgcggcccctggcaaggatactgaccgcatgagcacgtgctcctcggccagcgagcagtccgtgcagtccacccagagcaacgggagtgaaagcagcagcagtagcaacatctccaccatgttggtgacacacgattacacggcagtgaaggaggatgagatcaacgtctaccaaggagaggtcgttcaaattctggccagcaaccagcagaacatgtttctggtgttccgagccgccactgaccagtgccccgcagctgagggctggattccaggctttgtcctgggccacaccagtgcagtcatcgtggagaacccggacgggactctcaagaagtcaacatcttggcacacagcactccgtttaaggaaaaaatctgagaaaaaagataaagacggcaaaagggaaggcaagttagagaacggttatcggaagtcacgggaaggactcagcaacaaggtatctgtgaagcttctcaatcccaactacatttatgacgttcccccagaattcgtcattccattgagtgaggtcacgtgtgagacaggggagaccgttgttcttagatgtcgagtctgtggccgccccaaagcctcaattacctggaagggccctgaacacaacaccttgaacaacgatggtcactacagcatctcctacagtgacctgggagaggccacgctgaagattgtgggcgtgaccacggaagatgacggcatctacacgtgcatcgctgtcaatgacatgggttcagcctcatcgtcggccagcctgagggtcctaggtccagggatggatgggatcatggtgacctggaaagacaactttgactccttctacagtgaagtggctgagcttggcaggggcagattctctgtcgttaagaaatgtgatcagaaaggaaccaagcgagcagtggccactaagtttgtgaacaagaagttgatgaagcgcgaccaggtcacccatgagcttggcatcctgcagagcctccagcaccccctgcttgtcggcctcctcgacacctttgagacccccaccagctacatcctggtcttagaaatggctgaccagggtcgcctcctggactgcgtggtgcgatggggaagcctcactgaagggaagatcagggcgcacctgggggaggttctggaagctgtccggtacctgcacaactgcaggatagcacacctggacctaaagcctgagaatatcctggtggatgagagtttagccaagccaaccatcaaactggctgactttggagatgctgttcagctcaacacgacctactacatccaccagttactggggaaccctgaattcgcagcccctgaaatcatcctcgggaaccctgtctccctgacctcggatacgtggagtgttggagtgctcacatacgtacttcttagtggcgtgtcccccttcctggatgacagtgtggaagagacctgcctgaacatttgccgcttagactttagcttcccagatgactactttaaaggagtgagccagaaggccaaggagttcgtgtgcttcctcctgcaggaggaccccgccaagcgtccctcggctgcgctggccctccaggagcagtggctgcaggccggcaacggcagaagcacgggcgtcctcgacacgtccagactgacttccttcattgagcggcgcaaacaccagaatgatgttcgacctatccgtagcattaaaaactttctgcagagcaggcttctgcctagagtttgacctatccagaagttctttctcattctctttcacctgccaatcagctgttaatctgaattttcaagagaaaacaagcaaacataactgatcagctgccggtatgttcatcgtgtgaaattgcattccaagtgagctgtgctcagcagtgcttggacacagagctgcaagctgcgctggggtggaggaccgtcacttacactctgcccaaggcagaggtcgcattgctgtatcacagtattttattcaggtttctgcaaaaaaataaaaagataacttttttaaacaaacatgaatagaattttgcaaatttaacgttttcaagatttattcaaggaaacaaaatgcctatgttcaaccactggtgttaatgaacaaagatactgtgcgtctctggggaagacgcacctaggtggcggccactcccatggccttgtctagggctcagagaccactcggctctgagcttccaggcgcctcgtctgtgtgcatctcacgcccgacgtggcttctgaaacgtgcattcaacctcaaacttttgcataaaatagaatgaatcgttttgctctgatgaaatgtaggccttacttgtatataagactgttcctgccttcggtctgtcattttcccacctgcctcccctacccaccccccacccaccacctggggcttcctctgggggtccgagggtcttcccatcacatgaagacatcaggttgggtcctgccccactgcccctccccctgttcctgccccaagccgtcaatcagattgtggagcagtacacagtcagatgaaaatactgtaaatgcactcattgggggttttttggttttacttcatatcatgtgcaatgttgtggctttaacattttatgcaactatttatgaagacctctgttgtacctgtaataaatatatagaaaaagcacatacttcgtatggtgagctttatggttttgtgtgtgtgttggggttggcgggtgggtgggtagggtcgtagccctgtgccatcggttcaaagagacttttcgtgaaatttgttggttttgaggactgtaaaagtgatttcatactctgaatataaaactggataatagggtaatgttttaaaatttattatgctattattcagaatgccaaagtattattttttttcccaaaatcagtctggacatttactactttttagactttttgacgttgaactttctgtataaaaattggctgggttttgagcttttggtaagaaataaaagccgattaagcactggccgccccgcggctggtacccaatgcccgagtcactgtggcagcattcgcactggtgtggggagtcctttcaactcaaggaggctgggtttctgggcaccctcgaagttttctggatgtctttttatctttctcgtgtgaactgcactacaaaagagaccagcccgcttcccaagccagccagacacctgggtcttgagccataaactggcgtagttaagctttgcagcttccagtgtattttatttattcttttgttgggtttttgtttgtttcttcttgtaaaattgtacagaaactttttaaaagaaattggattcgaaactggatgtgtattcgtaacctcataatttttatttgtgtattgtttcttttattatttcagttaaatttttacattattttgcatgtatatttctttgtacagagaccttacatgtttacacagtatgatgtgatgtaaatattttattttgccatcagttattttaaaaaattaaacatatttgcctgaaaaaaaaaaaaaaaaaaaaaaaaaaaaaaaaaaaaaaaaaaaaaaaaaaaaaaaaaaaaaaaaaaaagggggggggggctccttaagaaattctcatccccggggggggccgcccagtatttttgcgtcgtgccggcgctgtttttttttgatgaaacggagggtgcccccattatttgggcggcttttttttaaagacgaggagaccggcgcgggtgttttttcaaccgcctcgcttgtcggcgggggcaacatcgtgttgtgtggagcttttttggtggaggaccacccctcttctggggggggcgccaattgtgcgggaccgagttcctcgg

SEQ ID NO: 457214 - DNA, 12243 bp, Homo sapiens
cgcggccgcgggcgccgccgcagccatgagcggcagcagcggcggagccgccgcccccgccgcgtcctccggccccgccgcggcggccagcgcggctggctcgggctgcgggggcggtgccggcgagggggcagaggaggcggccaaggacctggccgacatcgcggccttcttccgatccgggtttcgaaaaaacgatgaaatgaaagctatggatgttttaccaattttgaaggaaaaagttgcatacctttcaggtgggagagataaacgtggaggtcccattttaacgtttccggcccgcagcaatcatgacagaatacgacaggaggatctcaggagactcatttcctatctagcctgtattcccagcgaggaggtctgcaagcgtggcttcacggtgatcgtggacatgcgtgggtccaagtgggactccatcaagccccttctgaagatcctgcaggagtccttcccctgctgcatccatgtggccctgatcatcaagccagacaacttctggcagaaacagaggactaattttggcagttctaaatttgaatttgagacaaatatggtctctttagaaggccttaccaaagtagttgatccttctcagctaactcctgagtttgatggctgcctggaatacaaccacgaagaatggattgaaatcagagttgcttttgaagactacattagcaatgccacccacatgctgtctcggctggaggaacttcaggacatcctagctaagaaggagctgcctcaggatttagagggggctcggaatatgatcgaggaacattctcagctgaagaagaaggtgattaaggcccccatcgaggacctggatttggagggacagaagctgcttcagaggatacagagcagtgaaagctttcccaaaaagaactcaggctcaggcaatgcggacctgcagaacctcttgcccaaggtgtccaccatgctggaccggctgcactcgacacggcagcatctgcaccagatgtggcatgtgaggaagctgaagctggaccagtgcttccagctgaggctgtttgaacaggatgctgagaagatgtttgactggatcacacacaacaaaggcctgtttctaaacagctacacagagattgggaccagccaccctcatgccatggagcttcagacgcagcacaatcactttgccatgaactgtatgaacgtgtatgtaaatataaaccgcatcatgtcggtggccaatcgtctggtggagtctggccactatgcctcgcagcagatcaggcagatcgcgagtcagctggagcaggagtggaaggcgtttgcggcagccctggatgagcggagcaccttgctggacatgtcctccattttccaccagaaggccgaaaagtatatgagcaacgtggattcatggtgtaaagcttgcggtgaggtagaccttccctcagagctgcaggacctagaagatgccattcatcaccaccagggaatatatgaacatatcactcttgcttattctgaggtcagccaagatgggaagtcgctccttgacaagctccagcggcccttgactcccggcagctccgattccctgacagcctctgccaactactccaaggccgtgcaccatgtcctggatgtcatccacgaggtgctgcaccaccagcggcagcgtgagaacatctggcaacaccgcaaggtccggctgcatcagaggctgcagctgtgtgttttccagcaggacgttcagcaggtgctagactggatcgagaaccacggagaagcatttctgagcaaacatacaggtgtggggaaatctcttcatcgggccagagcattgcagaaacgtcatgaagattttgaagaagtggcacagaacacatacaccaatgcggataaattactggaagcagcagaacagctggctcagactggggaatgtgaccccgaagagatttatcaggctgcccatcagctggaagaccggattcaagatttcgttcggcgtgttgagcagcgaaagatcctactggacatgtcagtgtcctttcacacccatgtgaaagagctgtggacgtggctggaggagctgcagaaggagctgctggacgacgtgtatgccgagtcggtggaggccgtgcaggacctcatcaagcgctttggccagcagcagcagaccaccctgcaggtgactgtcaacgtgatcaaggaaggggaggacctcatccagcagctcagggactctgccatctccagtaacaagaccccccacaacagctccatcaaccacattgagacggtgctgcagcagctggacgaggcgcagtcgcagatggaggagctcttccaggagcgcaagatcaagctggagctcttcctgcacgtgcgcatcttcgagagggacgccatcgacattatctcagacctcgagtcttggaatgatgagctttctcagcaaatgaatgacttcgacacagaagatctcacgattgcagagcagcgcctccagcaccatgcagacaaagccttgaccatgaacaacttgacttttgacgtcatccaccaagggcaagatcttctgcagtatgtcaatgaggtccaggcctctggtgtggagctgctgtgtgatagagatgtagacatggcaactcgggtccaggacctgctggagtttcttcatgaaaaacagcaggaattggatttagccgcagagcagcatcggaaacacctggagcagtgcgtgcagctgcgccacctgcaggcagaagtgaaacaggtgctgggttggatccgcaacggagagtccatgttaaatgccggacttatcacagccagctcgttacaagaggcagagcagctccagcgagagcacgagcagttccagcatgccattgagaaaacacatcagagcgcgctgcaggtgcagcagaaggcagaagccatgctacaggccaaccactacgacatggacatgatccgggactgcgccgagaaggtggcgtctcactggcaacagctcatgctcaagatggaagatcgcctcaagctcgtcaacgcctctgtcgctttctacaaaacctcagagcaggtctgcagcgtcctcgagagcctggaacaggagtacaagagagaagaagactggtgtggcggggcggataagctgggcccaaactctgagacggaccacgtgacgcccatgatcagcaagcacctggagcagaaggaggcattcctgaaggcttgcacccttgctcggaggaatgcagacgtcttcctgaaatacctgcacaggaacagcgtgaacatgccaggaatggtgacgcacatcaaagctcctgaacagcaagtgaaaaatatcttgaatgaactcttccaacgggagaacagggtattgcattactggaccatgaggaagagacggctggaccagtgtcagcagtacgtggtctttgagaggagtgccaagcaggctttggaatggatccatgacaatggcgagttctacctttccacacacacctccacgggctccagtatacagcacacccaggagctcctgaaagagcacgaggagttccagataactgcaaagcaaaccaaagagagagtgaagctattgatacagctggctgatggcttttgtgaaaaagggcatgcccatgcggcagagataaaaaaatgtgttactgctgtggataagaggtacagagatttctctctgcggatggagaagtacaggacctctttggaaaaagccctggggatttcttcagattccaacaaatcgagtaaaagtctccagctagatatcattccagccagtatccctggctcagaggtgaaacttcgagatgctgctcatgaacttaatgaagagaagcggaaatctgcccgcaggaaagagttcataatggctgagctcattcaaactgaaaaggcttatgtaagagacctccgggaatgtatggatacgtacctgtgggaaatgaccagtggcgtggaagagattccacctggcattgtaaacaaagaactcatcatcttcggaaacatgcaagaaatctacgaatttcataataacatattcctaaaggagctggaaaaatatgaacagttgccagaggatgttggacattgttttgttacttgggcagacaagtttcagatgtatgtcacatattgcaaaaataagcctgattctactcagctgatattggaacatgcagggtcctattttgacgagatacagcagcgacatggattagccaattccatttcttcctaccttattaaaccagttcagcgaataacgaagtatcagctccttttaaaagagctgctgacgtgctgtgaggaaggaaagggagagattaaagatggcctggaggtgatgctcagcgtgccgaagcgagccaatgatgccatgcacctcagcatgctggaagggtttgatgaaaacattgagtctcagggagaactcatcctacaggaatccttccaagtgtgggacccaaaaaccttaattcgaaagggtcgagaacggcatctcttcctttttgaaatgtccttagtatttagtaaagaagtgaaagattccagtgggagaagcaagtacctttataaaagcaaattgtttacctcagagttgggtgtcacagaacatgttgaaggagacccttgcaaatttgcactgtgggtggggagaacaccaacttcagataataaaattgtccttaaggcttccagcatagagaacaagcaggactggataaagcatatccgcgaagtcatccaggagcggacgatccacctgaagggagccctgaaggagcccattcacatccctaagaccgctcccgccacaagacagaagggaaggagggatggagaggatctggacagccaaggagacggcagcagccagcctgatacgatttccatcgcctcacggacgtctcagaacacgctggacagcgataagctctctggtggctgtgagctgacagtggtgatccatgacttcaccgcttgcaacagcaacgagctgaccatccgacggggccagaccgtggaagttctggagcggccgcatgacaagcctgactggtgtctggtgcggaccactgaccgctccccagcggcagaaggcctggtcccctgtggttcactgtgcatcgcccactccagaagtagcatggaaatggagggcatcttcaaccacaaagactcgctctccgtctccagcaatgacgccagtccacccgcatccgtggcttccctccagccccacatgatcggggcccagagctcgccgggccccaagcggccgggcaacaccctgcgcaagtggctcaccagccccgtgcggcggctcagcagcggcaaggccgacgggcacgtgaagaagctggcgcacaagcacaagaagagccgcgaggtccgcaagagcgccgacgccggctcgcagaaggactccgacgacagtgcggccaccccgcaggacgagacggtcgaggagagaggccggaacgagggcctgagcagcggtactctctccaaatcctcctcctcggggatgcagagctgtggagaagaggaaggcgaggagggggccgacgccgtgcccctgccgccacccatggccatccagcagcacagcctcctccagccagactcacaggatgacaaggcctcttctcggttattagtccgccccaccagctccgaaacaccgagtgcagccgagctcgtcagtgcaattgaggaactcgtgaaaagcaagatggcactggaggatcgccccagctcactccttgttgaccagggagatagtagcagcccttccttcaacccttcggataattcccttctctcttcctcctcgcccattgatgagatggaagaaaggaaatccagctctttaaagagaagacactacgttttgcaagaactagtggagacagagcgtgactatgtgcgggaccttggctatgtggttgagggctacatggcacttatgaaagaagatggtgttcctgatgacatgaaaggaaaagacaaaattgtgttcggcaacatccatcagatttacgactggcacagagacttttttttaggagagttagagaagtgccttgaagatccagaaaaactaggatccctttttgttaaacacgagagaaggttgcacatgtacatagcttattgtcaaaataaaccaaagtctgagcacattgtctcagaatacattgataccttttttgaggacttaaagcagcgtcttggccacaggttacagctcacagatctgttgatcaaaccagtgcagagaatcatgaagtatcagctgttactgaaggacttcctcaagtattccaaaaaggccagcctggatacatcagaattagagagagctgtggaagtcatgtgcatagtacccaggcggtgcaacgacatgatgaacgtggggcggctgcaaggattcgacgtaatgcggctcttgttttttaagagagctcctctgccttcatctctttcttttgtcttggattatttctctccacatagagaaagctgatccttttcacttggttttctggcttctctcactttacctcaatctgattgatattttatttcctttttttttttttttttttttttggtgcgtttggtttgcttttttgggacttgcctgtgctcaaagcccagtgtctcatggcagaaacaagcaggaccgggctttgtctcttgggcccagtactgtaagagctgagtttcctttcctcagcacttaagaccatggttagctatggatgtagtaggacctcggaggtccccactctctcatctctgggacttgatacttcctcattagtttaagatatgtttgcatgagttgctagactattcatattacatattagctattacatatcctcaagatgaattcagaaccagaatcttcttttaaaaatttgactacggagttaaggaggcaggagaagtttttattttcttgcctactgttttgctagagaattagcattgaaagttctggtgctatggttctctctgacgcacacacagaggccgttggagggcttctgaaaactcctgtgcatgcctgatgagttcctgctggcgacccagggaccacactttgagaaccactgttctagtataaaccagacatttaaaactccacttttaatctgtgactgtaattgaggcgccagaggtctatacaaatgttggcaagaattttatttagataattattctgtttagagccaagaacagtaaaagaaaaaaaaaattaaactccataaattaataaaagaaaaatacattattccataggaggaaatctaaagaaaacagcttcagataacttagaaggcaatgttttcttctccccttccttttccccctttatttcttgttttaggggaaaatcgttgcccagggtaaactgctcttgcaggacacattcttggtcacagaccaagatgcaggacttctgcctcgctgcagagagaggcgcatcttcctctttgagcagatcgtcatattcagcgaaccacttgataaaaagaagggcttctccatgccgggattcctgtttaagaacagtatcaaggtgagttgcctttgcctggaggaaaatgtggaaaatgatccctgtaaatttgctctgacatcgaggacgggtgacgtggtagagaccttcattttgcattcatctagtccaagtgtccggcaaacttggatccatgaaatcaaccaaattttagaaaaccagcgcaattttttaaatgccttgacatcgccaatcgagtaccagaggaaccacagcgggggcggcggcggcggcggcagcgggggcagcggcgggggtgggggcagcggcggcggcggggcccccagtggcggcagcggccacagtggcggccccagcagctgcggcggcgcccccagcacgagcaggagccggccctcccggatcccccagcctgtccgacaccacccccccgtgctggtctcctctgcagcctcgagccaggcagaggcagacaagatgtcaggtacgtccacccccgggccctccctgcctccccctggcgcggcccccgaggccggccccagcgcgcccagcaggcggccccccggcgcggacgccgaggggtccgagcgagaagcggagccgatccccaagatgaaggtgctggagagccccaggaaaggcgccgcgaacgcctcggggtcgagcccagacgcccccgccaaggacgcgcgcgctagcctgggcaccctgccgcttgggaagccccgggccggggccgcttcgccgctgaactcgccgctctccagcgcggtcccttctctcggcaaggagcccttcccccccagcagccccctgcagaaggggggctccttctggagctccatccccgcctcccccgccagccgacccggctccttcaccttcccgggggacagcgactccctccagcggcagacaccccgccacgcggcccctggcaaggatactgaccgcatgagcacgtgctcctcggccagcgagcagtccgtgcagtccacccagagcaacgggagtgaaagcagcagcagtagcaacatctccaccatgttggtgacacacgattacacggcagtgaaggaggatgagatcaacgtctaccaaggagaggtcgttcaaattctggccagcaaccagcagaacatgtttctggtgttccgagccgccactgaccagtgccccgcagctgagggctggattccaggctttgtcctgggccacaccagtgcagtcatcgtggagaacccggacgggactctcaagaagtcaacatcttggcacacagcactccgtttaaggaaaaaatctgagaaaaaagataaagacggcaaaagggaaggcaagttagagaacggttatcggaagtcacgggaaggactcagcaacaaggtatctgtgaagcttctcaatcccaactacatttatgacgttcccccagaattcgtcattccattgagtgaggtcacgtgtgagacaggggagaccgttgttcttagatgtcgagtctgtggccgccccaaagcctcaattacctggaagggccctgaacacaacaccttgaacaacgatggtcactacagcatctcctacagtgacctgggagaggccacgctgaagattgtgggcgtgaccacggaagatgacggcatctacacgtgcatcgctgtcaatgacatgggttcagcctcatcgtcggccagcctgagggtcctaggtccagggatggatgggatcatggtgacctggaaagacaactttgactccttctacagtgaagtggctgagcttggcaggggcagattctctgtcgttaagaaatgtgatcagaaaggaaccaagcgagcagtggccactaagtttgtgaacaagaagttgatgaagcgcgaccaggtcacccatgagcttggcatcctgcagagcctccagcaccccctgcttgtcggcctcctcgacacctttgagacccccaccagctacatcctggtcttagaaatggctgaccagggtcgcctcctggactgcgtggtgcgatggggaagcctcactgaagggaagatcagggcgcacctgggggaggttctggaagctgtccggtacctgcacaactgcaggatagcacacctggacctaaagcctgagaatatcctggtggatgagagtttagccaagccaaccatcaaactggctgactttggagatgctgttcagctcaacacgacctactacatccaccagttactggggaaccctgaattcgcagcccctgaaatcatcctcgggaaccctgtctccctgacctcggatacgtggagtgttggagtgctcacatacgtacttcttagtggcgtgtcccccttcctggatgacagtgtggaagagacctgcctgaacatttgccgcttagactttagcctccaggagcagtggctgcaggccggcaacggcagaagcacgggcgtcctcgacacgtccagactgacttccttcattgagcggcgcaaacaccagaatgatgttcgacctatccgtagcattaaaaactttctgcagagcaggcttctgcctagagtttgacctatccagaagttctttctcattctctttcacctgccaatcagctgttaatctgaattttcaagagattccaagtgagctgtgctcagcagtgcttggacacagagctgcaagctgcgctggggtggaggaccgtcacttacactctgcccaaggcagaggtcgcattgctgtatcacagtattttattcaggtttctgcaaaaaaataaaaagataacttttttaaacaaacatgaatagaattttgcaaatttaacgttttcaagatttattcaaggaaacaaaatgcctatgttcaaccactggtgttaatgaacaaagatactgtgcgtctctggggaagacgcacctaggtggcggccactcccatggccttgtctagggctcagagaccactcggctctgagcttccaggcgcctcgtctgtgtgcatctcacgcccgacgtggcttctgaaacgtgcattcaacctcaaacttttgcataaaatagaatgaatcgttttgctctgatgaaatgtaggccttacttgtatataagactgttcctgccttcggtctgtcattttcccacctgcctcccctacccaccccccacccaccacctggggcttcctctgggggtccgagggtcttcccatcacatgaagacatcaggttgggtcctgccccactgcccctccccctgttcctgccccaagccgtcaatcagattgtggagcagtacacagtcagatgaaaatactgtaaatgcactcattgggggttttttggttttacttcatatcatgtgcaatgttgtggctttaacattttatgcaactatttatgaagacctctgttgtacctgtaataaatatatagaaaaagcacatacttcgtatggtgagctttatggttttgtgtgtgtgttggggttggcgggtgggtgggtagggtcgtagccctgtgccatcggttcaaagagacttttcgtgaaatttgttggttttgaggactgtaaaagtgatttcatactctgaatataaaactggataatagggtaatgttttaaaatttattatgctattattcagaatgccaaagtattattttttttcccaaaatcagtctggacatttactactttttagactttttgacgttgaactttctgtataaaaattggctgggttttgagcttttggtaagaaataaaagccgattaagcactggccgccccgcggctggtacccaatgcccgagtcactgtggcagcattcgcactggtgtggggagtcctttcaactcaaggaggctgggtttctgggcaccctcgaagttttctggatgtctttttatctttctcgtgtgaactgcactacaaaagagaccagcccgcttcccaagccagccagacacctgggtcttgagccataaactggcgtagttaagctttgcagcttccagtgtattttatttattcttttgttgggtttttgtttgtttcttcttgtaaaattgtacagaaactttttaaaagaaattggattcgaaactggatgtgtattcgtaacctcataatttttatttgtgtattgtttcttttattatttcagttaaatttttacattattttgcatgtatatttctttgtacagagaccttacatgtttacacagtatgatgtgatgtaaatattttattttgccatcagttattttaaaaaattaaacatatttgcctgaaaaaaaaaaaaaaaaaaaaaaaaaaaaaaaaaaaaaaaaaaaaaaaaaaaaaaaaaaaaaaaaaaaagggggggggggctccttaagaaattctcatccccggggggggccgcccagtatttttgcgtcgtgccggcgctgtttttttttgatgaaacggagggtgcccccattatttgggcggcttttttttaaagacgaggagaccggcgcgggtgttttttcaaccgcctcgcttgtcggcgggggcaacatcgtgttgtgtggagcttttttggtggaggaccacccctcttctggggggggcgccaattgtgcgggaccgagttcctcgg

SEQ ID NO: 457215 - DNA, 8388 bp, Homo sapiens
catgagaaaaattattaatataaagaattcaagatagtacatgttttcttaaggttcaacaaagaacacttcctcaaagaaattgtaagcagctcagagccacactacaggttgagatatgtggcgaatattccaggtgacttttcgtcagaccaaggcaagggcatccaggtctagtgtggagggcaccgaggaacaggggagcgcacacacaccacagaagctggaagtcagacccgacagttcccacgcagtggacattctcctctgaagccattgtgtggtgtgggacaagggagcgaacatatggaaactttcaaagagagagtaagaatgtttctccgctaaggaaaagatccaatttccaaggaagacaagaaagaacttctaagatacgctttcctaaaaactccttatagttcgcatgcaagaatttacattttcagttctctggctgcttcctgtgaggaagaatgaagatatgtttttaataagtgaggagcggcattacagcacagtgatgtaaccagttggctattaggccgcattacatttctttttttttatcaagtcacatcaggaggtgctgtttggtgtgtgagtctcagggcggacctccctccagatgtacacaaagcccaagtcagggaagccattcagaacggcctgcgtggggagggcaactgtcacttcacatttcactgagtaaggaaattgcagctctggctagtgcaggcggggagagacatctggtttccagggtgcctgaagaatttccttgagctccaattagagtcagtgtggtagaatgaaatccaccgcgtctgggtattcccacttgtgaaacccaactgcagcgcgcgcgcgcgcgcgctcagacgccagcgagggagaggcgcgcgctgggccgggccgtgggctggcgccggccgctgagcaacacgctgccagtctgtgtgcctgtccctgtcgcgtcccagtctgtgtctgagtgtctgtttagctggtcgctgcttttgctgccaagcgggtggctctagctgctgtggagggagaggtaggataggggttctgcacctttagcctccagtcggctccagtcaccatgcccaacggattgaagccagtggacacgctggactcgctgtcctctgtcagttcagcctactgcagcggcgggcagccgggcacctgcaagtactggatcctcgacctagactcgctctccgtctccagcaatgacgccagtccacccgcatccgtggcttccctccagccccacatgatcggggcccagagctcgccgggccccaagcggccgggcaacaccctgcgcaagtggctcaccagccccgtgcggcggctcagcagcggcaaggccgacgggcacgtgaagaagctggcgcacaagcacaagaagagccgcgaggtccgcaagagcgccgacgccggctcgcagaaggactccgacgacagtgcggccaccccgcaggacgagacggtcgaggagagaggccggaacgagggcctgagcagcggtactctctccaaatcctcctcctcggggatgcagagctgtggagaagaggaaggcgaggagggggccgacgccgtgcccctgccgccacccatggccatccagcagcacagcctcctccagccagactcacaggatgacaaggcctcttctcggttattagtccgccccaccagctccgaaacaccgagtgcagccgagctcgtcagtgcaattgaggaactcgtgaaaagcaagatggcactggaggatcgccccagctcactccttgttgaccagggagatagtagcagcccttccttcaacccttcggataattcccttctctcttcctcctcgcccattgatgagatggaagaaaggaaatccagctctttaaagagaagacactacgttttgcaagaactagtggagacagagcgtgactatgtgcgggaccttggctatgtggttgagggctacatggcacttatgaaagaagatggtgttcctgatgacatgaaaggaaaagacaaaattgtgttcggcaacatccatcagatttacgactggcacagagacttttttttaggagagttagagaagtgccttgaagatccagaaaaactaggatccctttttgttaaacacgagagaaggttgcacatgtacatagcttattgtcaaaataaaccaaagtctgagcacattgtctcagaatacattgataccttttttgaggacttaaagcagcgtcttggccacaggttacagctcacagatctgttgatcaaaccagtgcagagaatcatgaagtatcagctgttactgaaggacttcctcaagtattccaaaaaggccagcctggatacatcagaattagagagagctgtggaagtcatgtgcatagtacccaggcggtgcaacgacatgatgaacgtggggcggctgcaaggattcgacgtaatgcggctcttgttttttaagagagctcctctgccttcatctctttcttttgtcttggattatttctctccacatagagaaagctgatccttttcacttggttttctggcttctctcactttacctcaatctgattgatattttatttcctttttttttttttttttttttttggtgcgtttggtttgcttttttgggacttgcctgtgctcaaagcccagtgtctcatggcagaaacaagcaggaccgggctttgtctcttgggcccagtactgtaagagctgagtttcctttcctcagcacttaagaccatggttagctatggatgtagtaggacctcggaggtccccactctctcatctctgggacttgatacttcctcattagtttaagatatgtttgcatgagttgctagactattcatattacatattagctattacatatcctcaagatgaattcagaaccagaatcttcttttaaaaatttgactacggagttaaggaggcaggagaagtttttattttcttgcctactgttttgctagagaattagcattgaaagttctggtgctatggttctctctgacgcacacacagaggccgttggagggcttctgaaaactcctgtgcatgcctgatgagttcctgctggcgacccagggaccacactttgagaaccactgttctagtataaaccagacatttaaaactccacttttaatctgtgactgtaattgaggcgccagaggtctatacaaatgttggcaagaattttatttagataattattctgtttagagccaagaacagtaaaagaaaaaaaaaattaaactccataaattaataaaagaaaaatacattattccataggaggaaatctaaagaaaacagcttcagataacttagaaggcaatgttttcttctccccttccttttccccctttatttcttgttttaggggaaaatcgttgcccagggtaaactgctcttgcaggacacattcttggtcacagaccaagatgcaggacttctgcctcgctgcagagagaggcgcatcttcctctttgagcagatcgtcatattcagcgaaccacttgataaaaagaagggcttctccatgccgggattcctgtttaagaacagtatcaaggtgagttgcctttgcctggaggaaaatgtggaaaatgatccctgtaaatttgctctgacatcgaggacgggtgacgtggtagagaccttcattttgcattcatctagtccaagtgtccggcaaacttggatccatgaaatcaaccaaattttagaaaaccagcgcaattttttaaatgccttgacatcgccaatcgagtaccagaggaaccacagcgggggcggcggcggcggcggcagcgggggcagcggcgggggtgggggcagcggcggcggcggggcccccagtggcggcagcggccacagtggcggccccagcagctgcggcggcgcccccagcacgagcaggagccggccctcccggatcccccagcctgtccgacaccacccccccgtgctggtctcctctgcagcctcgagccaggcagaggcagacaagatgtcaggtacgtccacccccgggccctccctgcctccccctggcgcggcccccgaggccggccccagcgcgcccagcaggcggccccccggcgcggacgccgaggggtccgagcgagaagcggagccgatccccaagatgaaggtgctggagagccccaggaaaggcgccgcgaacgcctcggggtcgagcccagacgcccccgccaaggacgcgcgcgctagcctgggcaccctgccgcttgggaagccccgggccggggccgcttcgccgctgaactcgccgctctccagcgcggtcccttctctcggcaaggagcccttcccccccagcagccccctgcagaaggggggctccttctggagctccatccccgcctcccccgccagccgacccggctccttcaccttcccgggggacagcgactccctccagcggcagacaccccgccacgcggcccctggcaaggatactgaccgcatgagcacgtgctcctcggccagcgagcagtccgtgcagtccacccagagcaacgggagtgaaagcagcagcagtagcaacatctccaccatgttggtgacacacgattacacggcagtgaaggaggatgagatcaacgtctaccaaggagaggtcgttcaaattctggccagcaaccagcagaacatgtttctggtgttccgagccgccactgaccagtgccccgcagctgagggctggattccaggctttgtcctgggccacaccagtgcagtcatcgtggagaacccggacgggactctcaagaagtcaacatcttggcacacagcactccgtttaaggaaaaaatctgagaaaaaagataaagacggcaaaagggaaggcaagttagagaacggttatcggaagtcacgggaaggactcagcaacaaggtatctgtgaagcttctcaatcccaactacatttatgacgttcccccagaattcgtcattccattgagtgaggtcacgtgtgagacaggggagaccgttgttcttagatgtcgagtctgtggccgccccaaagcctcaattacctggaagggccctgaacacaacaccttgaacaacgatggtcactacagcatctcctacagtgacctgggagaggccacgctgaagattgtgggcgtgaccacggaagatgacggcatctacacgtgcatcgctgtcaatgacatgggttcagcctcatcgtcggccagcctgagggtcctaggtccagggatggatgggatcatggtgacctggaaagacaactttgactccttctacagtgaagtggctgagcttggcaggggcagattctctgtcgttaagaaatgtgatcagaaaggaaccaagcgagcagtggccactaagtttgtgaacaagaagttgatgaagcgcgaccaggtcacccatgagcttggcatcctgcagagcctccagcaccccctgcttgtcggcctcctcgacacctttgagacccccaccagctacatcctggtcttagaaatggctgaccagggtcgcctcctggactgcgtggtgcgatggggaagcctcactgaagggaagatcagggcgcacctgggggaggttctggaagctgtccggtacctgcacaactgcaggatagcacacctggacctaaagcctgagaatatcctggtggatgagagtttagccaagccaaccatcaaactggctgactttggagatgctgttcagctcaacacgacctactacatccaccagttactggggaaccctgaattcgcagcccctgaaatcatcctcgggaaccctgtctccctgacctcggatacgtggagtgttggagtgctcacatacgtacttcttagtggcgtgtcccccttcctggatgacagtgtggaagagacctgcctgaacatttgccgcttagactttagcttcccagatgactactttaaaggagtgagccagaaggccaaggagttcgtgtgcttcctcctgcaggaggaccccgccaagcgtccctcggctgcgctggccctccaggagcagtggctgcaggccggcaacggcagaagcacgggcgtcctcgacacgtccagactgacttccttcattgagcggcgcaaacaccagaatgatgttcgacctatccgtagcattaaaaactttctgcagagcaggcttctgcctagagtttgacctatccagaagttctttctcattctctttcacctgccaatcagctgttaatctgaattttcaagagaaaacaagcaaacataactgatcagctgccggtatgttcatcgtgtgaaattgcattccaagtgagctgtgctcagcagtgcttggacacagagctgcaagctgcgctggggtggaggaccgtcacttacactctgcccaaggcagaggtcgcattgctgtatcacagtattttattcaggtttctgcaaaaaaataaaaagataacttttttaaacaaacatgaatagaattttgcaaatttaacgttttcaagatttattcaaggaaacaaaatgcctatgttcaaccactggtgttaatgaacaaagatactgtgcgtctctggggaagacgcacctaggtggcggccactcccatggccttgtctagggctcagagaccactcggctctgagcttccaggcgcctcgtctgtgtgcatctcacgcccgacgtggcttctgaaacgtgcattcaacctcaaacttttgcataaaatagaatgaatcgttttgctctgatgaaatgtaggccttacttgtatataagactgttcctgccttcggtctgtcattttcccacctgcctcccctacccaccccccacccaccacctggggcttcctctgggggtccgagggtcttcccatcacatgaagacatcaggttgggtcctgccccactgcccctccccctgttcctgccccaagccgtcaatcagattgtggagcagtacacagtcagatgaaaatactgtaaatgcactcattgggggttttttggttttacttcatatcatgtgcaatgttgtggctttaacattttatgcaactatttatgaagacctctgttgtacctgtaataaatatatagaaaaagcacatacttcgtatggtgagctttatggttttgtgtgtgtgttggggttggcgggtgggtgggtagggtcgtagccctgtgccatcggttcaaagagacttttcgtgaaatttgttggttttgaggactgtaaaagtgatttcatactctgaatataaaactggataatagggtaatgttttaaaatttattatgctattattcagaatgccaaagtattattttttttcccaaaatcagtctggacatttactactttttagactttttgacgttgaactttctgtataaaaattggctgggttttgagcttttggtaagaaataaaagccgattaagcactggccgccccgcggctggtacccaatgcccgagtcactgtggcagcattcgcactggtgtggggagtcctttcaactcaaggaggctgggtttctgggcaccctcgaagttttctggatgtctttttatctttctcgtgtgaactgcactacaaaagagaccagcccgcttcccaagccagccagacacctgggtcttgagccataaactggcgtagttaagctttgcagcttccagtgtattttatttattcttttgttgggtttttgtttgtttcttcttgtaaaattgtacagaaactttttaaaagaaattggattcgaaactggatgtgtattcgtaacctcataatttttatttgtgtattgtttcttttattatttcagttaaatttttacattattttgcatgtatatttctttgtacagagaccttacatgtttacacagtatgatgtgatgtaaatattttattttgccatcagttattttaaaaaattaaacatatttgcctgaaaaaaaaaaaaaaaaaaaaaaaaaaaaaaaaaaaaaaaaaaaaaaaaaaaaaaaaaaaaaaaaaaaagggggggggggctccttaagaaattctcatccccggggggggccgcccagtatttttgcgtcgtgccggcgctgtttttttttgatgaaacggagggtgcccccattatttgggcggcttttttttaaagacgaggagaccggcgcgggtgttttttcaaccgcctcgcttgtcggcgggggcaacatcgtgttgtgtggagcttttttggtggaggaccacccctcttctggggggggcgccaattgtgcgggaccgagttcctcgg

SEQ ID NO: 457216 - DNA, 6183 bp, Homo sapiens
cacgcgtccgcggacgcgtggggtctcagaatacattgataccttttttgaggacttaaagcagcgtcttggccacaggttacagctcacagatctgttgatcaaaccagtgcagagaatcatgaagtatcagctgttactgaaggacttcctcaagtattccaaaaaggccagcctggatacatcagaattagagagagctgtggaagtcatgtgcatagtacccaggcggtgcaacgacatgatgaacgtggggcggctgcaaggattcgacgtaatgcggctcttgttttttaagagagctcctctgccttcatctctttcttttgtcttggattatttctctccacatagagaaagctgatccttttcacttggttttctggcttctctcactttacctcaatctgattgatattttatttcctttttttttttttttttttttttggtgcgtttggtttgcttttttgggacttgcctgtgctcaaagcccagtgtctcatggcagaaacaagcaggaccgggctttgtctcttgggcccagtactgtaagagctgagtttcctttcctcagcacttaagaccatggttagctatggatgtagtaggacctcggaggtccccactctctcatctctgggacttgatacttcctcattagtttaagatatgtttgcatgagttgctagactattcatattacatattagctattacatatcctcaagatgaattcagaaccagaatcttcttttaaaaatttgactacggagttaaggaggcaggagaagtttttattttcttgcctactgttttgctagagaattagcattgaaagttctggtgctatggttctctctgacgcacacacagaggccgttggagggcttctgaaaactcctgtgcatgcctgatgagttcctgctggcgacccagggaccacactttgagaaccactgttctagtataaaccagacatttaaaactccacttttaatctgtgactgtaattgaggcgccagaggtctatacaaatgttggcaagaattttatttagataattattctgtttagagccaagaacagtaaaagaaaaaaaaaattaaactccataaattaataaaagaaaaatacattattccataggaggaaatctaaagaaaacagcttcagataacttagaaggcaatgttttcttctccccttccttttccccctttatttcttgttttaggggaaaatcgttgcccagggtaaactgctcttgcaggacacattcttggtcacagaccaagatgcaggacttctgcctcgctgcagagagaggcgcatcttcctctttgagcagatcgtcatattcagcgaaccacttgataaaaagaagggcttctccatgccgggattcctgtttaagaacagtatcaaggtgagttgcctttgcctggaggaaaatgtggaaaatgatccctgtaaatttgctctgacatcgaggacgggtgacgtggtagagaccttcattttgcattcatctagtccaagtgtccggcaaacttggatccatgaaatcaaccaaattttagaaaaccagcgcaattttttaaatgccttgacatcgccaatcgagtaccagaggaaccacagcgggggcggcggcggcggcggcagcgggggcagcggcgggggtgggggcagcggcggcggcggggcccccagtggcggcagcggccacagtggcggccccagcagctgcggcggcgcccccagcacgagcaggagccggccctcccggatcccccagcctgtccgacaccacccccccgtgctggtctcctctgcagcctcgagccaggcagaggcagacaagatgtcaggtacgtccacccccgggccctccctgcctccccctggcgcggcccccgaggccggccccagcgcgcccagcaggcggccccccggcgcggacgccgaggggtccgagcgagaagcggagccgatccccaagatgaaggtgctggagagccccaggaaaggcgccgcgaacgcctcggggtcgagcccagacgcccccgccaaggacgcgcgcgctagcctgggcaccctgccgcttgggaagccccgggccggggccgcttcgccgctgaactcgccgctctccagcgcggtcccttctctcggcaaggagcccttcccccccagcagccccctgcagaaggggggctccttctggagctccatccccgcctcccccgccagccgacccggctccttcaccttcccgggggacagcgactccctccagcggcagacaccccgccacgcggcccctggcaaggatactgaccgcatgagcacgtgctcctcggccagcgagcagtccgtgcagtccacccagagcaacgggagtgaaagcagcagcagtagcaacatctccaccatgttggtgacacacgattacacggcagtgaaggaggatgagatcaacgtctaccaaggagaggtcgttcaaattctggccagcaaccagcagaacatgtttctggtgttccgagccgccactgaccagtgccccgcagctgagggctggattccaggctttgtcctgggccacaccagtgcagtcatcgtggagaacccggacgggactctcaagaagtcaacatcttggcacacagcactccgtttaaggaaaaaatctgagaaaaaagataaagacggcaaaagggaaggcaagttagagaacggttatcggaagtcacgggaaggactcagcaacaaggtatctgtgaagcttctcaatcccaactacatttatgacgttcccccagaattcgtcattccattgagtgaggtcacgtgtgagacaggggagaccgttgttcttagatgtcgagtctgtggccgccccaaagcctcaattacctggaagggccctgaacacaacaccttgaacaacgatggtcactacagcatctcctacagtgacctgggagaggccacgctgaagattgtgggcgtgaccacggaagatgacggcatctacacgtgcatcgctgtcaatgacatgggttcagcctcatcgtcggccagcctgagggtcctaggtccagggatggatgggatcatggtgacctggaaagacaactttgactccttctacagtgaagtggctgagcttggcaggggcagattctctgtcgttaagaaatgtgatcagaaaggaaccaagcgagcagtggccactaagtttgtgaacaagaagttgatgaagcgcgaccaggtcacccatgagcttggcatcctgcagagcctccagcaccccctgcttgtcggcctcctcgacacctttgagacccccaccagctacatcctggtcttagaaatggctgaccagggtcgcctcctggactgcgtggtgcgatggggaagcctcactgaagggaagatcagggcgcacctgggggaggttctggaagctgtccggtacctgcacaactgcaggatagcacacctggacctaaagcctgagaatatcctggtggatgagagtttagccaagccaaccatcaaactggctgactttggagatgctgttcagctcaacacgacctactacatccaccagttactggggaaccctgaattcgcagcccctgaaatcatcctcgggaaccctgtctccctgacctcggatacgtggagtgttggagtgctcacatacgtacttcttagtggcgtgtcccccttcctggatgacagtgtggaagagacctgcctgaacatttgccgcttagactttagcttcccagatgactactttaaaggagtgagccagaaggccaaggagttcgtgtgcttcctcctgcaggaggaccccgccaagcgtccctcggctgcgctggccctccaggagcagtggctgcaggccggcaacggcagaagcacgggcgtcctcgacacgtccagactgacttccttcattgagcggcgcaaacaccagaatgatgttcgacctatccgtagcattaaaaactttctgcagagcaggcttctgcctagagtttgacctatccagaagttctttctcattctctttcacctgccaatcagctgttaatctgaattttcaagagaaaacaagcaaacataactgatcagctgccggtatgttcatcgtgtgaaattgcattccaagtgagctgtgctcagcagtgcttggacacagagctgcaagctgcgctggggtggaggaccgtcacttacactctgcccaaggcagaggtcgcattgctgtatcacagtattttattcaggtttctgcaaaaaaataaaaagataacttttttaaacaaacatgaatagaattttgcaaatttaacgttttcaagatttattcaaggaaacaaaatgcctatgttcaaccactggtgttaatgaacaaagatactgtgcgtctctggggaagacgcacctaggtggcggccactcccatggccttgtctagggctcagagaccactcggctctgagcttccaggcgcctcgtctgtgtgcatctcacgcccgacgtggcttctgaaacgtgcattcaacctcaaacttttgcataaaatagaatgaatcgttttgctctgatgaaatgtaggccttacttgtatataagactgttcctgccttcggtctgtcattttcccacctgcctcccctacccaccccccacccaccacctggggcttcctctgggggtccgagggtcttcccatcacatgaagacatcaggttgggtcctgccccactgcccctccccctgttcctgccccaagccgtcaatcagattgtggagcagtacacagtcagatgaaaatactgtaaatgcactcattgggggttttttggttttacttcatatcatgtgcaatgttgtggctttaacattttatgcaactatttatgaagacctctgttgtacctgtaataaatatatagaaaaagcacatacttcgtatggtgagctttatggttttgtgtgtgtgttggggttggcgggtgggtgggtagggtcgtagccctgtgccatcggttcaaagagacttttcgtgaaatttgttggttttgaggactgtaaaagtgatttcatactctgaatataaaactggataatagggtaatgttttaaaatttattatgctattattcagaatgccaaagtattattttttttcccaaaatcagtctggacatttactactttttagactttttgacgttgaactttctgtataaaaattggctgggttttgagcttttggtaagaaataaaagccgattaagcactggccgccccgcggctggtacccaatgcccgagtcactgtggcagcattcgcactggtgtggggagtcctttcaactcaaggaggctgggtttctgggcaccctcgaagttttctggatgtctttttatctttctcgtgtgaactgcactacaaaagagaccagcccgcttcccaagccagccagacacctgggtcttgagccataaactggcgtagttaagctttgcagcttccagtgtattttatttattcttttgttgggtttttgtttgtttcttcttgtaaaattgtacagaaactttttaaaagaaattggattcgaaactggatgtgtattcgtaacctcataatttttatttgtgtattgtttcttttattatttcagttaaatttttacattattttgcatgtatatttctttgtacagagaccttacatgtttacacagtatgatgtgatgtaaatattttattttgccatcagttattttaaaaaattaaacatatttgcctgaaaaaaaaaaaaaaaaaaaaaaaaaaaaaaaaaaaaaaaaaaaaaaaaaaaaaaaaaaaaaaaaaaaagggggggggggctccttaagaaattctcatccccggggggggccgcccagtatttttgcgtcgtgccggcgctgtttttttttgatgaaacggagggtgcccccattatttgggcggcttttttttaaagacgaggagaccggcgcgggtgttttttcaaccgcctcgcttgtcggcgggggcaacatcgtgttgtgtggagcttttttggtggaggaccacccctcttctggggggggcgccaattgtgcgggaccgagttcctcgg

SEQ ID NO: 457217 - DNA, 4465 bp, Homo sapiens
tcccgcccccctgcctctgtcccgccaactctaaacgccaccgcggctgttctcactaactcggctgcccagcgctctccgccgcccgttgcggcctctacctgggaccaggctaaccctcctgcgggccggcccacggcgctactaactactccttgctttgttcgtgtcttctaataagagcaagccgatcattaaccttctcaacgcagcgtcttttggtttcttccatttccaaccagcagaatatcttcttggaactttcttttttaacctctgccttcctcacgcacctattttttggagggttccttttccctgctctctacctcctgtttaaattgaaacctgtacactttaagctttttgctcatcgcttggttttgctcttttatgccttaaattatctttgcggcatttttgactcatctgctggggaagaccattccctcaagaaaacttccaacagcaactcaaagcaaactaagatgaaaaaatggggggaaagaatctgtccactgggaacgctttacgtcaccgtgttgctctggaagacagagactgctctgggcacctggcgaggcggctctgcagtgcaggctggggccggtccctgcggcctgctgggctctggcctcgtttggcccatcactcatgctgccgtctcaagcacaagggttgctgtgagtgaaagcagcagcagtagcaacatctccaccatgttggtgacacacgattacacggcagtgaaggaggatgagatcaacgtctaccaaggagaggtcgttcaaattctggccagcaaccagcagaacatgtttctggtgttccgagccgccactgaccagtgccccgcagctgagggctggattccaggctttgtcctgggccacaccagtgcagtcatcgtggagaacccggacgggactctcaagaagtcaacatcttggcacacagcactccgtttaaggaaaaaatctgagaaaaaagataaagacggcaaaagggaaggcaagttagagaacggttatcggaagtcacgggaaggactcagcaacaaggtatctgtgaagcttctcaatcccaactacatttatgacgttcccccagaattcgtcattccattgagtgaggtcacgtgtgagacaggggagaccgttgttcttagatgtcgagtctgtggccgccccaaagcctcaattacctggaagggccctgaacacaacaccttgaacaacgatggtcactacagcatctcctacagtgacctgggagaggccacgctgaagattgtgggcgtgaccacggaagatgacggcatctacacgtgcatcgctgtcaatgacatgggttcagcctcatcgtcggccagcctgagggtcctaggtccagggatggatgggatcatggtgacctggaaagacaactttgactccttctacagtgaagtggctgagcttggcaggggcagattctctgtcgttaagaaatgtgatcagaaaggaaccaagcgagcagtggccactaagtttgtgaacaagaagttgatgaagcgcgaccaggtcacccatgagcttggcatcctgcagagcctccagcaccccctgcttgtcggcctcctcgacacctttgagacccccaccagctacatcctggtcttagaaatggctgaccagggtcgcctcctggactgcgtggtgcgatggggaagcctcactgaagggaagatcagggcgcacctgggggaggttctggaagctgtccggtacctgcacaactgcaggatagcacacctggacctaaagcctgagaatatcctggtggatgagagtttagccaagccaaccatcaaactggctgactttggagatgctgttcagctcaacacgacctactacatccaccagttactggggaaccctgaattcgcagcccctgaaatcatcctcgggaaccctgtctccctgacctcggatacgtggagtgttggagtgctcacatacgtacttcttagtggcgtgtcccccttcctggatgacagtgtggaagagacctgcctgaacatttgccgcttagactttagcttcccagatgactactttaaaggagtgagccagaaggccaaggagttcgtgtgcttcctcctgcaggaggaccccgccaagcgtccctcggctgcgctggccctccaggagcagtggctgcaggccggcaacggcagaagcacgggcgtcctcgacacgtccagactgacttccttcattgagcggcgcaaacaccagaatgatgttcgacctatccgtagcattaaaaactttctgcagagcaggcttctgcctagagtttgacctatccagaagttctttctcattctctttcacctgccaatcagctgttaatctgaattttcaagagaaaacaagcaaacataactgatcagctgccggtatgttcatcgtgtgaaattgcattccaagtgagctgtgctcagcagtgcttggacacagagctgcaagctgcgctggggtggaggaccgtcacttacactctgcccaaggcagaggtcgcattgctgtatcacagtattttattcaggtttctgcaaaaaaataaaaagataacttttttaaacaaacatgaatagaattttgcaaatttaacgttttcaagatttattcaaggaaacaaaatgcctatgttcaaccactggtgttaatgaacaaagatactgtgcgtctctggggaagacgcacctaggtggcggccactcccatggccttgtctagggctcagagaccactcggctctgagcttccaggcgcctcgtctgtgtgcatctcacgcccgacgtggcttctgaaacgtgcattcaacctcaaacttttgcataaaatagaatgaatcgttttgctctgatgaaatgtaggccttacttgtatataagactgttcctgccttcggtctgtcattttcccacctgcctcccctacccaccccccacccaccacctggggcttcctctgggggtccgagggtcttcccatcacatgaagacatcaggttgggtcctgccccactgcccctccccctgttcctgccccaagccgtcaatcagattgtggagcagtacacagtcagatgaaaatactgtaaatgcactcattgggggttttttggttttacttcatatcatgtgcaatgttgtggctttaacattttatgcaactatttatgaagacctctgttgtacctgtaataaatatatagaaaaagcacatacttcgtatggtgagctttatggttttgtgtgtgtgttggggttggcgggtgggtgggtagggtcgtagccctgtgccatcggttcaaagagacttttcgtgaaatttgttggttttgaggactgtaaaagtgatttcatactctgaatataaaactggataatagggtaatgttttaaaatttattatgctattattcagaatgccaaagtattattttttttcccaaaatcagtctggacatttactactttttagactttttgacgttgaactttctgtataaaaattggctgggttttgagcttttggtaagaaataaaagccgattaagcactggccgccccgcggctggtacccaatgcccgagtcactgtggcagcattcgcactggtgtggggagtcctttcaactcaaggaggctgggtttctgggcaccctcgaagttttctggatgtctttttatctttctcgtgtgaactgcactacaaaagagaccagcccgcttcccaagccagccagacacctgggtcttgagccataaactggcgtagttaagctttgcagcttccagtgtattttatttattcttttgttgggtttttgtttgtttcttcttgtaaaattgtacagaaactttttaaaagaaattggattcgaaactggatgtgtattcgtaacctcataatttttatttgtgtattgtttcttttattatttcagttaaatttttacattattttgcatgtatatttctttgtacagagaccttacatgtttacacagtatgatgtgatgtaaatattttattttgccatcagttattttaaaaaattaaacatatttgcctgaaaaaaaaaaaaaaaaaaaaaaaaaaaaaaaaaaaaaaaaaaaaaaaaaaaaaaaaaaaaaaaaaaaagggggggggggctccttaagaaattctcatccccggggggggccgcccagtatttttgcgtcgtgccggcgctgtttttttttgatgaaacggagggtgcccccattatttgggcggcttttttttaaagacgaggagaccggcgcgggtgttttttcaaccgcctcgcttgtcggcgggggcaacatcgtgttgtgtggagcttttttggtggaggaccacccctcttctggggggggcgccaattgtgcgggaccgagttcctcgg

SEQ ID NO: 457218 - DNA, 11772 bp, Homo sapiens
cgcggccgcgggcgccgccgcagccatgagcggcagcagcggcggagccgccgcccccgccgcgtcctccggccccgccgcggcggccagcgcggctggctcgggctgcgggggcggtgccggcgagggggcagaggaggcggccaaggacctggccgacatcgcggccttcttccgatccgggtttcgaaaaaacgatgaaatgaaagctatggatgttttaccaattttgaaggaaaaagttgcatacctttcaggtgggagagataaacgtggaggtcccattttaacgtttccggcccgcagcaatcatgacagaatacgacaggaggatctcaggagactcatttcctatctagcctgtattcccagcgaggaggtctgcaagcgtggcttcacggtgatcgtggacatgcgtgggtccaagtgggactccatcaagccccttctgaagatcctgcaggagtccttcccctgctgcatccatgtggccctgatcatcaagccagacaacttctggcagaaacagaggactaattttggcagttctaaatttgaatttgagacaaatatggtctctttagaaggccttaccaaagtagttgatccttctcagctaactcctgagtttgatggctgcctggaatacaaccacgaagaatggattgaaatcagagttgcttttgaagactacattagcaatgccacccacatgctgtctcggctggaggaacttcaggacatcctagctaagaaggagctgcctcaggatttagagggggctcggaatatgatcgaggaacattctcagctgaagaagaaggtgattaaggcccccatcgaggacctggatttggagggacagaagctgcttcagaggatacagagcagtgaaagctttcccaaaaagaactcaggctcaggcaatgcggacctgcagaacctcttgcccaaggtgtccaccatgctggaccggctgcactcgacacggcagcatctgcaccagatgtggcatgtgaggaagctgaagctggaccagtgcttccagctgaggctgtttgaacaggatgctgagaagatgtttgactggatcacacacaacaaaggcctgtttctaaacagctacacagagattgggaccagccaccctcatgccatggagcttcagacgcagcacaatcactttgccatgaactgtatgaacgtgtatgtaaatataaaccgcatcatgtcggtggccaatcgtctggtggagtctggccactatgcctcgcagcagatcaggcagatcgcgagtcagctggagcaggagtggaaggcgtttgcggcagccctggatgagcggagcaccttgctggacatgtcctccattttccaccagaaggccgaaaagtatatgagcaacgtggattcatggtgtaaagcttgcggtgaggtagaccttccctcagagctgcaggacctagaagatgccattcatcaccaccagggaatatatgaacatatcactcttgcttattctgaggtcagccaagatgggaagtcgctccttgacaagctccagcggcccttgactcccggcagctccgattccctgacagcctctgccaactactccaaggccgtgcaccatgtcctggatgtcatccacgaggtgctgcaccaccagcggcagcgtgagaacatctggcaacaccgcaaggtccggctgcatcagaggctgcagctgtgtgttttccagcaggacgttcagcaggtgctagactggatcgagaaccacggagaagcatttctgagcaaacatacaggtgtggggaaatctcttcatcgggccagagcattgcagaaacgtcatgaagattttgaagaagtggcacagaacacatacaccaatgcggataaattactggaagcagcagaacagctggctcagactggggaatgtgaccccgaagagatttatcaggctgcccatcagctggaagaccggattcaagatttcgttcggcgtgttgagcagcgaaagatcctactggacatgtcagtgtcctttcacacccatgtgaaagagctgtggacgtggctggaggagctgcagaaggagctgctggacgacgtgtatgccgagtcggtggaggccgtgcaggacctcatcaagcgctttggccagcagcagcagaccaccctgcaggtgactgtcaacgtgatcaaggaaggggaggacctcatccagcagctcagggactctgccatctccagtaacaagaccccccacaacagctccatcaaccacattgagacggtgctgcagcagctggacgaggcgcagtcgcagatggaggagctcttccaggagcgcaagatcaagctggagctcttcctgcacgtgcgcatcttcgagagggacgccatcgacattatctcagacctcgagtcttggaatgatgagctttctcagcaaatgaatgacttcgacacagaagatctcacgattgcagagcagcgcctccagcaccatgcagacaaagccttgaccatgaacaacttgacttttgacgtcatccaccaagggcaagatcttctgcagtatgtcaatgaggtccaggcctctggtgtggagctgctgtgtgatagagatgtagacatggcaactcgggtccaggacctgctggagtttcttcatgaaaaacagcaggaattggatttagccgcagagcagcatcggaaacacctggagcagtgcgtgcagctgcgccacctgcaggcagaagtgaaacaggtgctgggttggatccgcaacggagagtccatgttaaatgccggacttatcacagccagctcgttacaagaggcagagcagctccagcgagagcacgagcagttccagcatgccattgagaaaacacatcagagcgcgctgcaggtgcagcagaaggcagaagccatgctacaggccaaccactacgacatggacatgatccgggactgcgccgagaaggtggcgtctcactggcaacagctcatgctcaagatggaagatcgcctcaagctcgtcaacgcctctgtcgctttctacaaaacctcagagcaggtctgcagcgtcctcgagagcctggaacaggagtacaagagagaagaagactggtgtggcggggcggataagctgggcccaaactctgagacggaccacgtgacgcccatgatcagcaagcacctggagcagaaggaggcattcctgaaggcttgcacccttgctcggaggaatgcagacgtcttcctgaaatacctgcacaggaacagcgtgaacatgccaggaatggtgacgcacatcaaagctcctgaacagcaagtgaaaaatatcttgaatgaactcttccaacgggagaacagggtattgcattactggaccatgaggaagagacggctggaccagtgtcagcagtacgtggtctttgagaggagtgccaagcaggctttggaatggatccatgacaatggcgagttctacctttccacacacacctccacgggctccagtatacagcacacccaggagctcctgaaagagcacgaggagttccagataactgcaaagcaaaccaaagagagagtgaagctattgatacagctggctgatggcttttgtgaaaaagggcatgcccatgcggcagagataaaaaaatgtgttactgctgtggataagaggtacagagatttctctctgcggatggagaagtacaggacctctttggaaaaagccctggggatttcttcagattccaacaaatcgagtaaaagtctccagctagatatcattccagccagtatccctggctcagaggtgaaacttcgagatgctgctcatgaacttaatgaagagaagcggaaatctgcccgcaggaaagagttcataatggctgagctcattcaaactgaaaaggcttatgtaagagacctccgggaatgtatggatacgtacctgtgggaaatgaccagtggcgtggaagagattccacctggcattgtaaacaaagaactcatcatcttcggaaacatgcaagaaatctacgaatttcataataacatattcctaaaggagctggaaaaatatgaacagttgccagaggatgttggacattgttttgttacttgggcagacaagtttcagatgtatgtcacatattgcaaaaataagcctgattctactcagctgatattggaacatgcagggtcctattttgacgagatacagcagcgacatggattagccaattccatttcttcctaccttattaaaccagttcagcgaataacgaagtatcagctccttttaaaagagctgctgacgtgctgtgaggaaggaaagggagagattaaagatggcctggaggtgatgctcagcgtgccgaagcgagccaatgatgccatgcacctcagcatgctggaagggtttgatgaaaacattgagtctcagggagaactcatcctacaggaatccttccaagtgtgggacccaaaaaccttaattcgaaagggtcgagaacggcatctcttcctttttgaaatgtccttagtatttagtaaagaagtgaaagattccagtgggagaagcaagtacctttataaaagcaaattgtttacctcagagttgggtgtcacagaacatgttgaaggagacccttgcaaatttgcactgtgggtggggagaacaccaacttcagataataaaattgtccttaaggcttccagcatagagaacaagcaggactggataaagcatatccgcgaagtcatccaggagcggacgatccacctgaagggagccctgaaggagcccattcacatccctaagaccgctcccgccacaagacagaagggaaggagggatggagaggatctggacagccaaggagacggcagcagccagcctgatacgatttccatcgcctcacggacgtctcagaacacgctggacagcgataagctctctggtggctgtgagctgacagtggtgatccatgacttcaccgcttgcaacagcaacgagctgaccatccgacggggccagaccgtggaagttctggagcggccgcatgacaagcctgactggtgtctggtgcggaccactgaccgctccccagcggcagaaggcctggtcccctgtggttcactgtgcatcgcccactccagaagtagcatggaaatggagggcatcttcaaccacaaagactcgctctccgtctccagcaatgacgccagtccacccgcatccgtggcttccctccagccccacatgatcggggcccagagctcgccgggccccaagcggccgggcaacaccctgcgcaagtggctcaccagccccgtgcggcggctcagcagcggcaaggccgacgggcacgtgaagaagctggcgcacaagcacaagaagagccgcgaggtccgcaagagcgccgacgccggctcgcagaaggactccgacgacagtgcggccaccccgcaggacgagacggtcgaggagagaggccggaacgagggcctgagcagcggtactctctccaaatcctcctcctcggggatgcagagctgtggagaagaggaaggcgaggagggggccgacgccgtgcccctgccgccacccatggccatccagcagcacagcctcctccagccagactcacaggatgacaaggcctcttctcggttattagtccgccccaccagctccgaaacaccgagtgcagccgagctcgtcagtgcaattgaggaactcgtgaaaagcaagatggcactggaggatcgccccagctcactccttgttgaccagggagatagtagcagcccttccttcaacccttcggataattcccttctctcttcctcctcgcccattgatgagatggaagaaaggaaatccagctctttaaagagaagacactacgttttgcaagaactagtggagacagagcgtgactatgtgcgggaccttggctatgtggttgagggctacatggcacttatgaaagaagatggtgttcctgatgacatgaaaggaaaagacaaaattgtgttcggcaacatccatcagatttacgactggcacagagacttttttttaggagagttagagaagtgccttgaagatccagaaaaactaggatccctttttgttaaacacgagagaaggttgcacatgtacatagcttattgtcaaaataaaccaaagtctgagcacattgtctcagaatacattgataccttttttgaggacttaaagcagcgtcttggccacaggttacagctcacagatctgttgatcaaaccagtgcagagaatcatgaagtatcagctgttactgaaggacttcctcaagtattccaaaaaggccagcctggatacatcagaattagagagagctgtggaagtcatgtgcatagtacccaggcggtgcaacgacatgatgaacgtggggcggctgcaaggattcgacgtaatgcggctcttgttttttaagagagctcctctgccttcatctctttcttttgtcttggattatttctctccacatagagaaagctgatccttttcacttggttttctggcttctctcactttacctcaatctgattgatattttatttcctttttttttttttttttttttttggtgcgtttggtttgcttttttgggacttgcctgtgctcaaagcccagtgtctcatggcagaaacaagcaggaccgggctttgtctcttgggcccagtactgtaagagctgagtttcctttcctcagcacttaagaccatggttagctatggatgtagtaggacctcggaggtccccactctctcatctctgggacttgatacttcctcattagtttaagatatgtttgcatgagttgctagactattcatattacatattagctattacatatcctcaagatgaattcagaaccagaatcttcttttaaaaatttgactacggagttaaggaggcaggagaagtttttattttcttgcctactgttttgctagagaattagcattgaaagttctggtgctatggttctctctgacgcacacacagaggccgttggagggcttctgaaaactcctgtgcatgcctgatgagttcctgctggcgacccagggaccacactttgagaaccactgttctagtataaaccagacatttaaaactccacttttaatctgtgactgtaattgaggcgccagaggtctatacaaatgttggcaagaattttatttagataattattctgtttagagccaagaacagtaaaagaaaaaaaaaattaaactccataaattaataaaagaaaaatacattattccataggaggaaatctaaagaaaacagcttcagataacttagaaggcaatgttttcttctccccttccttttccccctttatttcttgttttaggggaaaatcgttgcccagggtaaactgctcttgcaggacacattcttggtcacagaccaagatgcaggacttctgcctcgctgcagagagaggcgcatcttcctctttgagcagatcgtcatattcagcgaaccacttgataaaaagaagggcttctccatgccgggattcctgtttaagaacagtatcaaggtgagttgcctttgcctggaggaaaatgtggaaaatgatccctgtaaatttgctctgacatcgaggacgggtgacgtggtagagaccttcattttgcattcatctagtccaagtgtccggcaaacttggatccatgaaatcaaccaaattttagaaaaccagcgcaattttttaaatgccttgacatcgccaatcgagtaccagaggaaccacagcgggggcggcggcggcggcggcagcgggggcagcggcgggggtgggggcagcggcggcggcggggcccccagtggcggcagcggccacagtggcggccccagcagctgcggcggcgcccccagcacgagcaggagccggccctcccggatcccccagcctgtccgacaccacccccccgtgctggtctcctctgcagcctcgagccaggcagaggcagacaagatgtcaggtacgtccacccccgggccctccctgcctccccctggcgcggcccccgaggccggccccagcgcgcccagcaggcggccccccggcgcggacgccgaggggtccgagcgagaagcggagccgatccccaagatgaaggtgctggagagccccaggaaaggcgccgcgaacgcctcggggtcgagcccagacgcccccgccaaggacgcgcgcgctagcctgggcaccctgccgcttgggaagccccgggccggggccgcttcgccgctgaactcgccgctctccagcgcggtcccttctctcggcaaggagcccttcccccccagcagccccctgcagaaggggggctccttctggagctccatccccgcctcccccgccagccgacccggctccttcaccttcccgggggacagcgactccctccagcggcagacaccccgccacgcggcccctggcaaggatactgaccgcatgagcacgtgctcctcggccagcgagcagtccgtgcagtccacccagagcaacgggagtgaaagcagcagcagtagcaacatctccaccatgttggtgacacacgattacacggcagtgaaggaggatgagatcaacgtctaccaaggagaggtcgttcaaattctggccagcaaccagcagaacatgtttctggtgttccgagccgccactgaccagtgccccgcagctgagggctggattccaggctttgtcctgggccacaccagtgcagtcatcgtggagaacccggacgggactctcaagaagtcaacatcttggcacacagcactccgtttaaggaaaaaatctgagaaaaaagataaagacggcaaaagggaaggcaagttagagaacggttatcggaagtcacgggaaggactcagcaacaaggtatctgtgaaggtgtgttcgggggtcttcaggagtccgtgtcatcccagcatgagagaaaggatcagggagggcagagactctgcagacctgaagctgggcttgcttatgacctccctcccacccaccagccccgtgccctgcgtgtcctgtagggtcttgttaggggcactatgctggccagcacagggatgggtgcgtcctacaaggaaccaggtagacccctgcacacttccgcaggtgcacatgtggcttctaaagaatatggttaggtttgcaaatgaagcacagagactaggttctcagaagcagcgaaggtgcagagaagctatggctcaggcttccttcagtgttcctgccttaaagccaaggggaagtggctagatgtgggggtgcatatgggctctctggctgtgacagatccccttggggacaacttcagtcagctttagtcctataatcggattgcctgacacctgcggtgggggttgcctggagaaaaagaaggtatctcctgaaagggactctgagcgccaggggccagggcgttggcggctctgcattaggaacgcatctgaggaccagctggactcagcctgtagcatgagaaaaacacacatctaagcagtgtttttgtgtttgtgggtaggaagaaaaagacccacccaaattagtgtgacatgaaacttttgagtgcagtgaaaatgtggtctgttttgattgatgcccaggcaagtcagtttctgcaaatctttcaacaataattgtagccctggaatgaaaggaatacaccttaaagtagctcatttcagttaatgcttgtttgctgtttccatttcagcttctcaatcccaactacatttatgacggtgagttctgttctttttcttctagtcctagagatgattctagacctgtggggcatgtttcagagcacttgagtgtggcctctggaaatgagttttccgtggcgctctaggcgtgcatagcaggttaggtcctatcaatctgtcggggacatgtgggtgggtgtggaggaggagccagggctgatgggcctttaccgactcctttcccatgcagttcccccagaattcgtcattccattgagtgaggtcacgtgtgagacaggggagaccgttgttcttagatgtcgagtctgtggccgccccaaagcctcaattacctggaagggccctgaacacaacaccttgaacaacgatggtcactacagcatctcctacagtgacctgggagaggccacgctgaagattgtgggcgtgaccacggaagatgacggcatctacacgtgcatcgctgtcaatgacatgggttcagcctcatcgtcggccagcctgagggtcctaggtaagcaccgtgcaacgaggattctacgtgacccagtggggcacgtctttcaggagtctccttaagtcctgagtctgcccttacactccaagtggcctgaaagatagaacaataagtcatttgtggggcttcaaaagacagttgtaagtagcagaccagagtgtctgggatgtcacaggagagtgacctctcggcaccttatgtaaagtcgggggagacaccggagctcctgttgctgggaggaggatgggggcctgcctggtgaaggcctctggctgcccaccatggggcaccagggccccccacgaccagcttctgagttggagcagggtgctttccgtgctcctagtactcaaaacactcatatccagctacccagctgaatctggatctggtctaggttggtctcatgtagaatgtgcatgggaaaagcaggaaaggagatgtgggtgagtcccgggcctgcgcaggccctgtgcctgtctgagaccctaacagcaacccttctgggtgaatgcacgccctcctcaccccatccaggaggagccaggcccagggcggctcagtagcttgtccagagcatctggctaggaggcatctgccatggggcctgcttgctccagtgtgaagagcttgttctttctcatcagctaaaccacaagctccctggggcagaaccaatatcttaggctctttcaaaacgtcctgtagttgcctgatgtagatagctgctgagaaaggtgtggactgttctctgctgccatcttgcagaaggccggccatgcagtactgggctgcaccacaaatggaggtgcctccagaggacaaataaaactccaaatgaaagataaattgagtcctggagcaccccgtctgtagacaataagcagaatttgtcttagaacttttgtcccagatatcttaatttcctgtttttaacaacattaaatcagaagacatgttctgattttttggatcatggaacaagaaatctaaaactctagaatttggcagtaaacaataaaaggtaaagattttctaatttgtaaataacacagaaattacacaggtgattttttttttttaatcactggcaaaagctaaaggactttagaaaggtatactattcagctgggcgtagtggctcacacctgtaatcccagcgctttgggaggccgaggtgggtggatcaccaggtcaggagatcgagaccatcgtggctaacacagtgaaaccctgtctctgctaaaaataacaaaaaattagccggcgtggtggcaagcgcctgtagtcccagctactcttgaggctgaggcaggagaatcacttgaacccaggaggcagaggttgcagtgagccgagatcatgccactgcactccagcctgggtgacagagcgagactctgtct

SEQ ID NO: 457219 - DNA, 6731 bp, Homo sapiens
cgcggccgcgggcgccgccgcagccatgagcggcagcagcggcggagccgccgcccccgccgcgtcctccggccccgccgcggcggccagcgcggctggctcgggctgcgggggcggtgccggcgagggggcagaggaggcggccaaggacctggccgacatcgcggccttcttccgatccgggtttcgaaaaaacgatgaaatgaaagctatggatgttttaccaattttgaaggaaaaagttgcatacctttcaggtgggagagataaacgtggaggtcccattttaacgtttccggcccgcagcaatcatgacagaatacgacaggaggatctcaggagactcatttcctatctagcctgtattcccagcgaggaggtctgcaagcgtggcttcacggtgatcgtggacatgcgtgggtccaagtgggactccatcaagccccttctgaagatcctgcaggagtccttcccctgctgcatccatgtggccctgatcatcaagccagacaacttctggcagaaacagaggactaattttggcagttctaaatttgaatttgagacaaatatggtctctttagaaggccttaccaaagtagttgatccttctcagctaactcctgagtttgatggctgcctggaatacaaccacgaagaatggattgaaatcagagttgcttttgaagactacattagcaatgccacccacatgctgtctcggctggaggaacttcaggacatcctagctaagaaggagctgcctcaggatttagagggggctcggaatatgatcgaggaacattctcagctgaagaagaaggtgattaaggcccccatcgaggacctggatttggagggacagaagctgcttcagaggatacagagcagtgaaagctttcccaaaaagaactcaggctcaggcaatgcggacctgcagaacctcttgcccaaggtgtccaccatgctggaccggctgcactcgacacggcagcatctgcaccagatgtggcatgtgaggaagctgaagctggaccagtgcttccagctgaggctgtttgaacaggatgctgagaagatgtttgactggatcacacacaacaaaggcctgtttctaaacagctacacagagattgggaccagccaccctcatgccatggagcttcagacgcagcacaatcactttgccatgaactgtatgaacgtgtatgtaaatataaaccgcatcatgtcggtggccaatcgtctggtggagtctggccactatgcctcgcagcagatcaggcagatcgcgagtcagctggagcaggagtggaaggcgtttgcggcagccctggatgagcggagcaccttgctggacatgtcctccattttccaccagaaggccgaaaagtatatgagcaacgtggattcatggtgtaaagcttgcggtgaggtagaccttccctcagagctgcaggacctagaagatgccattcatcaccaccagggaatatatgaacatatcactcttgcttattctgaggtcagccaagatgggaagtcgctccttgacaagctccagcggcccttgactcccggcagctccgattccctgacagcctctgccaactactccaaggccgtgcaccatgtcctggatgtcatccacgaggtgctgcaccaccagcggcagcgtgagaacatctggcaacaccgcaaggtccggctgcatcagaggctgcagctgtgtgttttccagcaggacgttcagcaggtgctagactggatcgagaaccacggagaagcatttctgagcaaacatacaggtgtggggaaatctcttcatcgggccagagcattgcagaaacgtcatgaagattttgaagaagtggcacagaacacatacaccaatgcggataaattactggaagcagcagaacagctggctcagactggggaatgtgaccccgaagagatttatcaggctgcccatcagctggaagaccggattcaagatttcgttcggcgtgttgagcagcgaaagatcctactggacatgtcagtgtcctttcacacccatgtgaaagagctgtggacgtggctggaggagctgcagaaggagctgctggacgacgtgtatgccgagtcggtggaggccgtgcaggacctcatcaagcgctttggccagcagcagcagaccaccctgcaggtgactgtcaacgtgatcaaggaaggggaggacctcatccagcagctcagggactctgccatctccagtaacaagaccccccacaacagctccatcaaccacattgagacggtgctgcagcagctggacgaggcgcagtcgcagatggaggagctcttccaggagcgcaagatcaagctggagctcttcctgcacgtgcgcatcttcgagagggacgccatcgacattatctcagacctcgagtcttggaatgatgagctttctcagcaaatgaatgacttcgacacagaagatctcacgattgcagagcagcgcctccagcaccatgcagacaaagccttgaccatgaacaacttgacttttgacgtcatccaccaagggcaagatcttctgcagtatgtcaatgaggtccaggcctctggtgtggagctgctgtgtgatagagatgtagacatggcaactcgggtccaggacctgctggagtttcttcatgaaaaacagcaggaattggatttagccgcagagcagcatcggaaacacctggagcagtgcgtgcagctgcgccacctgcaggcagaagtgaaacaggtgctgggttggatccgcaacggagagtccatgttaaatgccggacttatcacagccagctcgttacaagaggcagagcagctccagcgagagcacgagcagttccagcatgccattgagaaaacacatcagagcgcgctgcaggtgcagcagaaggcagaagccatgctacaggccaaccactacgacatggacatgatccgggactgcgccgagaaggtggcgtctcactggcaacagctcatgctcaagatggaagatcgcctcaagctcgtcaacgcctctgtcgctttctacaaaacctcagagcaggtctgcagcgtcctcgagagcctggaacaggagtacaagagagaagaagactggtgtggcggggcggataagctgggcccaaactctgagacggaccacgtgacgcccatgatcagcaagcacctggagcagaaggaggcattcctgaaggcttgcacccttgctcggaggaatgcagacgtcttcctgaaatacctgcacaggaacagcgtgaacatgccaggaatggtgacgcacatcaaagctcctgaacagcaagtgaaaaatatcttgaatgaactcttccaacgggagaacagggtattgcattactggaccatgaggaagagacggctggaccagtgtcagcagtacgtggtctttgagaggagtgccaagcaggctttggaatggatccatgacaatggcgagttctacctttccacacacacctccacgggctccagtatacagcacacccaggagctcctgaaagagcacgaggagttccagataactgcaaagcaaaccaaagagagagtgaagctattgatacagctggctgatggcttttgtgaaaaagggcatgcccatgcggcagagataaaaaaatgtgttactgctgtggataagaggtacagagatttctctctgcggatggagaagtacaggacctctttggaaaaagccctggggatttcttcagattccaacaaatcgagtaaaagtctccagctagatatcattccagccagtatccctggctcagaggtgaaacttcgagatgctgctcatgaacttaatgaagagaagcggaaatctgcccgcaggaaagagttcataatggctgagctcattcaaactgaaaaggcttatgtaagagacctccgggaatgtatggatacgtacctgtgggaaatgaccagtggcgtggaagagattccacctggcattgtaaacaaagaactcatcatcttcggaaacatgcaagaaatctacgaatttcataataacatattcctaaaggagctggaaaaatatgaacagttgccagaggatgttggacattgttttgttacttgggcagacaagtttcagatgtatgtcacatattgcaaaaataagcctgattctactcagctgatattggaacatgcagggtcctattttgacgagatacagcagcgacatggattagccaattccatttcttcctaccttattaaaccagttcagcgaataacgaagtatcagctccttttaaaagagctgctgacgtgctgtgaggaaggaaagggagagattaaagatggcctggaggtgatgctcagcgtgccgaagcgagccaatgatgccatgcacctcagcatgctggaagggtttgatgaaaacattgagtctcagggagaactcatcctacaggaatccttccaagtgtgggacccaaaaaccttaattcgaaagggtcgagaacggcatctcttcctttttgaaatgtccttagtatttagtaaagaagtgaaagattccagtgggagaagcaagtacctttataaaagcaaattgtttacctcagagttgggtgtcacagaacatgttgaaggagacccttgcaaatttgcactgtgggtggggagaacaccaacttcagataataaaattgtccttaaggcttccagcatagagaacaagcaggactggataaagcatatccgcgaagtcatccaggagcggacgatccacctgaagggagccctgaaggagcccattcacatccctaagaccgctcccgccacaagacagaagggaaggagggatggagaggatctggacagccaaggagacggcagcagccagcctgatacgatttccatcgcctcacggacgtctcagaacacgctggacagcgataagctctctggtggctgtgagctgacagtggtgatccatgacttcaccgcttgcaacagcaacgagctgaccatccgacggggccagaccgtggaagttctggagcggccgcatgacaagcctgactggtgtctggtgcggaccactgaccgctccccagcggcagaaggcctggtcccctgtggttcactgtgcatcgcccactccagaagtagcatggaaatggagggcatcttcaaccacaaagactcgctctccgtctccagcaatgacgccagtccacccgcatccgtggcttccctccagccccacatgatcggggcccagagctcgccgggccccaagcggccgggcaacaccctgcgcaagtggctcaccagccccgtgcggcggctcagcagcggcaaggccgacgggcacgtgaagaagctggcgcacaagcacaagaagagccgcgaggtccgcaagagcgccgacgccggctcgcagaaggactccgacgacagtgcggccaccccgcaggacgagacggtcgaggagagaggccggaacgagggcctgagcagcggtactctctccaaatcctcctcctcggggatgcagagctgtggagaagaggaaggcgaggagggggccgacgccgtgcccctgccgccacccatggccatccagcagcacagcctcctccagccagactcacaggatgacaaggcctcttctcggttattagtccgccccaccagctccgaaacaccgagtgcagccgagctcgtcagtgcaattgaggaactcgtgaaaagcaagatggcactggaggatcgccccagctcactccttgttgaccagggagatagtagcagcccttccttcaacccttcggataattcccttctctcttcctcctcgcccattgatgagatggaagaaaggaaatccagctctttaaagagaagacactacgttttgcaagaactagtggagacagagcgtgactatgtgcgggaccttggctatgtggttgagggctacatggcacttatgaaagaagatggtgttcctgatgacatgaaaggaaaagacaaaattgtgttcggcaacatccatcagatttacgactggcacagagacttttttttaggagagttagagaagtgccttgaagatccagaaaaactaggatccctttttgttaaacacgagagaaggttgcacatgtacatagcttattgtcaaaataaaccaaagtctgagcacattgtctcagaatacattgataccttttttgaggacttaaagcagcgtcttggccacaggttacagctcacagatctgttgatcaaaccagtgcagagaatcatgaagtatcagctgttactgaaggtgaggaggtggcgggacaaactctggtgtcaggagtgagtttgctgagaaaataagactcagttggggaaagaaggatttggtaggacaggggaatcatctgtgtaacaggtatattatttctgataagttaaaccttaaaaatttaaatcagctgttactgaaggtgaggtggcgggacagactctggtgtcaggagtgagtttgctgaaaaaataagactcagtgggggaaagaaggatttggtaggacgggaatcatctgtgtaacaagtatattatttctgataagttaatccttaaaaatttaagaaaacacttcaaacaattttctcaattttttatttacatcgagttcagaatgaaaatat

SEQ ID NO: 457220 - DNA, 6995 bp, Homo sapiens
cgcggccgcgggcgccgccgcagccatgagcggcagcagcggcggagccgccgcccccgccgcgtcctccggccccgccgcggcggccagcgcggctggctcgggctgcgggggcggtgccggcgagggggcagaggaggcggccaaggacctggccgacatcgcggccttcttccgatccgggtttcgaaaaaacgatgaaatgaaagctatggatgttttaccaattttgaaggaaaaagttgcatacctttcaggtgggagagataaacgtggaggtcccattttaacgtttccggcccgcagcaatcatgacagaatacgacaggaggatctcaggagactcatttcctatctagcctgtattcccagcgaggaggtctgcaagcgtggcttcacggtgatcgtggacatgcgtgggtccaagtgggactccatcaagccccttctgaagatcctgcaggagtccttcccctgctgcatccatgtggccctgatcatcaagccagacaacttctggcagaaacagaggactaattttggcagttctaaatttgaatttgagacaaatatggtctctttagaaggccttaccaaagtagttgatccttctcagctaactcctgagtttgatggctgcctggaatacaaccacgaagaatggattgaaatcagagttgcttttgaagactacattagcaatgccacccacatgctgtctcggctggaggaacttcaggacatcctagctaagaaggagctgcctcaggatttagagggggctcggaatatgatcgaggaacattctcagctgaagaagaaggtgattaaggcccccatcgaggacctggatttggagggacagaagctgcttcagaggatacagagcagtgaaagctttcccaaaaagaactcaggctcaggcaatgcggacctgcagaacctcttgcccaaggtgtccaccatgctggaccggctgcactcgacacggcagcatctgcaccagatgtggcatgtgaggaagctgaagctggaccagtgcttccagctgaggctgtttgaacaggatgctgagaagatgtttgactggatcacacacaacaaaggcctgtttctaaacagctacacagagattgggaccagccaccctcatgccatggagcttcagacgcagcacaatcactttgccatgaactgtatgaacgtgtatgtaaatataaaccgcatcatgtcggtggccaatcgtctggtggagtctggccactatgcctcgcagcagatcaggcagatcgcgagtcagctggagcaggagtggaaggcgtttgcggcagccctggatgagcggagcaccttgctggacatgtcctccattttccaccagaaggccgaaaagtatatgagcaacgtggattcatggtgtaaagcttgcggtgaggtagaccttccctcagagctgcaggacctagaagatgccattcatcaccaccagggaatatatgaacatatcactcttgcttattctgaggtcagccaagatgggaagtcgctccttgacaagctccagcggcccttgactcccggcagctccgattccctgacagcctctgccaactactccaaggccgtgcaccatgtcctggatgtcatccacgaggtgctgcaccaccagcggcagcgtgagaacatctggcaacaccgcaaggtccggctgcatcagaggctgcagctgtgtgttttccagcaggacgttcagcaggtgctagactggatcgagaaccacggagaagcatttctgagcaaacatacaggtgtggggaaatctcttcatcgggccagagcattgcagaaacgtcatgaagattttgaagaagtggcacagaacacatacaccaatgcggataaattactggaagcagcagaacagctggctcagactggggaatgtgaccccgaagagatttatcaggctgcccatcagctggaagaccggattcaagatttcgttcggcgtgttgagcagcgaaagatcctactggacatgtcagtgtcctttcacacccatgtgaaagagctgtggacgtggctggaggagctgcagaaggagctgctggacgacgtgtatgccgagtcggtggaggccgtgcaggacctcatcaagcgctttggccagcagcagcagaccaccctgcaggtgactgtcaacgtgatcaaggaaggggaggacctcatccagcagctcagggactctgccatctccagtaacaagaccccccacaacagctccatcaaccacattgagacggtgctgcagcagctggacgaggcgcagtcgcagatggaggagctcttccaggagcgcaagatcaagctggagctcttcctgcacgtgcgcatcttcgagagggacgccatcgacattatctcagacctcgagtcttggaatgatgagctttctcagcaaatgaatgacttcgacacagaagatctcacgattgcagagcagcgcctccagcaccatgcagacaaagccttgaccatgaacaacttgacttttgacgtcatccaccaagggcaagatcttctgcagtatgtcaatgaggtccaggcctctggtgtggagctgctgtgtgatagagatgtagacatggcaactcgggtccaggacctgctggagtttcttcatgaaaaacagcaggaattggatttagccgcagagcagcatcggaaacacctggagcagtgcgtgcagctgcgccacctgcaggcagaagtgaaacaggtgctgggttggatccgcaacggagagtccatgttaaatgccggacttatcacagccagctcgttacaagaggcagagcagctccagcgagagcacgagcagttccagcatgccattgagaaaacacatcagagcgcgctgcaggtgcagcagaaggcagaagccatgctacaggccaaccactacgacatggacatgatccgggactgcgccgagaaggtggcgtctcactggcaacagctcatgctcaagatggaagatcgcctcaagctcgtcaacgcctctgtcgctttctacaaaacctcagagcaggtctgcagcgtcctcgagagcctggaacaggagtacaagagagaagaagactggtgtggcggggcggataagctgggcccaaactctgagacggaccacgtgacgcccatgatcagcaagcacctggagcagaaggaggcattcctgaaggcttgcacccttgctcggaggaatgcagacgtcttcctgaaatacctgcacaggaacagcgtgaacatgccaggaatggtgacgcacatcaaagctcctgaacagcaagtgaaaaatatcttgaatgaactcttccaacgggagaacagggtattgcattactggaccatgaggaagagacggctggaccagtgtcagcagtacgtggtctttgagaggagtgccaagcaggctttggaatggatccatgacaatggcgagttctacctttccacacacacctccacgggctccagtatacagcacacccaggagctcctgaaagagcacgaggagttccagataactgcaaagcaaaccaaagagagagtgaagctattgatacagctggctgatggcttttgtgaaaaagggcatgcccatgcggcagagataaaaaaatgtgttactgctgtggataagaggtacagagatttctctctgcggatggagaagtacaggacctctttggaaaaagccctggggatttcttcagattccaacaaatcgagtaaaagtctccagctagatatcattccagccagtatccctggctcagaggtgaaacttcgagatgctgctcatgaacttaatgaagagaagcggaaatctgcccgcaggaaagagttcataatggctgagctcattcaaactgaaaaggcttatgtaagagacctccgggaatgtatggatacgtacctgtgggaaatgaccagtggcgtggaagagattccacctggcattgtaaacaaagaactcatcatcttcggaaacatgcaagaaatctacgaatttcataataacatattcctaaaggagctggaaaaatatgaacagttgccagaggatgttggacattgttttgttacttgggcagacaagtttcagatgtatgtcacatattgcaaaaataagcctgattctactcagctgatattggaacatgcagggtcctattttgacgagatacagcagcgacatggattagccaattccatttcttcctaccttattaaaccagttcagcgaataacgaagtatcagctccttttaaaagagctgctgacgtgctgtgaggaaggaaagggagagattaaagatggcctggaggtgatgctcagcgtgccgaagcgagccaatgatgccatgcacctcagcatgctggaagggtttgatgaaaacattgagtctcagggagaactcatcctacaggaatccttccaagtgtgggacccaaaaaccttaattcgaaagggtcgagaacggcatctcttcctttttgaaatgtccttagtatttagtaaagaagtgaaagattccagtgggagaagcaagtacctttataaaagcaaattgtttacctcagagttgggtgtcacagaacatgttgaaggagacccttgcaaatttgcactgtgggtggggagaacaccaacttcagataataaaattgtccttaaggcttccagcatagagaacaagcaggactggataaagcatatccgcgaagtcatccaggagcggacgatccacctgaagggagccctgaaggagcccattcacatccctaagaccgctcccgccacaagacagaagggaaggagggatggagaggatctggacagccaaggagacggcagcagccagcctgatacgatttccatcgcctcacggacgtctcagaacacgctggacagcgataagctctctggtggctgtgagctgacagtggtgatccatgacttcaccgcttgcaacagcaacgagctgaccatccgacggggccagaccgtggaagttctggagcggccgcatgacaagcctgactggtgtctggtgcggaccactgaccgctccccagcggcagaaggcctggtcccctgtggttcactgtgcatcgcccactccagaagtagcatggaaatggagggcatcttcaaccacaaagactcgctctccgtctccagcaatgacgccagtccacccgcatccgtggcttccctccagccccacatgatcggggcccagagctcgccgggccccaagcggccgggcaacaccctgcgcaagtggctcaccagccccgtgcggcggctcagcagcggcaaggccgacgggcacgtgaagaagctggcgcacaagcacaagaagagccgcgaggtccgcaagagcgccgacgccggctcgcagaaggactccgacgacagtgcggccaccccgcaggacgagacggtcgaggagagaggccggaacgagggcctgagcagcggtactctctccaaatcctcctcctcggggatgcagagctgtggagaagaggaaggcgaggagggggccgacgccgtgcccctgccgccacccatggccatccagcagcacagcctcctccagccagactcacaggatgacaaggcctcttctcggttattagtccgccccaccagctccgaaacaccgagtgcagccgagctcgtcagtgcaattgaggaactcgtgaaaagcaagatggcactggaggatcgccccagctcactccttgttgaccagggagatagtagcagcccttccttcaacccttcggataattcccttctctcttcctcctcgcccattgatgagatggaagaaaggaaatccagctctttaaagagaagacactacgttttgcaagaactagtggagacagagcgtgactatgtgcgggaccttggctatgtggttgagggctacatggcacttatgaaagaagatggtgttcctgatgacatgaaaggaaaagacaaaattgtgttcggcaacatccatcagatttacgactggcacagagacttttttttaggagagttagagaagtgccttgaagatccagaaaaactaggatccctttttgttaaacacgagagaaggttgcacatgtacatagcttattgtcaaaataaaccaaagtctgagcacattgtctcagaatacattgataccttttttgaggacttaaagcagcgtcttggccacaggttacagctcacagatctgttgatcaaaccagtgcagagaatcatgaagtatcagctgttactgaaggtgaggaggtggcgggacaaactctggtgtcaggagtgagtttgctgagaaaataagactcagttggggaaagaaggatttggtaggacaggggaatcatctgtgtaacaggtatattatttctgataagttaaaccttaaaaatttaaatcagctgttagctgaggcaggaggatagcttgaggccaggagttggaggctgcagtgagcttatgattgctcctttgaatagccactacactccagcctggacaacatagtgagagcttgtctatttaaaaaaaaaaattctttcagaactaaagtgctgaaccccaatgtctggccagtgtgagtggccaaaaaggttagcttgtgtgcattgtctcattcctgtagtcccagctactcaggaggccaaagcaagaggatcacttgaggccaggagttcaagaccacatcgtggctaacacagtgaaaccctgtctctgctaaaaataacaaaaaattagccggcgtggtggcaagcgcctgtagtcccagctactcttgaggctgaggcaggagaatcacttgaacccaggaggcagaggttgcagtgagccgagatcatgccactgcactccagcctgggtgacagagcgagactctgtct

SEQ ID NO: 457221 - DNA, 5881 bp, Homo sapiens
cgcggccgcgggcgccgccgcagccatgagcggcagcagcggcggagccgccgcccccgccgcgtcctccggccccgccgcggcggccagcgcggctggctcgggctgcgggggcggtgccggcgagggggcagaggaggcggccaaggacctggccgacatcgcggccttcttccgatccgggtttcgaaaaaacgatgaaatgaaagctatggatgttttaccaattttgaaggaaaaagttgcatacctttcaggtgggagagataaacgtggaggtcccattttaacgtttccggcccgcagcaatcatgacagaatacgacaggaggatctcaggagactcatttcctatctagcctgtattcccagcgaggaggtctgcaagcgtggcttcacggtgatcgtggacatgcgtgggtccaagtgggactccatcaagccccttctgaagatcctgcaggagtccttcccctgctgcatccatgtggccctgatcatcaagccagacaacttctggcagaaacagaggactaattttggcagttctaaatttgaatttgagacaaatatggtctctttagaaggccttaccaaagtagttgatccttctcagctaactcctgagtttgatggctgcctggaatacaaccacgaagaatggattgaaatcagagttgcttttgaagactacattagcaatgccacccacatgctgtctcggctggaggaacttcaggacatcctagctaagaaggagctgcctcaggatttagagggggctcggaatatgatcgaggaacattctcagctgaagaagaaggtgattaaggcccccatcgaggacctggatttggagggacagaagctgcttcagaggatacagagcagtgaaagctttcccaaaaagaactcaggctcaggcaatgcggacctgcagaacctcttgcccaaggtgtccaccatgctggaccggctgcactcgacacggcagcatctgcaccagatgtggcatgtgaggaagctgaagctggaccagtgcttccagctgaggctgtttgaacaggatgctgagaagatgtttgactggatcacacacaacaaaggcctgtttctaaacagctacacagagattgggaccagccaccctcatgccatggagcttcagacgcagcacaatcactttgccatgaactgtatgaacgtgtatgtaaatataaaccgcatcatgtcggtggccaatcgtctggtggagtctggccactatgcctcgcagcagatcaggcagatcgcgagtcagctggagcaggagtggaaggcgtttgcggcagccctggatgagcggagcaccttgctggacatgtcctccattttccaccagaaggccgaaaagtatatgagcaacgtggattcatggtgtaaagcttgcggtgaggtagaccttccctcagagctgcaggacctagaagatgccattcatcaccaccagggaatatatgaacatatcactcttgcttattctgaggtcagccaagatgggaagtcgctccttgacaagctccagcggcccttgactcccggcagctccgattccctgacagcctctgccaactactccaaggccgtgcaccatgtcctggatgtcatccacgaggtgctgcaccaccagcggcagcgtgagaacatctggcaacaccgcaaggtccggctgcatcagaggctgcagctgtgtgttttccagcaggacgttcagcaggtgctagactggatcgagaaccacggagaagcatttctgagcaaacatacaggtgtggggaaatctcttcatcgggccagagcattgcagaaacgtcatgaagattttgaagaagtggcacagaacacatacaccaatgcggataaattactggaagcagcagaacagctggctcagactggggaatgtgaccccgaagagatttatcaggctgcccatcagctggaagaccggattcaagatttcgttcggcgtgttgagcagcgaaagatcctactggacatgtcagtgtcctttcacacccatgtgaaagagctgtggacgtggctggaggagctgcagaaggagctgctggacgacgtgtatgccgagtcggtggaggccgtgcaggacctcatcaagcgctttggccagcagcagcagaccaccctgcaggtgactgtcaacgtgatcaaggaaggggaggacctcatccagcagctcagggactctgccatctccagtaacaagaccccccacaacagctccatcaaccacattgagacggtgctgcagcagctggacgaggcgcagtcgcagatggaggagctcttccaggagcgcaagatcaagctggagctcttcctgcacgtgcgcatcttcgagagggacgccatcgacattatctcagacctcgagtcttggaatgatgagctttctcagcaaatgaatgacttcgacacagaagatctcacgattgcagagcagcgcctccagcaccatgcagacaaagccttgaccatgaacaacttgacttttgacgtcatccaccaagggcaagatcttctgcagtatgtcaatgaggtccaggcctctggtgtggagctgctgtgtgatagagatgtagacatggcaactcgggtccaggacctgctggagtttcttcatgaaaaacagcaggaattggatttagccgcagagcagcatcggaaacacctggagcagtgcgtgcagctgcgccacctgcaggcagaagtgaaacaggtgctgggttggatccgcaacggagagtccatgttaaatgccggacttatcacagccagctcgttacaagaggcagagcagctccagcgagagcacgagcagttccagcatgccattgagaaaacacatcagagcgcgctgcaggtgcagcagaaggcagaagccatgctacaggccaaccactacgacatggacatgatccgggactgcgccgagaaggtggcgtctcactggcaacagctcatgctcaagatggaagatcgcctcaagctcgtcaacgcctctgtcgctttctacaaaacctcagagcaggtctgcagcgtcctcgagagcctggaacaggagtacaagagagaagaagactggtgtggcggggcggataagctgggcccaaactctgagacggaccacgtgacgcccatgatcagcaagcacctggagcagaaggaggcattcctgaaggcttgcacccttgctcggaggaatgcagacgtcttcctgaaatacctgcacaggaacagcgtgaacatgccaggaatggtgacgcacatcaaagctcctgaacagcaagtgaaaaatatcttgaatgaactcttccaacgggagaacagggtattgcattactggaccatgaggaagagacggctggaccagtgtcagcagtacgtggtctttgagaggagtgccaagcaggctttggaatggatccatgacaatggcgagttctacctttccacacacacctccacgggctccagtatacagcacacccaggagctcctgaaagagcacgaggagttccagataactgcaaagcaaaccaaagagagagtgaagctattgatacagctggctgatggcttttgtgaaaaagggcatgcccatgcggcagagataaaaaaatgtgttactgctgtggataagaggtacagagatttctctctgcggatggagaagtacaggacctctttggaaaaagccctggggatttcttcagattccaacaaatcgagtaaaagtctccagctagatatcattccagccagtatccctggctcagaggtgaaacttcgagatgctgctcatgaacttaatgaagagaagcggaaatctgcccgcaggaaagagttcataatggctgagctcattcaaactgaaaaggcttatgtaagagacctccgggaatgtatggatacgtacctgtgggaaatgaccagtggcgtggaagagattccacctggcattgtaaacaaagaactcatcatcttcggaaacatgcaagaaatctacgaatttcataataacatattcctaaaggagctggaaaaatatgaacagttgccagaggatgttggacattgttttgttacttgggcagacaagtttcagatgtatgtcacatattgcaaaaataagcctgattctactcagctgatattggaacatgcagggtcctattttgacgagatacagcagcgacatggattagccaattccatttcttcctaccttattaaaccagttcagcgaataacgaagtatcagctccttttaaaagagctgctgacgtgctgtgaggaaggaaagggagagattaaagatggcctggaggtgatgctcagcgtgccgaagcgagccaatgatgccatgcacctcagcatgctggaagggtttgatgaaaacattgagtctcagggagaactcatcctacaggaatccttccaagtgtgggacccaaaaaccttaattcgaaagggtcgagaacggcatctcttcctttttgaaatgtccttagtatttagtaaagaagtgaaagattccagtgggagaagcaagtacctttataaaagcaaattgtttacctcagagttgggtgtcacagaacatgttgaaggagacccttgcaaatttgcactgtgggtggggagaacaccaacttcagataataaaattgtccttaaggcttccagcatagagaacaagcaggactggataaagcatatccgcgaagtcatccaggagcggacgatccacctgaagggagccctgaaggagcccattcacatccctaagaccgctcccgccacaagacagaagggaaggagggatggagaggatctggacagccaaggagacggcagcagccagcctgatacgatttccatcgcctcacggacgtctcagaacacgctggacagcgataagctctctggtggctgtgagctgacagtggtgatccatgacttcaccgcttgcaacagcaacgagctgaccatccgacggggccagaccgtggaagttctggagcggccgcatgacaagcctgactggtgtctggtgcggaccactgaccgctccccagcggcagaaggcctggtcccctgtggttcactgtgcatcgcccactccagaagtagcatggaaatggagggcatcttcaaccacaaaggccaagccatgttccggatttctcaggacctaaatgtgagtttactgtcacttcggtaagaaacaggaagaattaggctgttgtttctccagaaatctgaagagaaaggcagaggattttcagactttggccaaaagccaaaggtgtccacttccatttctggtgaagctgcccatgcatttggaacagcggtgggcttcccctcgtggtgtctttgcatttagagatctgagccatgctggcttttagcctgttgccagaatgctttgcattcagtatattcagttgcatcaatataagtccttgaatttgagttgaaaataaagtacaacttttcctgaaattagtctgttctgcagaggggccctggtgaacttaagcatgcctcaaataacacttgttctgaaggatttcttccgcatgtgcctttcctgtggtgtgttcttacttcctggtgtttgcaattgcaggctagccaaggcgaaagaactaggcattcatcacacttggcttcgtccggaaaacttctggtggaggttgggtttttgaatgttgctacgttgtaccattttgtttttccctatgatactctccgatattcttgtacctggaaagtcactctgcccctcacaaaccctctaatgccctatttt

SEQ ID NO: 457222 - DNA, 4978 bp, Homo sapiens
cgcggccgcgggcgccgccgcagccatgagcggcagcagcggcggagccgccgcccccgccgcgtcctccggccccgccgcggcggccagcgcggctggctcgggctgcgggggcggtgccggcgagggggcagaggaggcggccaaggacctggccgacatcgcggccttcttccgatccgggtttcgaaaaaacgatgaaatgaaagctatggatgttttaccaattttgaaggaaaaagttgcatacctttcaggtgggagagataaacgtggaggtcccattttaacgtttccggcccgcagcaatcatgacagaatacgacaggaggatctcaggagactcatttcctatctagcctgtattcccagcgaggaggtctgcaagcgtggcttcacggtgatcgtggacatgcgtgggtccaagtgggactccatcaagccccttctgaagatcctgcaggagtccttcccctgctgcatccatgtggccctgatcatcaagccagacaacttctggcagaaacagaggactaattttggcagttctaaatttgaatttgagacaaatatggtctctttagaaggccttaccaaagtagttgatccttctcagctaactcctgagtttgatggctgcctggaatacaaccacgaagaatggattgaaatcagagttgcttttgaagactacattagcaatgccacccacatgctgtctcggctggaggaacttcaggacatcctagctaagaaggagctgcctcaggatttagagggggctcggaatatgatcgaggaacattctcagctgaagaagaaggtgattaaggcccccatcgaggacctggatttggagggacagaagctgcttcagaggatacagagcagtgaaagctttcccaaaaagaactcaggctcaggcaatgcggacctgcagaacctcttgcccaaggtgtccaccatgctggaccggctgcactcgacacggcagcatctgcaccagatgtggcatgtgaggaagctgaagctggaccagtgcttccagctgaggctgtttgaacaggatgctgagaagatgtttgactggatcacacacaacaaaggcctgtttctaaacagctacacagagattgggaccagccaccctcatgccatggagcttcagacgcagcacaatcactttgccatgaactgtatgaacgtgtatgtaaatataaaccgcatcatgtcggtggccaatcgtctggtggagtctggccactatgcctcgcagcagatcaggcagatcgcgagtcagctggagcaggagtggaaggcgtttgcggcagccctggatgagcggagcaccttgctggacatgtcctccattttccaccagaaggccgaaaagtatatgagcaacgtggattcatggtgtaaagcttgcggtgaggtagaccttccctcagagctgcaggacctagaagatgccattcatcaccaccagggaatatatgaacatatcactcttgcttattctgaggtcagccaagatgggaagtcgctccttgacaagctccagcggcccttgactcccggcagctccgattccctgacagcctctgccaactactccaaggccgtgcaccatgtcctggatgtcatccacgaggtgctgcaccaccagcggcagcgtgagaacatctggcaacaccgcaaggtccggctgcatcagaggctgcagctgtgtgttttccagcaggacgttcagcaggtgctagactggatcgagaaccacggagaagcatttctgagcaaacatacaggtgtggggaaatctcttcatcgggccagagcattgcagaaacgtcatgaagattttgaagaagtggcacagaacacatacaccaatgcggataaattactggaagcagcagaacagctggctcagactggggaatgtgaccccgaagagatttatcaggctgcccatcagctggaagaccggattcaagatttcgttcggcgtgttgagcagcgaaagatcctactggacatgtcagtgtcctttcacacccatgtgaaagagctgtggacgtggctggaggagctgcagaaggagctgctggacgacgtgtatgccgagtcggtggaggccgtgcaggacctcatcaagcgctttggccagcagcagcagaccaccctgcaggtgactgtcaacgtgatcaaggaaggggaggacctcatccagcagctcagggactctgccatctccagtaacaagaccccccacaacagctccatcaaccacattgagacggtgctgcagcagctggacgaggcgcagtcgcagatggaggagctcttccaggagcgcaagatcaagctggagctcttcctgcacgtgcgcatcttcgagagggacgccatcgacattatctcagacctcgagtcttggaatgatgagctttctcagcaaatgaatgacttcgacacagaagatctcacgattgcagagcagcgcctccagcaccatgcagacaaagccttgaccatgaacaacttgacttttgacgtcatccaccaagggcaagatcttctgcagtatgtcaatgaggtccaggcctctggtgtggagctgctgtgtgatagagatgtagacatggcaactcgggtccaggacctgctggagtttcttcatgaaaaacagcaggaattggatttagccgcagagcagcatcggaaacacctggagcagtgcgtgcagctgcgccacctgcaggcagaagtgaaacaggtgctgggttggatccgcaacggagagtccatgttaaatgccggacttatcacagccagctcgttacaagaggcagagcagctccagcgagagcacgagcagttccagcatgccattgagaaaacacatcagagcgcgctgcaggtgcagcagaaggcagaagccatgctacaggccaaccactacgacatggacatgatccgggactgcgccgagaaggtggcgtctcactggcaacagctcatgctcaagatggaagatcgcctcaagctcgtcaacgcctctgtcgctttctacaaaacctcagagcaggtctgcagcgtcctcgagagcctggaacaggagtacaagagagaagaagactggtgtggcggggcggataagctgggcccaaactctgagacggaccacgtgacgcccatgatcagcaagcacctggagcagaaggaggcattcctgaaggcttgcacccttgctcggaggaatgcagacgtcttcctgaaatacctgcacaggaacagcgtgaacatgccaggaatggtgacgcacatcaaagctcctgaacagcaagtgaaaaatatcttgaatgaactcttccaacgggagaacagggtattgcattactggaccatgaggaagagacggctggaccagtgtcagcagtacgtggtctttgagaggagtgccaagcaggctttggaatggatccatgacaatggcgagttctacctttccacacacacctccacgggctccagtatacagcacacccaggagctcctgaaagagcacgaggagttccagataactgcaaagcaaaccaaagagagagtgaagctattgatacagctggctgatggcttttgtgaaaaagggcatgcccatgcggcagagataaaaaaatgtgttactgctgtggataagaggtacagagatttctctctgcggatggagaagtacaggacctctttggaaaaagccctggggatttcttcagattccaacaaatcgagtaaaagtctccagctagatatcattccagccagtatccctggctcagaggtgaaacttcgagatgctgctcatgaacttaatgaagagaagcggaaatctgcccgcaggaaagagttcataatggctgagctcattcaaactgaaaaggcttatgtaagagacctccgggaatgtatggatacgtacctgtgggaaatgaccagtggcgtggaagagattccacctggcattgtaaacaaagaactcatcatcttcggaaacatgcaagaaatctacgaatttcataataacatattcctaaaggagctggaaaaatatgaacagttgccagaggatgttggacattgttttgttacttgggcagacaagtttcagatgtatgtcacatattgcaaaaataagcctgattctactcagctgatattggaacatgcagggtcctattttgacgagatacagcagcgacatggattagccaattccatttcttcctaccttattaaaccagttcagcgaataacgaagtatcagctccttttaaaagagctgctgacgtgctgtgaggaaggaaagggagagattaaagatggcctggaggtgatgctcagcgtgccgaagcgagccaatgatgccatgcacctcagcatgctggaagggtttgatgaaaacattgagtctcagggagaactcatcctacaggaatccttccaagtgtgggacccaaaaaccttaattcgaaagggtcgagaacggcatctcttcctttttgaaatgtccttagtatttagtaaagaagtgaaagattccagtgggagaagcaagtacctttataaaagcaaattgtttgtaagtataggcgttcagaattgtaagtctaaaggtaacacaattgcagtctttttgtaggtagagaagaattgttcattgtcttcagtttaacctcccaatctgtcctgaaatgttcaagtctgaattgtggtagggttttcatcttcagtgaaattatttcccaccctcaagtccactagagggtgctctggagtttatagacttaggaaacttgctcttcttaaatcctgtatcatataactgcaggataagaaaacatttcataagtgaaatcatttatctccggtgtgcttaactagctttataaataaaataatcatatctatgactaaaaaa

SEQ ID NO: 457223 - DNA, 4111 bp, Homo sapiens
cgcggccgcgggcgccgccgcagccatgagcggcagcagcggcggagccgccgcccccgccgcgtcctccggccccgccgcggcggccagcgcggctggctcgggctgcgggggcggtgccggcgagggggcagaggaggcggccaaggacctggccgacatcgcggccttcttccgatccgggtttcgaaaaaacgatgaaatgaaagctatggatgttttaccaattttgaaggaaaaagttgcatacctttcaggtgggagagataaacgtggaggtcccattttaacgtttccggcccgcagcaatcatgacagaatacgacaggaggatctcaggagactcatttcctatctagcctgtattcccagcgaggaggtctgcaagcgtggcttcacggtgatcgtggacatgcgtgggtccaagtgggactccatcaagccccttctgaagatcctgcaggagtccttcccctgctgcatccatgtggccctgatcatcaagccagacaacttctggcagaaacagaggactaattttggcagttctaaatttgaatttgagacaaatatggtctctttagaaggccttaccaaagtagttgatccttctcagctaactcctgagtttgatggctgcctggaatacaaccacgaagaatggattgaaatcagagttgcttttgaagactacattagcaatgccacccacatgctgtctcggctggaggaacttcaggacatcctagctaagaaggagctgcctcaggatttagagggggctcggaatatgatcgaggaacattctcagctgaagaagaaggtgattaaggcccccatcgaggacctggatttggagggacagaagctgcttcagaggatacagagcagtgaaagctttcccaaaaagaactcaggctcaggcaatgcggacctgcagaacctcttgcccaaggtgtccaccatgctggaccggctgcactcgacacggcagcatctgcaccagatgtggcatgtgaggaagctgaagctggaccagtgcttccagctgaggctgtttgaacaggatgctgagaagatgtttgactggatcacacacaacaaaggcctgtttctaaacagctacacagagattgggaccagccaccctcatgccatggagcttcagacgcagcacaatcactttgccatgaactgtatgaacgtgtatgtaaatataaaccgcatcatgtcggtggccaatcgtctggtggagtctggccactatgcctcgcagcagatcaggcagatcgcgagtcagctggagcaggagtggaaggcgtttgcggcagccctggatgagcggagcaccttgctggacatgtcctccattttccaccagaaggccgaaaagtatatgagcaacgtggattcatggtgtaaagcttgcggtgaggtagaccttccctcagagctgcaggacctagaagatgccattcatcaccaccagggaatatatgaacatatcactcttgcttattctgaggtcagccaagatgggaagtcgctccttgacaagctccagcggcccttgactcccggcagctccgattccctgacagcctctgccaactactccaaggccgtgcaccatgtcctggatgtcatccacgaggtgctgcaccaccagcggcagcgtgagaacatctggcaacaccgcaaggtccggctgcatcagaggctgcagctgtgtgttttccagcaggacgttcagcaggtgctagactggatcgagaaccacggagaagcatttctgagcaaacatacaggtgtggggaaatctcttcatcgggccagagcattgcagaaacgtcatgaagattttgaagaagtggcacagaacacatacaccaatgcggataaattactggaagcagcagaacagctggctcagactggggaatgtgaccccgaagagatttatcaggctgcccatcagctggaagaccggattcaagatttcgttcggcgtgttgagcagcgaaagatcctactggacatgtcagtgtcctttcacacccatgtgaaagagctgtggacgtggctggaggagctgcagaaggagctgctggacgacgtgtatgccgagtcggtggaggccgtgcaggacctcatcaagcgctttggccagcagcagcagaccaccctgcaggtgactgtcaacgtgatcaaggaaggggaggacctcatccagcagctcagggactctgccatctccagtaacaagaccccccacaacagctccatcaaccacattgagacggtgctgcagcagctggacgaggcgcagtcgcagatggaggagctcttccaggagcgcaagatcaagctggagctcttcctgcacgtgcgcatcttcgagagggacgccatcgacattatctcagacctcgagtcttggaatgatgagctttctcagcaaatgaatgacttcgacacagaagatctcacgattgcagagcagcgcctccagcaccatgcagacaaagccttgaccatgaacaacttgacttttgacgtcatccaccaagggcaagatcttctgcagtatgtcaatgaggtccaggcctctggtgtggagctgctgtgtgatagagatgtagacatggcaactcgggtccaggacctgctggagtttcttcatgaaaaacagcaggaattggatttagccgcagagcagcatcggaaacacctggagcagtgcgtgcagctgcgccacctgcaggcagaagtgaaacaggtgctgggttggatccgcaacggagagtccatgttaaatgccggacttatcacagccagctcgttacaagaggcagagcagctccagcgagagcacgagcagttccagcatgccattgagaaaacacatcagagcgcgctgcaggtgcagcagaaggcagaagccatgctacaggccaaccactacgacatggacatgatccgggactgcgccgagaaggtggcgtctcactggcaacagctcatgctcaagatggaagatcgcctcaagctcgtcaacgcctctgtcgctttctacaaaacctcagagcaggtctgcagcgtcctcgagagcctggaacaggagtacaagagagaagaagactggtgtggcggggcggataagctgggcccaaactctgagacggaccacgtgacgcccatgatcagcaagcacctggagcagaaggaggcattcctgaaggcttgcacccttgctcggaggaatgcagacgtcttcctgaaatacctgcacaggaacagcgtgaacatgccaggaatggtgacgcacatcaaagctcctgaacagcaagtgaaaaatatcttgaatgaactcttccaacgggagaacagggtattgcattactggaccatgaggaagagacggctggaccagtgtcagcagtacgtggtctttgagaggagtgccaagcaggctttggaatggatccatgacaatggcgagttctacctttccacacacacctccacgggctccagtatacagcacacccaggagctcctgaaagagcacgaggagttccagataactgcaaagcaaaccaaagagagagtgaagctattgatacagctggctgatggcttttgtgaaaaagggcatgcccatgcggcagagataaaaaaatgtgttactgctgtggataagaggtacagagatttctctctgcggatggagaagtacaggacctctttggaaaaagccctggggatttcttcagattccaacaaatcgagtaaaagtctccagctagatatcattccagccagtatccctggctcagaggtgaaacttcgagatgctgctcatgaacttaatgaagagaagcggaaatctgcccgcaggaaagagtaagccagtctttcagaatctaccaggattcactggaaaagtgaagagaatgtcatttggacagacatgcttctgtgtgtgctttgaagtcacatggcacccaggctttttgttgctctgggtggacttagttgtgtcagcacagacttcgctgcgttcactgtcctcttatcacctggttcagaaacagcatctagtttttat

SEQ ID NO: 457224 - DNA, 1648 bp, Homo sapiens
cgcggccgcgggcgccgccgcagccatgagcggcagcagcggcggagccgccgcccccgccgcgtcctccggccccgccgcggcggccagcgcggctggctcgggctgcgggggcggtgccggcgagggggcagaggaggcggccaaggacctggccgacatcgcggccttcttccgatccgggtttcgaaaaaacgatgaaatgaaagctatggatgttttaccaattttgaaggaaaaagttgcatacctttcaggtgggagagataaacgtggaggtcccattttaacgtttccggcccgcagcaatcatgacagaatacgacaggaggatctcaggagactcatttcctatctagcctgtattcccagcgaggaggtctgcaagcgtggcttcacggtgatcgtggacatgcgtgggtccaagtgggactccatcaagccccttctgaagatcctgcaggagtccttcccctgctgcatccatgtggccctgatcatcaagccagacaacttctggcagaaacagaggactaattttggcagttctaaatttgaatttgagacaaatatggtctctttagaaggccttaccaaagtagttgatccttctcagctaactcctgagtttgatggctgcctggaatacaaccacgaagaatggattgaaatcagagttgcttttgaagactacattagcaatgccacccacatgctgtctcggctggaggaacttcaggacatcctagctaagaaggagctgcctcaggatttagagggggctcggaatatgatcgaggaacattctcagctgaagaagaaggtgattaaggcccccatcgaggacctggatttggagggacagaagctgcttcagaggatacagagcagtgaaagctttcccaaaaagaactcaggctcaggcaatgcggacctgcagaacctcttgcccaaggtgtccaccatgctggaccggctgcactcgacacggcagcatctgcaccagatgtggcatgtgaggaagctgaagctggaccagtgcttccagctgaggctgtttgaacaggatgctgagaagatgtttgactggatcacacacaacaaaggcctgtttctaaacagctacacagagattgggaccagccaccctcatgccatggagcttcagacgcagcacaatcactttgccatgaactgtatgaacgtgtatgtaaatataaaccgcatcatgtcggtggccaatcgtctggtggagtctggccactatgcctcgcagcagatcaggcagatcgcgagtcagctggagcaggagtggaaggcgtttgcggcagccctggatgagcggagcaccttgctggacatgtcctccattttccaccagaaggccgaaaaggtcagtgccttgaacccccagcccacgaggtggtaaccagaatagttcttcctccatgaatattggtgtgtgtgcaaacactcttgtgtagcacatactgtgagctccgcatgtgagctctgaagtcacttggccctgagtttaaattccagctcttttagtccttgctgcgtaaccttaggcaagtgacttagcctctctgttttgttttttcatttgtaaagtagaaataaaagtacctgtttgagtggactg

SEQ ID NO: 457225 - DNA, 1650 bp, Homo sapiens
cgcggccgcgggcgccgccgcagccatgagcggcagcagcggcggagccgccgcccccgccgcgtcctccggccccgccgcggcggccagcgcggctggctcgggctgcgggggcggtgccggcgagggggcagaggaggcggccaaggacctggccgacatcgcggccttcttccgatccgggtttcgaaaaaacgatgaaatgaaagctatggatgttttaccaattttgaaggaaaaagttgcatacctttcaggtgggagagataaacgtggaggtcccattttaacgtttccggcccgcagcaatcatgacagaatacgacaggaggatctcaggagactcatttcctatctagcctgtattcccagcgaggaggtctgcaagcgtggcttcacggtgatcgtggacatgcgtgggtccaagtgggactccatcaagccccttctgaagatcctgcaggagtccttcccctgctgcatccatgtggccctgatcatcaagccagacaacttctggcagaaacagaggactaattttggcagttctaaatttgaatttgagacaaatatggtctctttagaaggccttaccaaagtagttgatccttctcagctaactcctgagtttgatggctgcctggaatacaaccacgaagaatggattgaaatcagagttgcttttgaagactacattagcaatgccacccacatgctgtctcggctggaggaacttcaggacatcctagctaagaaggagctgcctcaggatttagagggggctcggaatatgatcgaggaacattctcagctgaagaagaaggtgattaaggcccccatcgaggacctggatttggagggacagaagctgcttcagaggatacagagcagtgaaagctttcccaaaaagaactcaggctcaggcaatgcggacctgcagaacctcttgcccaaggtgtccaccatgctggaccggctgcactcgacacggcagcatctgcaccagatgtggcatgtgaggaagctgaagctggaccagtgcttccagctgaggctgtttgaacaggatgctgagaagatgtttgactggatcacacacaacaaaggcctgtttctaaacagctacacagagattgggaccagccaccctcatgccatggagcttcagacgcagcacaatcatataggagaaagcaaaatacatcagcttggtagttaacacatcaaatatttcttgctgttctaggagaacttttggtgtgtgtggaatggctgagcaaatattaaaattgttaatatgcagcatatatggaaggtacctgtggggtgttaacgtgtttgataatgggggggggataatgtgcctcccattcattagaaaatgaggaaaatggtctgggttccaaaatatggaccattgaatggctcaatactacacacacagagcatatatttatatatatgcgaccaatatataggcacgtgaatgctagcaggggtactttaataaccattataatcgggtaatatggggaatcataaaatattcccggactataaattgggcccttggggtaagcctgaaaacctttatggtacaagatcagaattcgtggataaccgtcctttaaagataagcgagaggggtta

SEQ ID NO: 457226 - DNA, 1831 bp, Homo sapiens
cgcggccgcgggcgccgccgcagccatgagcggcagcagcggcggagccgccgcccccgccgcgtcctccggccccgccgcggcggccagcgcggctggctcgggctgcgggggcggtgccggcgagggggcagaggaggcggccaaggacctggccgacatcgcggccttcttccgatccgggtttcgaaaaaacgatgaaatgaaagctatggatgttttaccaattttgaaggaaaaagttgcatacctttcaggtgggagagataaacgtggaggtcccattttaacgtttccggcccgcagcaatcatgacagaatacgacaggaggatctcaggagactcatttcctatctagcctgtattcccagcgaggaggtctgcaagcgtggcttcacggtgatcgtggacatgcgtgggtccaagtgggactccatcaagccccttctgaagatcctgcaggagtccttcccctgctgcatccatgtggccctgatcatcaagccagacaacttctggcagaaacagaggactaattttggcagttctaaatttgaatttgagacaaatatggtctctttagaaggccttaccaaagtagttgatccttctcagctaactcctgagtttgatggctgcctggaatacaaccacgaagaatggattgaaatcagagttgcttttgaagactacattagcaatgccacccacatgctgtctcggctggaggaacttcaggacatcctagctaagaaggagctgcctcaggatttagagggggctcggaatatgatcgaggaacattctcagctgaagaagaaggtgattaaggcccccatcgaggacctggatttggagggacagaagctgcttcagaggatacagagcagtgaaagctttcccaaaaagaactcaggctcaggcaatgcggacctgcagaacctcttgcccaaggtgtccaccatgctggaccggctgcactcgacacggcagcatctgcaccagatgtggcatgtgaggaagctgaagctggaccagtgcttccagctgaggctgtttgaacaggatgctgagaagatgtttgactggatcacacacaacaaaggcctgtttctaaacagctacacagagattgggaccagccaccctcatgccatggagcttcagacgcagcacaatcactttgccatgaactgtatgaacgtgtatgtaaatataaaccgcatcatgtcggtggccaatcgtctggtggagtctggccactatgcctcgcagcagatcaggcagatcgcgagtcagctggagcaggagtggaaggcgtttgcggcagccctggatgagcggagcaccttgctggacatgtcctccattttccaccagaaggccgaaaagtatatgagcaacgtggattcatggtgtaaagcttgcggtgaggtagaccttccctcagagctgcaggacctagaagatgccattcatcaccaccagggaatatatgaacatatcactcttgcttattctgaggtcagccaagatgggaagtcgctccttgacaagctccagcggcccttgactcccggcagctccgattccctgacagcctctgccaactactccaaggccgtgcaccatgtcctggatgtcatccacgaggtgctgcaccaccagcggcagcgtgagaacatctggcaacaccgcaaggtccggctgcatcagaggctgcagctgtgtgttttccagcaggacgttcagcaggtcagtttcgcctcatgcccttctgcatgggaaatggcttgtgttgagtagagtttaaatacatcatcatattgg

SEQ ID NO: 457227 - DNA, 854 bp, Homo sapiens
tcccgcccccctgcctctgtcccgccaactctaaacgccaccgcggctgttctcactaactcggctgcccagcgctctccgccgcccgttgcggcctctacctgggaccaggctaaccctcctgcgggccggcccacggcgctactaactactccttgctttgttcgtgtcttctaataagagcaagccgatcattaaccttctcaacgcagcgtcttttggtttcttccatttccaaccagcagaatatcttcttggaactttcttttttaacctctgccttcctcacgcacctattttttggagggttccttttccctgctctctacctcctgtttaaattgaaacctgtacactttaagctttttgctcatcgcttggttttgctcttttatgccttaaattatctttgcggcatttttgactcatctgctggggaagaccattccctcaagaaaacttccaacagcaactcaaagcaaactaagatgaaaaaatggggggaaagaatctgtccactgggaacgctttacgtcaccgtgttgctctggaagacagagactgctctgggcacctggcgaggcggctctgcagtgcaggctggggccggtccctgcggcctgctgggctctggcctcgtttggcccatcactcatgctgccgtctcaagcacaagggttgctgtggtgggttttccctctgtttcctgcttcctcactgtcctacccacctgtttcctacagggcagatggcctggcccgtaacactttcctgaaggcatgcgtgagtgaatagaactgttctaatgagtgtatgtttgaacgctttataaatttttaaatacatttctctaa

SEQ ID NO: 457228 - DNA, 927 bp, Homo sapiens
catcccaaaataaggagttatcgaactttatagttaaaattgagtctaatgaaaagcctatttacaatattaaataaagggttggttatcatgtgggtaacataaacacatattgtcagttaccataataacatcacataacaaagtttcaaccagggttggcaagttctgaactgagggctaagttgggccacattgatacagtttacctgtcacctgtggctgctttcatctgttgtttgtttgagtagttgtgacggagaaacagactgtatgaccccccaaaactgaaagtgtttactgtctaccctacgtagaaatccaggcacagcccagctgagttctgcagctcaaggtcactccttaggctgtgatccagggtcaggccaggtgtgcaaacctctctagactggacggagacagggcttcccttcctccgtgaccgtaagccaggggctgccctctgtttcctgccccatgggcctctctatagggcagaatgtagcagcaggtgtcatcagagcgagggcttcaggagagagagatttttttttaattgaattagattttatcctatgcattttctaaaccagcaggtggccagataaatattttaggtaaagacatacgttagagtgcagtgatgtgtactccaaatacacgtttgtagaagtcaaattagcaacacattgctctccattgttttttaggcttgcacccttgctcggaggaatgcagacgtcttcctgaaatacctgcacaggaacagcgtgaacatgccaggaatggtgacgcacatcaaagctcctgaacagcaagtgaaaagtgagtagagctgggagtctccaggggtggcccatgccaacagtagcctagaataaaagaaaaaagaaactataaaataaccaaacaaaaaaaacaaacaaa

SEQ ID NO: 457229 - DNA, 864 bp, Homo sapiens
agctctagttagtctagtgctttttttcctcgttacttttactgccagtgttgtagtctttctgacaattacaaagactaaaaaattgccctttaatgaatagcccatacgatcttttctctctcttaaaactgtaggacttaaagcagcgtcttggccacaggttacagctcacagatctgttgatcaaaccagtgcagagaatcatgaagtatcagctgttactgaaggtgaggaggtggcgggacaaactctggtgtcaggagtgagtttgctgagaaaataagactcagttggggaaagaaggatttggtaggacaggggaatcatctgtgtaacaggtatattatttctgataagttaaaccttaaaaatttaaatcagctgttagctgaggcaggaggatagcttgaggccaggagttggaggctgcagtgagcttatgattgctcctttgaatagccactacactccagcctggacaacatagtgagagcttgtctatttaaaaaaaaaaattctttcagaactaaagtgctgaaccccaatgtctggccagtgtgagtggccaaaaaggttagcttgtgtgcattgtctcattcctgtagtcccagctactcaggaggccaaagcaagaggatcacttgaggccaggagttcaagaccacatcgtggctaacacagtgaaaccctgtctctgctaaaaataacaaaaaattagccggcgtggtggcaagcgcctgtagtcccagctactcttgaggctgaggcaggagaatcacttgaacccaggaggcagaggttgcagtgagccgagatcatgccactgcactccagcctgggtgacagagcgagactctgtct

SEQ ID NO: 457230 - DNA, 630 bp, Homo sapiens
caattggatagatctggtctgactctgtgtactgcagcttgaaatctacataggaatgcctttttgttgtgttactgagagaataatatgataaagtagaactaaggcaccagacaggtgtggtggtacacacctgtagacccggctacttgggaggctgaggcaggaggatagcttgaggccaggagttggaggctgcagtgagcttatgattgctcctttgaatagccactacactccagcctggacaacatagtgagagcttgtctatttaaaaaaaaaaattctttcagaactaaagtgctgaaccccaatgtctggccagtgtgagtggccaaaaaggttagcttgtgtgcattgtctcattcctgtagtcccagctactcaggaggccaaagcaagaggatcacttgaggccaggagttcaagaccacatcgtggctaacacagtgaaaccctgtctctgctaaaaataacaaaaaattagccggcgtggtggcaagcgcctgtagtcccagctactcttgaggctgaggcaggagaatcacttgaacccaggaggcagaggttgcagtgagccgagatcatgccactgcactccagcctgggtgacagagcgagactctgtct

SEQ ID NO: 457231 - DNA, 1655 bp, Homo sapiens
ttccgctcggtgatctcgcagatcccgaccgcgcagaagatcatcccggccgagctgccgcaggcccagaccaagggcgccggggccgacgcggcgctcgaggcctctcccatctgtgccgcagtgacctgggagaggccacgctgaagattgtgggcgtgaccacggaagatgacggcatctacacgtgcatcgctgtcaatgacatgggttcagcctcatcgtcggccagcctgagggtcctaggtaagcaccgtgcaacgaggattctacgtgacccagtggggcacgtctttcaggagtctccttaagtcctgagtctgcccttacactccaagtggcctgaaagatagaacaataagtcatttgtggggcttcaaaagacagttgtaagtagcagaccagagtgtctgggatgtcacaggagagtgacctctcggcaccttatgtaaagtcgggggagacaccggagctcctgttgctgggaggaggatgggggcctgcctggtgaaggcctctggctgcccaccatggggcaccagggccccccacgaccagcttctgagttggagcagggtgctttccgtgctcctagtactcaaaacactcatatccagctacccagctgaatctggatctggtctaggttggtctcatgtagaatgtgcatgggaaaagcaggaaaggagatgtgggtgagtcccgggcctgcgcaggccctgtgcctgtctgagaccctaacagcaacccttctgggtgaatgcacgccctcctcaccccatccaggaggagccaggcccagggcggctcagtagcttgtccagagcatctggctaggaggcatctgccatggggcctgcttgctccagtgtgaagagcttgttctttctcatcagctaaaccacaagctccctggggcagaaccaatatcttaggctctttcaaaacgtcctgtagttgcctgatgtagatagctgctgagaaaggtgtggactgttctctgctgccatcttgcagaaggccggccatgcagtactgggctgcaccacaaatggaggtgcctccagaggacaaataaaactccaaatgaaagataaattgagtcctggagcaccccgtctgtagacaataagcagaatttgtcttagaacttttgtcccagatatcttaatttcctgtttttaacaacattaaatcagaagacatgttctgattttttggatcatggaacaagaaatctaaaactctagaatttggcagtaaacaataaaaggtaaagattttctaatttgtaaataacacagaaattacacaggtgattttttttttttaatcactggcaaaagctaaaggactttagaaaggtatactattcagctgggcgtagtggctcacacctgtaatcccagcgctttgggaggccgaggtgggtggatcaccaggtcaggagatcgagaccatcgtggctaacacagtgaaaccctgtctctgctaaaaataacaaaaaattagccggcgtggtggcaagcgcctgtagtcccagctactcttgaggctgaggcaggagaatcacttgaacccaggaggcagaggttgcagtgagccgagatcatgccactgcactccagcctgggtgacagagcgagactctgtct

SEQ ID NO: 457232 - DNA, 348 bp, Homo sapiens
cttggatccatgaaatcaaccaaattttagaaaaccagcgcaattttttaaatggtaatgtgtgttctgttactagatgtgtgccttctttcctcgtgtactcacttgtatttatcttccctctcccattcatatccatagtaatgacagaacttagcactcaccactcttcaggcactgcctagatattgctttatttcatcttcacaaccaccctgtgtggccagtactattattattcctgctttacagatgagaaagctggggcactgagcggctgagtaatttgcttcgagtcccacaagttgttgagggcagagtcaggacacagagtggccatctggctct

SEQ ID NO: 457233 - DNA, 514 bp, Homo sapiens
agggatgcttaaagagcccacatattccaaagcatggaacgcccaacactgggtcagaacagaaatttggaacagaactttatctcattttatcaccatatttcatgataatcccccagatagccttcaagcagagttttttttagtctgctgtaagttaaaaaatgagtgtatatataataccactttgtgaggaaggaaatagaatgtctcaggttcaagaaatttggaagctcttatgaaaaatcatattttcatacggagagtgatcacacaacctcggagcactcagctcactccggggcagggtggcaggaacccacctggaggacttcccagctgtacctgaaggcaccatggctcacactggctgacctgtcctctcttcctctgttccccccagctctctggtggctgtgagctgacagtggtgatccatgacttcaccgcttgcaacagcaacgagctgaccatccgacggggccagaccgtggaagttctggagcggccgcat

SEQ ID NO: 457234 - DNA, 10906 bp, Homo sapiens
cgcggccgcgggcgccgccgcagccatgagcggcagcagcggcggagccgccgcccccgccgcgtcctccggccccgccgcggcggccagcgcggctggctcgggctgcgggggcggtgccggcgagggggcagaggaggcggccaaggacctggccgacatcgcggccttcttccgatccgggtttcgaaaaaacgatgaaatgaaagctatggatgttttaccaattttgaaggaaaaagttgcatacctttcaggtgggagagataaacgtggaggtcccattttaacgtttccggcccgcagcaatcatgacagaatacgacaggaggatctcaggagactcatttcctatctagcctgtattcccagcgaggaggtctgcaagcgtggcttcacggtgatcgtggacatgcgtgggtccaagtgggactccatcaagccccttctgaagatcctgcaggagtccttcccctgctgcatccatgtggccctgatcatcaagccagacaacttctggcagaaacagaggactaattttggcagttctaaatttgaatttgagacaaatatggtctctttagaaggccttaccaaagtagttgatccttctcagctaactcctgagtttgatggctgcctggaatacaaccacgaagaatggattgaaatcagagttgcttttgaagactacattagcaatgccacccacatgctgtctcggctggaggaacttcaggacatcctagctaagaaggagctgcctcaggatttagagggggctcggaatatgatcgaggaacattctcagctgaagaagaaggtgattaaggcccccatcgaggacctggatttggagggacagaagctgcttcagaggatacagagcagtgaaagctttcccaaaaagaactcaggctcaggcaatgcggacctgcagaacctcttgcccaaggtgtccaccatgctggaccggctgcactcgacacggcagcatctgcaccagatgtggcatgtgaggaagctgaagctggaccagtgcttccagctgaggctgtttgaacaggatgctgagaagatgtttgactggatcacacacaacaaaggcctgtttctaaacagctacacagagattgggaccagccaccctcatgccatggagcttcagacgcagcacaatcactttgccatgaactgtatgaacgtgtatgtaaatataaaccgcatcatgtcggtggccaatcgtctggtggagtctggccactatgcctcgcagcagatcaggcagatcgcgagtcagctggagcaggagtggaaggcgtttgcggcagccctggatgagcggagcaccttgctggacatgtcctccattttccaccagaaggccgaaaagtatatgagcaacgtggattcatggtgtaaagcttgcggtgaggtagaccttccctcagagctgcaggacctagaagatgccattcatcaccaccagggaatatatgaacatatcactcttgcttattctgaggtcagccaagatgggaagtcgctccttgacaagctccagcggcccttgactcccggcagctccgattccctgacagcctctgccaactactccaaggccgtgcaccatgtcctggatgtcatccacgaggtgctgcaccaccagcggcagcgtgagaacatctggcaacaccgcaaggtccggctgcatcagaggctgcagctgtgtgttttccagcaggacgttcagcaggtgctagactggatcgagaaccacggagaagcatttctgagcaaacatacaggtgtggggaaatctcttcatcgggccagagcattgcagaaacgtcatgaagattttgaagaagtggcacagaacacatacaccaatgcggataaattactggaagcagcagaacagctggctcagactggggaatgtgaccccgaagagatttatcaggctgcccatcagctggaagaccggattcaagatttcgttcggcgtgttgagcagcgaaagatcctactggacatgtcagtgtcctttcacacccatgtgaaagagctgtggacgtggctggaggagctgcagaaggagctgctggacgacgtgtatgccgagtcggtggaggccgtgcaggacctcatcaagcgctttggccagcagcagcagaccaccctgcaggtgactgtcaacgtgatcaaggaaggggaggacctcatccagcagctcagggactctgccatctccagtaacaagaccccccacaacagctccatcaaccacattgagacggtgctgcagcagctggacgaggcgcagtcgcagatggaggagctcttccaggagcgcaagatcaagctggagctcttcctgcacgtgcgcatcttcgagagggacgccatcgacattatctcagacctcgagtcttggaatgatgagctttctcagcaaatgaatgacttcgacacagaagatctcacgattgcagagcagcgcctccagcaccatgcagacaaagccttgaccatgaacaacttgacttttgacgtcatccaccaagggcaagatcttctgcagtatgtcaatgaggtccaggcctctggtgtggagctgctgtgtgatagagatgtagacatggcaactcgggtccaggacctgctggagtttcttcatgaaaaacagcaggaattggatttagccgcagagcagcatcggaaacacctggagcagtgcgtgcagctgcgccacctgcaggcagaagtgaaacaggtgctgggttggatccgcaacggagagtccatgttaaatgccggacttatcacagccagctcgttacaagaggcagagcagctccagcgagagcacgagcagttccagcatgccattgagaaaacacatcagagcgcgctgcaggtgcagcagaaggcagaagccatgctacaggccaaccactacgacatggacatgatccgggactgcgccgagaaggtggcgtctcactggcaacagctcatgctcaagatggaagatcgcctcaagctcgtcaacgcctctgtcgctttctacaaaacctcagagcaggtctgcagcgtcctcgagagcctggaacaggagtacaagagagaagaagactggtgtggcggggcggataagctgggcccaaactctgagacggaccacgtgacgcccatgatcagcaagcacctggagcagaaggaggcattcctgaaggcttgcacccttgctcggaggaatgcagacgtcttcctgaaatacctgcacaggaacagcgtgaacatgccaggaatggtgacgcacatcaaagctcctgaacagcaagtgaaaaatatcttgaatgaactcttccaacgggagaacagggtattgcattactggaccatgaggaagagacggctggaccagtgtcagcagtacgtggtctttgagaggagtgccaagcaggctttggaatggatccatgacaatggcgagttctacctttccacacacacctccacgggctccagtatacagcacacccaggagctcctgaaagagcacgaggagttccagataactgcaaagcaaaccaaagagagagtgaagctattgatacagctggctgatggcttttgtgaaaaagggcatgcccatgcggcagagataaaaaaatgtgttactgctgtggataagaggtacagagatttctctctgcggatggagaagtacaggacctctttggaaaaagccctggggatttcttcagattccaacaaatcgagtaaaagtctccagctagatatcattccagccagtatccctggctcagaggtgaaacttcgagatgctgctcatgaacttaatgaagagaagcggaaatctgcccgcaggaaagagttcataatggctgagctcattcaaactgaaaaggcttatgtaagagacctccgggaatgtatggatacgtacctgtgggaaatgaccagtggcgtggaagagattccacctggcattgtaaacaaagaactcatcatcttcggaaacatgcaagaaatctacgaatttcataataacatattcctaaaggagctggaaaaatatgaacagttgccagaggatgttggacattgttttgttacttgggcagacaagtttcagatgtatgtcacatattgcaaaaataagcctgattctactcagctgatattggaacatgcagggtcctattttgacgagatacagcagcgacatggattagccaattccatttcttcctaccttattaaaccagttcagcgaataacgaagtatcagctccttttaaaagagctgctgacgtgctgtgaggaaggaaagggagagattaaagatggcctggaggtgatgctcagcgtgccgaagcgagccaatgatgccatgcacctcagcatgctggaagggtttgatgaaaacattgagtctcagggagaactcatcctacaggaatccttccaagtgtgggacccaaaaaccttaattcgaaagggtcgagaacggcatctcttcctttttgaaatgtccttagtatttagtaaagaagtgaaagattccagtgggagaagcaagtacctttataaaagcaaattgtttacctcagagttgggtgtcacagaacatgttgaaggagacccttgcaaatttgcactgtgggtggggagaacaccaacttcagataataaaattgtccttaaggcttccagcatagagaacaagcaggactggataaagcatatccgcgaagtcatccaggagcggacgatccacctgaagggagccctgaaggagcccattcacatccctaagaccgctcccgccacaagacagaagggaaggagggatggagaggatctggacagccaaggagacggcagcagccagcctgatacgatttccatcgcctcacggacgtctcagaacacgctggacagcgataagctctctggtggctgtgagctgacagtggtgatccatgacttcaccgcttgcaacagcaacgagctgaccatccgacggggccagaccgtggaagttctggagcggccgcatgacaagcctgactggtgtctggtgcggaccactgaccgctccccagcggcagaaggcctggtcccctgtggttcactgtgcatcgcccactccagaagtagcatggaaatggagggcatcttcaaccacaaagactcgctctccgtctccagcaatgacgccagtccacccgcatccgtggcttccctccagccccacatgatcggggcccagagctcgccgggccccaagcggccgggcaacaccctgcgcaagtggctcaccagccccgtgcggcggctcagcagcggcaaggccgacgggcacgtgaagaagctggcgcacaagcacaagaagagccgcgaggtccgcaagagcgccgacgccggctcgcagaaggactccgacgacagtgcggccaccccgcaggacgagacggtcgaggagagaggccggaacgagggcctgagcagcggtactctctccaaatcctcctcctcggggatgcagagctgtggagaagaggaaggcgaggagggggccgacgccgtgcccctgccgccacccatggccatccagcagcacagcctcctccagccagactcacaggatgacaaggcctcttctcggttattagtccgccccaccagctccgaaacaccgagtgcagccgagctcgtcagtgcaattgaggaactcgtgaaaagcaagatggcactggaggatcgccccagctcactccttgttgaccagggagatagtagcagcccttccttcaacccttcggataattcccttctctcttcctcctcgcccattgatgagatggaagaaaggaaatccagctctttaaagagaagacactacgttttgcaagaactagtggagacagagcgtgactatgtgcgggaccttggctatgtggttgagggctacatggcacttatgaaagaagatggtgttcctgatgacatgaaaggaaaagacaaaattgtgttcggcaacatccatcagatttacgactggcacagagacttttttttaggagagttagagaagtgccttgaagatccagaaaaactaggatccctttttgttaaacacgagagaaggttgcacatgtacatagcttattgtcaaaataaaccaaagtctgagcacattgtctcagaatacattgataccttttttgaggacttaaagcagcgtcttggccacaggttacagctcacagatctgttgatcaaaccagtgcagagaatcatgaagtatcagctgttactgaaggacttcctcaagtattccaaaaaggccagcctggatacatcagaattagagagagctgtggaagtcatgtgcatagtacccaggcggtgcaacgacatgatgaacgtggggcggctgcaaggattcgacgggaaaatcgttgcccagggtaaactgctcttgcaggacacattcttggtcacagaccaagatgcaggacttctgcctcgctgcagagagaggcgcatcttcctctttgagcagatcgtcatattcagcgaaccacttgataaaaagaagggcttctccatgccgggattcctgtttaagaacagtatcaaggtgagttgcctttgcctggaggaaaatgtggaaaatgatccctgtaaatttgctctgacatcgaggacgggtgacgtggtagagaccttcattttgcattcatctagtccaagtgtccggcaaacttggatccatgaaatcaaccaaattttagaaaaccagcgcaattttttaaatgccttgacatcgccaatcgagtaccagaggaaccacagcgggggcggcggcggcggcggcagcgggggcagcggcgggggtgggggcagcggcggcggcggggcccccagtggcggcagcggccacagtggcggccccagcagctgcggcggcgcccccagcacgagcaggagccggccctcccggatcccccagcctgtccgacaccacccccccgtgctggtctcctctgcagcctcgagccaggcagaggcagacaagatgtcagagtgaaagcagcagcagtagcaacatctccaccatgttggtgacacacgattacacggcagtgaaggaggatgagatcaacgtctaccaaggagaggtcgttcaaattctggccagcaaccagcagaacatgtttctggtgttccgagccgccactgaccagtgccccgcagctgagggctggattccaggctttgtcctgggccacaccagtgcagtcatcgtggagaacccggacgggactctcaagaagtcaacatcttggcacacagcactccgtttaaggaaaaaatctgagaaaaaagataaagacggcaaaagggaaggcaagttagagaacggttatcggaagtcacgggaaggactcagcaacaaggtatctgtgaagcttctcaatcccaactacatttatgacgttcccccagaattcgtcattccattgagtgaggtcacgtgtgagacaggggagaccgttgttcttagatgtcgagtctgtggccgccccaaagcctcaattacctggaagggccctgaacacaacaccttgaacaacgatggtcactacagcatctcctacagtgacctgggagaggccacgctgaagattgtgggcgtgaccacggaagatgacggcatctacacgtgcatcgctgtcaatgacatgggttcagcctcatcgtcggccagcctgagggtcctaggtccagggatggatgggatcatggtgacctggaaagacaactttgactccttctacagtgaagtggctgagcttggcaggggcagattctctgtcgttaagaaatgtgatcagaaaggaaccaagcgagcagtggccactaagtttgtgaacaagaagttgatgaagcgcgaccaggtcacccatgagcttggcatcctgcagagcctccagcaccccctgcttgtcggcctcctcgacacctttgagacccccaccagctacatcctggtcttagaaatggctgaccagggtcgcctcctggactgcgtggtgcgatggggaagcctcactgaagggaagatcagggcgcacctgggggaggttctggaagctgtccggtacctgcacaactgcaggatagcacacctggacctaaagcctgagaatatcctggtggatgagagtttagccaagccaaccatcaaactggctgactttggagatgctgttcagctcaacacgacctactacatccaccagttactggggaaccctgaattcgcagcccctgaaatcatcctcgggaaccctgtctccctgacctcggatacgtggagtgttggagtgctcacatacgtacttcttagtggcgtgtcccccttcctggatgacagtgtggaagagacctgcctgaacatttgccgcttagactttagcttcccagatgactactttaaaggagtgagccagaaggccaaggagttcgtgtgcttcctcctgcaggaggaccccgccaagcgtccctcggctgcgctggccctccaggagcagtggctgcaggccggcaacggcagaagcacgggcgtcctcgacacgtccagactgacttccttcattgagcggcgcaaacaccagaatgatgttcgacctatccgtagcattaaaaactttctgcagagcaggcttctgcctagagtttgacctatccagaagttctttctcattctctttcacctgccaatcagctgttaatctgaattttcaagagaaaacaagcaaacataactgatcagctgccggtatgttcatcgtgtgaaattgcattccaagtgagctgtgctcagcagtgcttggacacagagctgcaagctgcgctggggtggaggaccgtcacttacactctgcccaaggcagaggtcgcattgctgtatcacagtattttattcaggtttctgcaaaaaaataaaaagataacttttttaaacaaacatgaatagaattttgcaaatttaacgttttcaagatttattcaaggaaacaaaatgcctatgttcaaccactggtgttaatgaacaaagatactgtgcgtctctggggaagacgcacctaggtggcggccactcccatggccttgtctagggctcagagaccactcggctctgagcttccaggcgcctcgtctgtgtgcatctcacgcccgacgtggcttctgaaacgtgcattcaacctcaaacttttgcataaaatagaatgaatcgttttgctctgatgaaatgtaggccttacttgtatataagactgttcctgccttcggtctgtcattttcccacctgcctcccctacccaccccccacccaccacctggggcttcctctgggggtccgagggtcttcccatcacatgaagacatcaggttgggtcctgccccactgcccctccccctgttcctgccccaagccgtcaatcagattgtggagcagtacacagtcagatgaaaatactgtaaatgcactcattgggggttttttggttttacttcatatcatgtgcaatgttgtggctttaacattttatgcaactatttatgaagacctctgttgtacctgtaataaatatatagaaaaagcacatacttcgtatggtgagctttatggttttgtgtgtgtgttggggttggcgggtgggtgggtagggtcgtagccctgtgccatcggttcaaagagacttttcgtgaaatttgttggttttgaggactgtaaaagtgatttcatactctgaatataaaactggataatagggtaatgttttaaaatttattatgctattattcagaatgccaaagtattattttttttcccaaaatcagtctggacatttactactttttagactttttgacgttgaactttctgtataaaaattggctgggttttgagcttttggtaagaaataaaagccgattaagcactggccgccccgcggctggtacccaatgcccgagtcactgtggcagcattcgcactggtgtggggagtcctttcaactcaaggaggctgggtttctgggcaccctcgaagttttctggatgtctttttatctttctcgtgtgaactgcactacaaaagagaccagcccgcttcccaagccagccagacacctgggtcttgagccataaactggcgtagttaagctttgcagcttccagtgtattttatttattcttttgttgggtttttgtttgtttcttcttgtaaaattgtacagaaactttttaaaagaaattggattcgaaactggatgtgtattcgtaacctcataatttttatttgtgtattgtttcttttattatttcagttaaatttttacattattttgcatgtatatttctttgtacagagaccttacatgtttacacagtatgatgtgatgtaaatattttattttgccatcagttattttaaaaaattaaacatatttgcctgaaaaaaaaaaaaaaaaaaaaaaaaaaaaaaaaaaaaaaaaaaaaaaaaaaaaaaaaaaaaaaaaaaaagggggggggggctccttaagaaattctcatccccggggggggccgcccagtatttttgcgtcgtgccggcgctgtttttttttgatgaaacggagggtgcccccattatttgggcggcttttttttaaagacgaggagaccggcgcgggtgttttttcaaccgcctcgcttgtcggcgggggcaacatcgtgttgtgtggagcttttttggtggaggaccacccctcttctggggggggcgccaattgtgcgggaccgagttcctcgg

SEQ ID NO: 457235 - DNA, 11436 bp, Homo sapiens
cgcggccgcgggcgccgccgcagccatgagcggcagcagcggcggagccgccgcccccgccgcgtcctccggccccgccgcggcggccagcgcggctggctcgggctgcgggggcggtgccggcgagggggcagaggaggcggccaaggacctggccgacatcgcggccttcttccgatccgggtttcgaaaaaacgatgaaatgaaagctatggatgttttaccaattttgaaggaaaaagttgcatacctttcaggtgggagagataaacgtggaggtcccattttaacgtttccggcccgcagcaatcatgacagaatacgacaggaggatctcaggagactcatttcctatctagcctgtattcccagcgaggaggtctgcaagcgtggcttcacggtgatcgtggacatgcgtgggtccaagtgggactccatcaagccccttctgaagatcctgcaggagtccttcccctgctgcatccatgtggccctgatcatcaagccagacaacttctggcagaaacagaggactaattttggcagttctaaatttgaatttgagacaaatatggtctctttagaaggccttaccaaagtagttgatccttctcagctaactcctgagtttgatggctgcctggaatacaaccacgaagaatggattgaaatcagagttgcttttgaagactacattagcaatgccacccacatgctgtctcggctggaggaacttcaggacatcctagctaagaaggagctgcctcaggatttagagggggctcggaatatgatcgaggaacattctcagctgaagaagaaggtgattaaggcccccatcgaggacctggatttggagggacagaagctgcttcagaggatacagagcagtgaaagctttcccaaaaagaactcaggctcaggcaatgcggacctgcagaacctcttgcccaaggtgtccaccatgctggaccggctgcactcgacacggcagcatctgcaccagatgtggcatgtgaggaagctgaagctggaccagtgcttccagctgaggctgtttgaacaggatgctgagaagatgtttgactggatcacacacaacaaaggcctgtttctaaacagctacacagagattgggaccagccaccctcatgccatggagcttcagacgcagcacaatcactttgccatgaactgtatgaacgtgtatgtaaatataaaccgcatcatgtcggtggccaatcgtctggtggagtctggccactatgcctcgcagcagatcaggcagatcgcgagtcagctggagcaggagtggaaggcgtttgcggcagccctggatgagcggagcaccttgctggacatgtcctccattttccaccagaaggccgaaaagtatatgagcaacgtggattcatggtgtaaagcttgcggtgaggtagaccttccctcagagctgcaggacctagaagatgccattcatcaccaccagggaatatatgaacatatcactcttgcttattctgaggtcagccaagatgggaagtcgctccttgacaagctccagcggcccttgactcccggcagctccgattccctgacagcctctgccaactactccaaggccgtgcaccatgtcctggatgtcatccacgaggtgctgcaccaccagcggcagcgtgagaacatctggcaacaccgcaaggtccggctgcatcagaggctgcagctgtgtgttttccagcaggacgttcagcaggtgctagactggatcgagaaccacggagaagcatttctgagcaaacatacaggtgtggggaaatctcttcatcgggccagagcattgcagaaacgtcatgaagattttgaagaagtggcacagaacacatacaccaatgcggataaattactggaagcagcagaacagctggctcagactggggaatgtgaccccgaagagatttatcaggctgcccatcagctggaagaccggattcaagatttcgttcggcgtgttgagcagcgaaagatcctactggacatgtcagtgtcctttcacacccatgtgaaagagctgtggacgtggctggaggagctgcagaaggagctgctggacgacgtgtatgccgagtcggtggaggccgtgcaggacctcatcaagcgctttggccagcagcagcagaccaccctgcaggtgactgtcaacgtgatcaaggaaggggaggacctcatccagcagctcagggactctgccatctccagtaacaagaccccccacaacagctccatcaaccacattgagacggtgctgcagcagctggacgaggcgcagtcgcagatggaggagctcttccaggagcgcaagatcaagctggagctcttcctgcacgtgcgcatcttcgagagggacgccatcgacattatctcagacctcgagtcttggaatgatgagctttctcagcaaatgaatgacttcgacacagaagatctcacgattgcagagcagcgcctccagcaccatgcagacaaagccttgaccatgaacaacttgacttttgacgtcatccaccaagggcaagatcttctgcagtatgtcaatgaggtccaggcctctggtgtggagctgctgtgtgatagagatgtagacatggcaactcgggtccaggacctgctggagtttcttcatgaaaaacagcaggaattggatttagccgcagagcagcatcggaaacacctggagcagtgcgtgcagctgcgccacctgcaggcagaagtgaaacaggtgctgggttggatccgcaacggagagtccatgttaaatgccggacttatcacagccagctcgttacaagaggcagagcagctccagcgagagcacgagcagttccagcatgccattgagaaaacacatcagagcgcgctgcaggtgcagcagaaggcagaagccatgctacaggccaaccactacgacatggacatgatccgggactgcgccgagaaggtggcgtctcactggcaacagctcatgctcaagatggaagatcgcctcaagctcgtcaacgcctctgtcgctttctacaaaacctcagagcaggtctgcagcgtcctcgagagcctggaacaggagtacaagagagaagaagactggtgtggcggggcggataagctgggcccaaactctgagacggaccacgtgacgcccatgatcagcaagcacctggagcagaaggaggcattcctgaaggcttgcacccttgctcggaggaatgcagacgtcttcctgaaatacctgcacaggaacagcgtgaacatgccaggaatggtgacgcacatcaaagctcctgaacagcaagtgaaaaatatcttgaatgaactcttccaacgggagaacagggtattgcattactggaccatgaggaagagacggctggaccagtgtcagcagtacgtggtctttgagaggagtgccaagcaggctttggaatggatccatgacaatggcgagttctacctttccacacacacctccacgggctccagtatacagcacacccaggagctcctgaaagagcacgaggagttccagataactgcaaagcaaaccaaagagagagtgaagctattgatacagctggctgatggcttttgtgaaaaagggcatgcccatgcggcagagataaaaaaatgtgttactgctgtggataagaggtacagagatttctctctgcggatggagaagtacaggacctctttggaaaaagccctggggatttcttcagattccaacaaatcgagtaaaagtctccagctagatatcattccagccagtatccctggctcagaggtgaaacttcgagatgctgctcatgaacttaatgaagagaagcggaaatctgcccgcaggaaagagttcataatggctgagctcattcaaactgaaaaggcttatgtaagagacctccgggaatgtatggatacgtacctgtgggaaatgaccagtggcgtggaagagattccacctggcattgtaaacaaagaactcatcatcttcggaaacatgcaagaaatctacgaatttcataataacatattcctaaaggagctggaaaaatatgaacagttgccagaggatgttggacattgttttgttacttgggcagacaagtttcagatgtatgtcacatattgcaaaaataagcctgattctactcagctgatattggaacatgcagggtcctattttgacgagatacagcagcgacatggattagccaattccatttcttcctaccttattaaaccagttcagcgaataacgaagtatcagctccttttaaaagagctgctgacgtgctgtgaggaaggaaagggagagattaaagatggcctggaggtgatgctcagcgtgccgaagcgagccaatgatgccatgcacctcagcatgctggaagggtttgatgaaaacattgagtctcagggagaactcatcctacaggaatccttccaagtgtgggacccaaaaaccttaattcgaaagggtcgagaacggcatctcttcctttttgaaatgtccttagtatttagtaaagaagtgaaagattccagtgggagaagcaagtacctttataaaagcaaattgtttacctcagagttgggtgtcacagaacatgttgaaggagacccttgcaaatttgcactgtgggtggggagaacaccaacttcagataataaaattgtccttaaggcttccagcatagagaacaagcaggactggataaagcatatccgcgaagtcatccaggagcggacgatccacctgaagggagccctgaaggagcccattcacatccctaagaccgctcccgccacaagacagaagggaaggagggatggagaggatctggacagccaaggagacggcagcagccagcctgatacgatttccatcgcctcacggacgtctcagaacacgctggacagcgataagctctctggtggctgtgagctgacagtggtgatccatgacttcaccgcttgcaacagcaacgagctgaccatccgacggggccagaccgtggaagttctggagcggccgcatgacaagcctgactggtgtctggtgcggaccactgaccgctccccagcggcagaaggcctggtcccctgtggttcactgtgcatcgcccactccagaagtagcatggaaatggagggcatcttcaaccacaaagactcgctctccgtctccagcaatgacgccagtccacccgcatccgtggcttccctccagccccacatgatcggggcccagagctcgccgggccccaagcggccgggcaacaccctgcgcaagtggctcaccagccccgtgcggcggctcagcagcggcaaggccgacgggcacgtgaagaagctggcgcacaagcacaagaagagccgcgaggtccgcaagagcgccgacgccggctcgcagaaggactccgacgacagtgcggccaccccgcaggacgagacggtcgaggagagaggccggaacgagggcctgagcagcggtactctctccaaatcctcctcctcggggatgcagagctgtggagaagaggaaggcgaggagggggccgacgccgtgcccctgccgccacccatggccatccagcagcacagcctcctccagccagactcacaggatgacaaggcctcttctcggttattagtccgccccaccagctccgaaacaccgagtgcagccgagctcgtcagtgcaattgaggaactcgtgaaaagcaagatggcactggaggatcgccccagctcactccttgttgaccagggagatagtagcagcccttccttcaacccttcggataattcccttctctcttcctcctcgcccattgatgagatggaagaaaggaaatccagctctttaaagagaagacactacgttttgcaagaactagtggagacagagcgtgactatgtgcgggaccttggctatgtggttgagggctacatggcacttatgaaagaagatggtgttcctgatgacatgaaaggaaaagacaaaattgtgttcggcaacatccatcagatttacgactggcacagagacttttttttaggagagttagagaagtgccttgaagatccagaaaaactaggatccctttttgttaaacacgagagaaggttgcacatgtacatagcttattgtcaaaataaaccaaagtctgagcacattgtctcagaatacattgataccttttttgaggacttaaagcagcgtcttggccacaggttacagctcacagatctgttgatcaaaccagtgcagagaatcatgaagtatcagctgttactgaaggacttcctcaagtattccaaaaaggccagcctggatacatcagaattagagagagctgtggaagtcatgtgcatagtacccaggcggtgcaacgacatgatgaacgtggggcggctgcaaggattcgacgggaaaatcgttgcccagggtaaactgctcttgcaggacacattcttggtcacagaccaagatgcaggacttctgcctcgctgcagagagaggcgcatcttcctctttgagcagatcgtcatattcagcgaaccacttgataaaaagaagggcttctccatgccgggattcctgtttaagaacagtatcaaggtgagttgcctttgcctggaggaaaatgtggaaaatgatccctgtaaatttgctctgacatcgaggacgggtgacgtggtagagaccttcattttgcattcatctagtccaagtgtccggcaaacttggatccatgaaatcaaccaaattttagaaaaccagcgcaattttttaaatgccttgacatcgccaatcgagtaccagaggaaccacagcgggggcggcggcggcggcggcagcgggggcagcggcgggggtgggggcagcggcggcggcggggcccccagtggcggcagcggccacagtggcggccccagcagctgcggcggcgcccccagcacgagcaggagccggccctcccggatcccccagcctgtccgacaccacccccccgtgctggtctcctctgcagcctcgagccaggcagaggcagacaagatgtcaggtacgtccacccccgggccctccctgcctccccctggcgcggcccccgaggccggccccagcgcgcccagcaggcggccccccggcgcggacgccgaggggtccgagcgagaagcggagccgatccccaagatgaaggtgctggagagccccaggaaaggcgccgcgaacgcctcggggtcgagcccagacgcccccgccaaggacgcgcgcgctagcctgggcaccctgccgcttgggaagccccgggccggggccgcttcgccgctgaactcgccgctctccagcgcggtcccttctctcggcaaggagcccttcccccccagcagccccctgcagaaggggggctccttctggagctccatccccgcctcccccgccagccgacccggctccttcaccttcccgggggacagcgactccctccagcggcagacaccccgccacgcggcccctggcaaggatactgaccgcatgagcacgtgctcctcggccagcgagcagtccgtgcagtccacccagagcaacgggagtgaaagcagcagcagtagcaacatctccaccatgttggtgacacacgattacacggcagtgaaggaggatgagatcaacgtctaccaaggagaggtcgttcaaattctggccagcaaccagcagaacatgtttctggtgttccgagccgccactgaccagtgccccgcagctgagggctggattccaggctttgtcctgggccacaccagtgcagtcatcgtggagaacccggacgggactctcaagaagtcaacatcttggcacacagcactccgtttaaggaaaaaatctgagaaaaaagataaagacggcaaaagggaaggcaagttagagaacggttatcggaagtcacgggaaggactcagcaacaaggtatctgtgaagcttctcaatcccaactacatttatgacgttcccccagaattcgtcattccattgagtgaggtcacgtgtgagacaggggagaccgttgttcttagatgtcgagtctgtggccgccccaaagcctcaattacctggaagggccctgaacacaacaccttgaacaacgatggtcactacagcatctcctacagtgacctgggagaggccacgctgaagattgtgggcgtgaccacggaagatgacggcatctacacgtgcatcgctgtcaatgacatgggttcagcctcatcgtcggccagcctgagggtcctaggtccagggatggatgggatcatggtgacctggaaagacaactttgactccttctacagtgaagtggctgagcttggcaggggcagattctctgtcgttaagaaatgtgatcagaaaggaaccaagcgagcagtggccactaagtttgtgaacaagaagttgatgaagcgcgaccaggtcacccatgagcttggcatcctgcagagcctccagcaccccctgcttgtcggcctcctcgacacctttgagacccccaccagctacatcctggtcttagaaatggctgaccagggtcgcctcctggactgcgtggtgcgatggggaagcctcactgaagggaagatcagggcgcacctgggggaggttctggaagctgtccggtacctgcacaactgcaggatagcacacctggacctaaagcctgagaatatcctggtggatgagagtttagccaagccaaccatcaaactggctgactttggagatgctgttcagctcaacacgacctactacatccaccagttactggggaaccctgaattcgcagcccctgaaatcatcctcgggaaccctgtctccctgacctcggatacgtggagtgttggagtgctcacatacgtacttcttagtggcgtgtcccccttcctggatgacagtgtggaagagacctgcctgaacatttgccgcttagactttagcttcccagatgactactttaaaggagtgagccagaaggccaaggagttcgtgtgcttcctcctgcaggaggaccccgccaagcgtccctcggctgcgctggccctccaggagcagtggctgcaggccggcaacggcagaagcacgggcgtcctcgacacgtccagactgacttccttcattgagcggcgcaaacaccagaatgatgttcgacctatccgtagcattaaaaactttctgcagagcaggcttctgcctagagtttgacctatccagaagttctttctcattctctttcacctgccaatcagctgttaatctgaattttcaagagaaaacaagcaaacataactgatcagctgccggtatgttcatcgtgtgaaattgcattccaagtgagctgtgctcagcagtgcttggacacagagctgcaagctgcgctggggtggaggaccgtcacttacactctgcccaaggcagaggtcgcattgctgtatcacagtattttattcaggtttctgcaaaaaaataaaaagataacttttttaaacaaacatgaatagaattttgcaaatttaacgttttcaagatttattcaaggaaacaaaatgcctatgttcaaccactggtgttaatgaacaaagatactgtgcgtctctggggaagacgcacctaggtggcggccactcccatggccttgtctagggctcagagaccactcggctctgagcttccaggcgcctcgtctgtgtgcatctcacgcccgacgtggcttctgaaacgtgcattcaacctcaaacttttgcataaaatagaatgaatcgttttgctctgatgaaatgtaggccttacttgtatataagactgttcctgccttcggtctgtcattttcccacctgcctcccctacccaccccccacccaccacctggggcttcctctgggggtccgagggtcttcccatcacatgaagacatcaggttgggtcctgccccactgcccctccccctgttcctgccccaagccgtcaatcagattgtggagcagtacacagtcagatgaaaatactgtaaatgcactcattgggggttttttggttttacttcatatcatgtgcaatgttgtggctttaacattttatgcaactatttatgaagacctctgttgtacctgtaataaatatatagaaaaagcacatacttcgtatggtgagctttatggttttgtgtgtgtgttggggttggcgggtgggtgggtagggtcgtagccctgtgccatcggttcaaagagacttttcgtgaaatttgttggttttgaggactgtaaaagtgatttcatactctgaatataaaactggataatagggtaatgttttaaaatttattatgctattattcagaatgccaaagtattattttttttcccaaaatcagtctggacatttactactttttagactttttgacgttgaactttctgtataaaaattggctgggttttgagcttttggtaagaaataaaagccgattaagcactggccgccccgcggctggtacccaatgcccgagtcactgtggcagcattcgcactggtgtggggagtcctttcaactcaaggaggctgggtttctgggcaccctcgaagttttctggatgtctttttatctttctcgtgtgaactgcactacaaaagagaccagcccgcttcccaagccagccagacacctgggtcttgagccataaactggcgtagttaagctttgcagcttccagtgtattttatttattcttttgttgggtttttgtttgtttcttcttgtaaaattgtacagaaactttttaaaagaaattggattcgaaactggatgtgtattcgtaacctcataatttttatttgtgtattgtttcttttattatttcagttaaatttttacattattttgcatgtatatttctttgtacagagaccttacatgtttacacagtatgatgtgatgtaaatattttattttgccatcagttattttaaaaaattaaacatatttgcctgaaaaaaaaaaaaaaaaaaaaaaaaaaaaaaaaaaaaaaaaaaaaaaaaaaaaaaaaaaaaaaaaaaaagggggggggggctccttaagaaattctcatccccggggggggccgcccagtatttttgcgtcgtgccggcgctgtttttttttgatgaaacggagggtgcccccattatttgggcggcttttttttaaagacgaggagaccggcgcgggtgttttttcaaccgcctcgcttgtcggcgggggcaacatcgtgttgtgtggagcttttttggtggaggaccacccctcttctggggggggcgccaattgtgcgggaccgagttcctcgg

SEQ ID NO: 457236 - DNA, 6041 bp, Homo sapiens
cagattttccctagaggaacttgagctttcactcttctctctcccctcccacagagagctgtggaagtcatgtgcatagtacccaggcggtgcaacgacatgatgaacgtggggcggctgcaaggattcgacgtaatgcggctcttgttttttaagagagctcctctgccttcatctctttcttttgtcttggattatttctctccacatagagaaagctgatccttttcacttggttttctggcttctctcactttacctcaatctgattgatattttatttcctttttttttttttttttttttttggtgcgtttggtttgcttttttgggacttgcctgtgctcaaagcccagtgtctcatggcagaaacaagcaggaccgggctttgtctcttgggcccagtactgtaagagctgagtttcctttcctcagcacttaagaccatggttagctatggatgtagtaggacctcggaggtccccactctctcatctctgggacttgatacttcctcattagtttaagatatgtttgcatgagttgctagactattcatattacatattagctattacatatcctcaagatgaattcagaaccagaatcttcttttaaaaatttgactacggagttaaggaggcaggagaagtttttattttcttgcctactgttttgctagagaattagcattgaaagttctggtgctatggttctctctgacgcacacacagaggccgttggagggcttctgaaaactcctgtgcatgcctgatgagttcctgctggcgacccagggaccacactttgagaaccactgttctagtataaaccagacatttaaaactccacttttaatctgtgactgtaattgaggcgccagaggtctatacaaatgttggcaagaattttatttagataattattctgtttagagccaagaacagtaaaagaaaaaaaaaattaaactccataaattaataaaagaaaaatacattattccataggaggaaatctaaagaaaacagcttcagataacttagaaggcaatgttttcttctccccttccttttccccctttatttcttgttttaggggaaaatcgttgcccagggtaaactgctcttgcaggacacattcttggtcacagaccaagatgcaggacttctgcctcgctgcagagagaggcgcatcttcctctttgagcagatcgtcatattcagcgaaccacttgataaaaagaagggcttctccatgccgggattcctgtttaagaacagtatcaaggtgagttgcctttgcctggaggaaaatgtggaaaatgatccctgtaaatttgctctgacatcgaggacgggtgacgtggtagagaccttcattttgcattcatctagtccaagtgtccggcaaacttggatccatgaaatcaaccaaattttagaaaaccagcgcaattttttaaatgccttgacatcgccaatcgagtaccagaggaaccacagcgggggcggcggcggcggcggcagcgggggcagcggcgggggtgggggcagcggcggcggcggggcccccagtggcggcagcggccacagtggcggccccagcagctgcggcggcgcccccagcacgagcaggagccggccctcccggatcccccagcctgtccgacaccacccccccgtgctggtctcctctgcagcctcgagccaggcagaggcagacaagatgtcaggtacgtccacccccgggccctccctgcctccccctggcgcggcccccgaggccggccccagcgcgcccagcaggcggccccccggcgcggacgccgaggggtccgagcgagaagcggagccgatccccaagatgaaggtgctggagagccccaggaaaggcgccgcgaacgcctcggggtcgagcccagacgcccccgccaaggacgcgcgcgctagcctgggcaccctgccgcttgggaagccccgggccggggccgcttcgccgctgaactcgccgctctccagcgcggtcccttctctcggcaaggagcccttcccccccagcagccccctgcagaaggggggctccttctggagctccatccccgcctcccccgccagccgacccggctccttcaccttcccgggggacagcgactccctccagcggcagacaccccgccacgcggcccctggcaaggatactgaccgcatgagcacgtgctcctcggccagcgagcagtccgtgcagtccacccagagcaacgggagtgaaagcagcagcagtagcaacatctccaccatgttggtgacacacgattacacggcagtgaaggaggatgagatcaacgtctaccaaggagaggtcgttcaaattctggccagcaaccagcagaacatgtttctggtgttccgagccgccactgaccagtgccccgcagctgagggctggattccaggctttgtcctgggccacaccagtgcagtcatcgtggagaacccggacgggactctcaagaagtcaacatcttggcacacagcactccgtttaaggaaaaaatctgagaaaaaagataaagacggcaaaagggaaggcaagttagagaacggttatcggaagtcacgggaaggactcagcaacaaggtatctgtgaagcttctcaatcccaactacatttatgacgttcccccagaattcgtcattccattgagtgaggtcacgtgtgagacaggggagaccgttgttcttagatgtcgagtctgtggccgccccaaagcctcaattacctggaagggccctgaacacaacaccttgaacaacgatggtcactacagcatctcctacagtgacctgggagaggccacgctgaagattgtgggcgtgaccacggaagatgacggcatctacacgtgcatcgctgtcaatgacatgggttcagcctcatcgtcggccagcctgagggtcctaggtccagggatggatgggatcatggtgacctggaaagacaactttgactccttctacagtgaagtggctgagcttggcaggggcagattctctgtcgttaagaaatgtgatcagaaaggaaccaagcgagcagtggccactaagtttgtgaacaagaagttgatgaagcgcgaccaggtcacccatgagcttggcatcctgcagagcctccagcaccccctgcttgtcggcctcctcgacacctttgagacccccaccagctacatcctggtcttagaaatggctgaccagggtcgcctcctggactgcgtggtgcgatggggaagcctcactgaagggaagatcagggcgcacctgggggaggttctggaagctgtccggtacctgcacaactgcaggatagcacacctggacctaaagcctgagaatatcctggtggatgagagtttagccaagccaaccatcaaactggctgactttggagatgctgttcagctcaacacgacctactacatccaccagttactggggaaccctgaattcgcagcccctgaaatcatcctcgggaaccctgtctccctgacctcggatacgtggagtgttggagtgctcacatacgtacttcttagtggcgtgtcccccttcctggatgacagtgtggaagagacctgcctgaacatttgccgcttagactttagcttcccagatgactactttaaaggagtgagccagaaggccaaggagttcgtgtgcttcctcctgcaggaggaccccgccaagcgtccctcggctgcgctggccctccaggagcagtggctgcaggccggcaacggcagaagcacgggcgtcctcgacacgtccagactgacttccttcattgagcggcgcaaacaccagaatgatgttcgacctatccgtagcattaaaaactttctgcagagcaggcttctgcctagagtttgacctatccagaagttctttctcattctctttcacctgccaatcagctgttaatctgaattttcaagagaaaacaagcaaacataactgatcagctgccggtatgttcatcgtgtgaaattgcattccaagtgagctgtgctcagcagtgcttggacacagagctgcaagctgcgctggggtggaggaccgtcacttacactctgcccaaggcagaggtcgcattgctgtatcacagtattttattcaggtttctgcaaaaaaataaaaagataacttttttaaacaaacatgaatagaattttgcaaatttaacgttttcaagatttattcaaggaaacaaaatgcctatgttcaaccactggtgttaatgaacaaagatactgtgcgtctctggggaagacgcacctaggtggcggccactcccatggccttgtctagggctcagagaccactcggctctgagcttccaggcgcctcgtctgtgtgcatctcacgcccgacgtggcttctgaaacgtgcattcaacctcaaacttttgcataaaatagaatgaatcgttttgctctgatgaaatgtaggccttacttgtatataagactgttcctgccttcggtctgtcattttcccacctgcctcccctacccaccccccacccaccacctggggcttcctctgggggtccgagggtcttcccatcacatgaagacatcaggttgggtcctgccccactgcccctccccctgttcctgccccaagccgtcaatcagattgtggagcagtacacagtcagatgaaaatactgtaaatgcactcattgggggttttttggttttacttcatatcatgtgcaatgttgtggctttaacattttatgcaactatttatgaagacctctgttgtacctgtaataaatatatagaaaaagcacatacttcgtatggtgagctttatggttttgtgtgtgtgttggggttggcgggtgggtgggtagggtcgtagccctgtgccatcggttcaaagagacttttcgtgaaatttgttggttttgaggactgtaaaagtgatttcatactctgaatataaaactggataatagggtaatgttttaaaatttattatgctattattcagaatgccaaagtattattttttttcccaaaatcagtctggacatttactactttttagactttttgacgttgaactttctgtataaaaattggctgggttttgagcttttggtaagaaataaaagccgattaagcactggccgccccgcggctggtacccaatgcccgagtcactgtggcagcattcgcactggtgtggggagtcctttcaactcaaggaggctgggtttctgggcaccctcgaagttttctggatgtctttttatctttctcgtgtgaactgcactacaaaagagaccagcccgcttcccaagccagccagacacctgggtcttgagccataaactggcgtagttaagctttgcagcttccagtgtattttatttattcttttgttgggtttttgtttgtttcttcttgtaaaattgtacagaaactttttaaaagaaattggattcgaaactggatgtgtattcgtaacctcataatttttatttgtgtattgtttcttttattatttcagttaaatttttacattattttgcatgtatatttctttgtacagagaccttacatgtttacacagtatgatgtgatgtaaatattttattttgccatcagttattttaaaaaattaaacatatttgcctgaaaaaaaaaaaaaaaaaaaaaaaaaaaaaaaaaaaaaaaaaaaaaaaaaaaaaaaaaaaaaaaaaaaagggggggggggctccttaagaaattctcatccccggggggggccgcccagtatttttgcgtcgtgccggcgctgtttttttttgatgaaacggagggtgcccccattatttgggcggcttttttttaaagacgaggagaccggcgcgggtgttttttcaaccgcctcgcttgtcggcgggggcaacatcgtgttgtgtggagcttttttggtggaggaccacccctcttctggggggggcgccaattgtgcgggaccgagttcctcgg

SEQ ID NO: 457237 - DNA, 4034 bp, Homo sapiens
aagagtcattattgcagtgaattttttaagagcgtccctaaattgctttctagagaaattacattttcagttattgaaatagatgcacacagttagccagagggtaaaggaaatgttgaaaatttctcggtgcttgcctggtgagccctgcacggggtcatggtgccatggggcacactgacaagggatttcatgtgatcaggtctcgtttcagttcctccctgcctttctctgtcttcatctgtccctctgcagagtgaaagcagcagcagtagcaacatctccaccatgttggtgacacacgattacacggcagtgaaggaggatgagatcaacgtctaccaaggagaggtcgttcaaattctggccagcaaccagcagaacatgtttctggtgttccgagccgccactgaccagtgccccgcagctgagggctggattccaggctttgtcctgggccacaccagtgcagtcatcgtggagaacccggacgggactctcaagaagtcaacatcttggcacacagcactccgtttaaggaaaaaatctgagaaaaaagataaagacggcaaaagggaaggcaagttagagaacggttatcggaagtcacgggaaggactcagcaacaaggtatctgtgaagcttctcaatcccaactacatttatgacgttcccccagaattcgtcattccattgagtgaggtcacgtgtgagacaggggagaccgttgttcttagatgtcgagtctgtggccgccccaaagcctcaattacctggaagggccctgaacacaacaccttgaacaacgatggtcactacagcatctcctacagtgacctgggagaggccacgctgaagattgtgggcgtgaccacggaagatgacggcatctacacgtgcatcgctgtcaatgacatgggttcagcctcatcgtcggccagcctgagggtcctaggtccagggatggatgggatcatggtgacctggaaagacaactttgactccttctacagtgaagtggctgagcttggcaggggcagattctctgtcgttaagaaatgtgatcagaaaggaaccaagcgagcagtggccactaagtttgtgaacaagaagttgatgaagcgcgaccaggtcacccatgagcttggcatcctgcagagcctccagcaccccctgcttgtcggcctcctcgacacctttgagacccccaccagctacatcctggtcttagaaatggctgaccagggtcgcctcctggactgcgtggtgcgatggggaagcctcactgaagggaagatcagggcgcacctgggggaggttctggaagctgtccggtacctgcacaactgcaggatagcacacctggacctaaagcctgagaatatcctggtggatgagagtttagccaagccaaccatcaaactggctgactttggagatgctgttcagctcaacacgacctactacatccaccagttactggggaaccctgaattcgcagcccctgaaatcatcctcgggaaccctgtctccctgacctcggatacgtggagtgttggagtgctcacatacgtacttcttagtggcgtgtcccccttcctggatgacagtgtggaagagacctgcctgaacatttgccgcttagactttagcttcccagatgactactttaaaggagtgagccagaaggccaaggagttcgtgtgcttcctcctgcaggaggaccccgccaagcgtccctcggctgcgctggccctccaggagcagtggctgcaggccggcaacggcagaagcacgggcgtcctcgacacgtccagactgacttccttcattgagcggcgcaaacaccagaatgatgttcgacctatccgtagcattaaaaactttctgcagagcaggcttctgcctagagtttgacctatccagaagttctttctcattctctttcacctgccaatcagctgttaatctgaattttcaagagaaaacaagcaaacataactgatcagctgccggtatgttcatcgtgtgaaattgcattccaagtgagctgtgctcagcagtgcttggacacagagctgcaagctgcgctggggtggaggaccgtcacttacactctgcccaaggcagaggtcgcattgctgtatcacagtattttattcaggtttctgcaaaaaaataaaaagataacttttttaaacaaacatgaatagaattttgcaaatttaacgttttcaagatttattcaaggaaacaaaatgcctatgttcaaccactggtgttaatgaacaaagatactgtgcgtctctggggaagacgcacctaggtggcggccactcccatggccttgtctagggctcagagaccactcggctctgagcttccaggcgcctcgtctgtgtgcatctcacgcccgacgtggcttctgaaacgtgcattcaacctcaaacttttgcataaaatagaatgaatcgttttgctctgatgaaatgtaggccttacttgtatataagactgttcctgccttcggtctgtcattttcccacctgcctcccctacccaccccccacccaccacctggggcttcctctgggggtccgagggtcttcccatcacatgaagacatcaggttgggtcctgccccactgcccctccccctgttcctgccccaagccgtcaatcagattgtggagcagtacacagtcagatgaaaatactgtaaatgcactcattgggggttttttggttttacttcatatcatgtgcaatgttgtggctttaacattttatgcaactatttatgaagacctctgttgtacctgtaataaatatatagaaaaagcacatacttcgtatggtgagctttatggttttgtgtgtgtgttggggttggcgggtgggtgggtagggtcgtagccctgtgccatcggttcaaagagacttttcgtgaaatttgttggttttgaggactgtaaaagtgatttcatactctgaatataaaactggataatagggtaatgttttaaaatttattatgctattattcagaatgccaaagtattattttttttcccaaaatcagtctggacatttactactttttagactttttgacgttgaactttctgtataaaaattggctgggttttgagcttttggtaagaaataaaagccgattaagcactggccgccccgcggctggtacccaatgcccgagtcactgtggcagcattcgcactggtgtggggagtcctttcaactcaaggaggctgggtttctgggcaccctcgaagttttctggatgtctttttatctttctcgtgtgaactgcactacaaaagagaccagcccgcttcccaagccagccagacacctgggtcttgagccataaactggcgtagttaagctttgcagcttccagtgtattttatttattcttttgttgggtttttgtttgtttcttcttgtaaaattgtacagaaactttttaaaagaaattggattcgaaactggatgtgtattcgtaacctcataatttttatttgtgtattgtttcttttattatttcagttaaatttttacattattttgcatgtatatttctttgtacagagaccttacatgtttacacagtatgatgtgatgtaaatattttattttgccatcagttattttaaaaaattaaacatatttgcctgaaaaaaaaaaaaaaaaaaaaaaaaaaaaaaaaaaaaaaaaaaaaaaaaaaaaaaaaaaaaaaaaaaaagggggggggggctccttaagaaattctcatccccggggggggccgcccagtatttttgcgtcgtgccggcgctgtttttttttgatgaaacggagggtgcccccattatttgggcggcttttttttaaagacgaggagaccggcgcgggtgttttttcaaccgcctcgcttgtcggcgggggcaacatcgtgttgtgtggagcttttttggtggaggaccacccctcttctggggggggcgccaattgtgcgggaccgagttcctcgg

SEQ ID NO: 457238 - DNA, 6725 bp, Homo sapiens
cgcggccgcgggcgccgccgcagccatgagcggcagcagcggcggagccgccgcccccgccgcgtcctccggccccgccgcggcggccagcgcggctggctcgggctgcgggggcggtgccggcgagggggcagaggaggcggccaaggacctggccgacatcgcggccttcttccgatccgggtttcgaaaaaacgatgaaatgaaagctatggatgttttaccaattttgaaggaaaaagttgcatacctttcaggtgggagagataaacgtggaggtcccattttaacgtttccggcccgcagcaatcatgacagaatacgacaggaggatctcaggagactcatttcctatctagcctgtattcccagcgaggaggtctgcaagcgtggcttcacggtgatcgtggacatgcgtgggtccaagtgggactccatcaagccccttctgaagatcctgcaggagtccttcccctgctgcatccatgtggccctgatcatcaagccagacaacttctggcagaaacagaggactaattttggcagttctaaatttgaatttgagacaaatatggtctctttagaaggccttaccaaagtagttgatccttctcagctaactcctgagtttgatggctgcctggaatacaaccacgaagaatggattgaaatcagagttgcttttgaagactacattagcaatgccacccacatgctgtctcggctggaggaacttcaggacatcctagctaagaaggagctgcctcaggatttagagggggctcggaatatgatcgaggaacattctcagctgaagaagaaggtgattaaggcccccatcgaggacctggatttggagggacagaagctgcttcagaggatacagagcagtgaaagctttcccaaaaagaactcaggctcaggcaatgcggacctgcagaacctcttgcccaaggtgtccaccatgctggaccggctgcactcgacacggcagcatctgcaccagatgtggcatgtgaggaagctgaagctggaccagtgcttccagctgaggctgtttgaacaggatgctgagaagatgtttgactggatcacacacaacaaaggcctgtttctaaacagctacacagagattgggaccagccaccctcatgccatggagcttcagacgcagcacaatcactttgccatgaactgtatgaacgtgtatgtaaatataaaccgcatcatgtcggtggccaatcgtctggtggagtctggccactatgcctcgcagcagatcaggcagatcgcgagtcagctggagcaggagtggaaggcgtttgcggcagccctggatgagcggagcaccttgctggacatgtcctccattttccaccagaaggccgaaaagtatatgagcaacgtggattcatggtgtaaagcttgcggtgaggtagaccttccctcagagctgcaggacctagaagatgccattcatcaccaccagggaatatatgaacatatcactcttgcttattctgaggtcagccaagatgggaagtcgctccttgacaagctccagcggcccttgactcccggcagctccgattccctgacagcctctgccaactactccaaggccgtgcaccatgtcctggatgtcatccacgaggtgctgcaccaccagcggcagcgtgagaacatctggcaacaccgcaaggtccggctgcatcagaggctgcagctgtgtgttttccagcaggacgttcagcaggtgctagactggatcgagaaccacggagaagcatttctgagcaaacatacaggtgtggggaaatctcttcatcgggccagagcattgcagaaacgtcatgaagattttgaagaagtggcacagaacacatacaccaatgcggataaattactggaagcagcagaacagctggctcagactggggaatgtgaccccgaagagatttatcaggctgcccatcagctggaagaccggattcaagatttcgttcggcgtgttgagcagcgaaagatcctactggacatgtcagtgtcctttcacacccatgtgaaagagctgtggacgtggctggaggagctgcagaaggagctgctggacgacgtgtatgccgagtcggtggaggccgtgcaggacctcatcaagcgctttggccagcagcagcagaccaccctgcaggtgactgtcaacgtgatcaaggaaggggaggacctcatccagcagctcagggactctgccatctccagtaacaagaccccccacaacagctccatcaaccacattgagacggtgctgcagcagctggacgaggcgcagtcgcagatggaggagctcttccaggagcgcaagatcaagctggagctcttcctgcacgtgcgcatcttcgagagggacgccatcgacattatctcagacctcgagtcttggaatgatgagctttctcagcaaatgaatgacttcgacacagaagatctcacgattgcagagcagcgcctccagcaccatgcagacaaagccttgaccatgaacaacttgacttttgacgtcatccaccaagggcaagatcttctgcagtatgtcaatgaggtccaggcctctggtgtggagctgctgtgtgatagagatgtagacatggcaactcgggtccaggacctgctggagtttcttcatgaaaaacagcaggaattggatttagccgcagagcagcatcggaaacacctggagcagtgcgtgcagctgcgccacctgcaggcagaagtgaaacaggtgctgggttggatccgcaacggagagtccatgttaaatgccggacttatcacagccagctcgttacaagaggcagagcagctccagcgagagcacgagcagttccagcatgccattgagaaaacacatcagagcgcgctgcaggtgcagcagaaggcagaagccatgctacaggccaaccactacgacatggacatgatccgggactgcgccgagaaggtggcgtctcactggcaacagctcatgctcaagatggaagatcgcctcaagctcgtcaacgcctctgtcgctttctacaaaacctcagagcaggtctgcagcgtcctcgagagcctggaacaggagtacaagagagaagaagactggtgtggcggggcggataagctgggcccaaactctgagacggaccacgtgacgcccatgatcagcaagcacctggagcagaaggaggcattcctgaaggcttgcacccttgctcggaggaatgcagacgtcttcctgaaatacctgcacaggaacagcgtgaacatgccaggaatggtgacgcacatcaaagctcctgaacagcaagtgaaaaatatcttgaatgaactcttccaacgggagaacagggtattgcattactggaccatgaggaagagacggctggaccagtgtcagcagtacgtggtctttgagaggagtgccaagcaggctttggaatggatccatgacaatggcgagttctacctttccacacacacctccacgggctccagtatacagcacacccaggagctcctgaaagagcacgaggagttccagataactgcaaagcaaaccaaagagagagtgaagctattgatacagctggctgatggcttttgtgaaaaagggcatgcccatgcggcagagataaaaaaatgtgttactgctgtggataagaggtacagagatttctctctgcggatggagaagtacaggacctctttggaaaaagccctggggatttcttcagattccaacaaatcgagtaaaagtctccagctagatatcattccagccagtatccctggctcagaggtgaaacttcgagatgctgctcatgaacttaatgaagagaagcggaaatctgcccgcaggaaagagttcataatggctgagctcattcaaactgaaaaggcttatgtaagagacctccgggaatgtatggatacgtacctgtgggaaatgaccagtggcgtggaagagattccacctggcattgtaaacaaagaactcatcatcttcggaaacatgcaagaaatctacgaatttcataataacatattcctaaaggagctggaaaaatatgaacagttgccagaggatgttggacattgttttgttacttgggcagacaagtttcagatgtatgtcacatattgcaaaaataagcctgattctactcagctgatattggaacatgcagggtcctattttgacgagatacagcagcgacatggattagccaattccatttcttcctaccttattaaaccagttcagcgaataacgaagtatcagctccttttaaaagagctgctgacgtgctgtgaggaaggaaagggagagattaaagatggcctggaggtgatgctcagcgtgccgaagcgagccaatgatgccatgcacctcagcatgctggaagggtttgatgaaaacattgagtctcagggagaactcatcctacaggaatccttccaagtgtgggacccaaaaaccttaattcgaaagggtcgagaacggcatctcttcctttttgaaatgtccttagtatttagtaaagaagtgaaagattccagtgggagaagcaagtacctttataaaagcaaattgtttacctcagagttgggtgtcacagaacatgttgaaggagacccttgcaaatttgcactgtgggtggggagaacaccaacttcagataataaaattgtccttaaggcttccagcatagagaacaagcaggactggataaagcatatccgcgaagtcatccaggagcggacgatccacctgaagggagccctgaaggagcccattcacatccctaagaccgctcccgccacaagacagaagggaaggagggatggagaggatctggacagccaaggagacggcagcagccagcctgatacgatttccatcgcctcacggacgtctcagaacacgctggacagcgataagctctctggtggctgtgagctgacagtggtgatccatgacttcaccgcttgcaacagcaacgagctgaccatccgacggggccagaccgtggaagttctggagcggccgcatgacaagcctgactggtgtctggtgcggaccactgaccgctccccagcggcagaaggcctggtcccctgtggttcactgtgcatcgcccactccagaagtagcatggaaatggagggcatcttcaaccacaaagactcgctctccgtctccagcaatgacgccagtccacccgcatccgtggcttccctccagccccacatgatcggggcccagagctcgccgggccccaagcggccgggcaacaccctgcgcaagtggctcaccagccccgtgcggcggctcagcagcggcaaggccgacgggcacgtgaagaagctggcgcacaagcacaagaagagccgcgaggtccgcaagagcgccgacgccggctcgcagaaggactccgacgacagtgcggccaccccgcaggacgagacggtcgaggagagaggccggaacgagggcctgagcagcggtactctctccaaatcctcctcctcggggatgcagagctgtggagaagaggaaggcgaggagggggccgacgccgtgcccctgccgccacccatggccatccagcagcacagcctcctccagccagactcacaggatgacaaggcctcttctcggttattagtccgccccaccagctccgaaacaccgagtgcagccgagctcgtcagtgcaattgaggaactcgtgaaaagcaagatggcactggaggatcgccccagctcactccttgttgaccagggagatagtagcagcccttccttcaacccttcggataattcccttctctcttcctcctcgcccattgatgagatggaagaaaggaaatccagctctttaaagagaagacactacgttttgcaagaactagtggagacagagcgtgactatgtgcgggaccttggctatgtggttgagggctacatggcacttatgaaagaagatggtgttcctgatgacatgaaaggaaaagacaaaattgtgttcggcaacatccatcagatttacgactggcacagagacttttttttaggagagttagagaagtgccttgaagatccagaaaaactaggatccctttttgttaaacacgtaagcacaatagcattgcttatatcctgttctgatggtgtcatccttagtcactggtttgtcagattaaaggagaactcacttatactttatgtaagtgcgtatgtttaagataaaatcaaactgcatggtgttaatgagttggaattaaaatcccttcttcaacatgagttacctgctttcccagtcacctggctgaagctggctatttggctagcaacagtacaggttggtgagagaagaccagagccaggcctgaacagtatctggggtgtctgtgaacaggcaggtattgttgagtggagatgtaactgtacctgcagtgggtttaacataacagccaaatagtgtggatatcgaaaataagcgtattaacattaaagttttttgttttttgggaaaaatcatgatatatttttagaagttagtgacaggagtttttgcatttttgccagtctctttaatgtcttgctaagtaaaagacagctggatttttatatctgcttctgcatccaactcattgctgtgttttttggttcaagtatcc

SEQ ID NO: 457239 - DNA, 6633 bp, Homo sapiens
cgcggccgcgggcgccgccgcagccatgagcggcagcagcggcggagccgccgcccccgccgcgtcctccggccccgccgcggcggccagcgcggctggctcgggctgcgggggcggtgccggcgagggggcagaggaggcggccaaggacctggccgacatcgcggccttcttccgatccgggtttcgaaaaaacgatgaaatgaaagctatggatgttttaccaattttgaaggaaaaagttgcatacctttcaggtgggagagataaacgtggaggtcccattttaacgtttccggcccgcagcaatcatgacagaatacgacaggaggatctcaggagactcatttcctatctagcctgtattcccagcgaggaggtctgcaagcgtggcttcacggtgatcgtggacatgcgtgggtccaagtgggactccatcaagccccttctgaagatcctgcaggagtccttcccctgctgcatccatgtggccctgatcatcaagccagacaacttctggcagaaacagaggactaattttggcagttctaaatttgaatttgagacaaatatggtctctttagaaggccttaccaaagtagttgatccttctcagctaactcctgagtttgatggctgcctggaatacaaccacgaagaatggattgaaatcagagttgcttttgaagactacattagcaatgccacccacatgctgtctcggctggaggaacttcaggacatcctagctaagaaggagctgcctcaggatttagagggggctcggaatatgatcgaggaacattctcagctgaagaagaaggtgattaaggcccccatcgaggacctggatttggagggacagaagctgcttcagaggatacagagcagtgaaagctttcccaaaaagaactcaggctcaggcaatgcggacctgcagaacctcttgcccaaggtgtccaccatgctggaccggctgcactcgacacggcagcatctgcaccagatgtggcatgtgaggaagctgaagctggaccagtgcttccagctgaggctgtttgaacaggatgctgagaagatgtttgactggatcacacacaacaaaggcctgtttctaaacagctacacagagattgggaccagccaccctcatgccatggagcttcagacgcagcacaatcactttgccatgaactgtatgaacgtgtatgtaaatataaaccgcatcatgtcggtggccaatcgtctggtggagtctggccactatgcctcgcagcagatcaggcagatcgcgagtcagctggagcaggagtggaaggcgtttgcggcagccctggatgagcggagcaccttgctggacatgtcctccattttccaccagaaggccgaaaagtatatgagcaacgtggattcatggtgtaaagcttgcggtgaggtagaccttccctcagagctgcaggacctagaagatgccattcatcaccaccagggaatatatgaacatatcactcttgcttattctgaggtcagccaagatgggaagtcgctccttgacaagctccagcggcccttgactcccggcagctccgattccctgacagcctctgccaactactccaaggccgtgcaccatgtcctggatgtcatccacgaggtgctgcaccaccagcggcagcgtgagaacatctggcaacaccgcaaggtccggctgcatcagaggctgcagctgtgtgttttccagcaggacgttcagcaggtgctagactggatcgagaaccacggagaagcatttctgagcaaacatacaggtgtggggaaatctcttcatcgggccagagcattgcagaaacgtcatgaagattttgaagaagtggcacagaacacatacaccaatgcggataaattactggaagcagcagaacagctggctcagactggggaatgtgaccccgaagagatttatcaggctgcccatcagctggaagaccggattcaagatttcgttcggcgtgttgagcagcgaaagatcctactggacatgtcagtgtcctttcacacccatgtgaaagagctgtggacgtggctggaggagctgcagaaggagctgctggacgacgtgtatgccgagtcggtggaggccgtgcaggacctcatcaagcgctttggccagcagcagcagaccaccctgcaggtgactgtcaacgtgatcaaggaaggggaggacctcatccagcagctcagggactctgccatctccagtaacaagaccccccacaacagctccatcaaccacattgagacggtgctgcagcagctggacgaggcgcagtcgcagatggaggagctcttccaggagcgcaagatcaagctggagctcttcctgcacgtgcgcatcttcgagagggacgccatcgacattatctcagacctcgagtcttggaatgatgagctttctcagcaaatgaatgacttcgacacagaagatctcacgattgcagagcagcgcctccagcaccatgcagacaaagccttgaccatgaacaacttgacttttgacgtcatccaccaagggcaagatcttctgcagtatgtcaatgaggtccaggcctctggtgtggagctgctgtgtgatagagatgtagacatggcaactcgggtccaggacctgctggagtttcttcatgaaaaacagcaggaattggatttagccgcagagcagcatcggaaacacctggagcagtgcgtgcagctgcgccacctgcaggcagaagtgaaacaggtgctgggttggatccgcaacggagagtccatgttaaatgccggacttatcacagccagctcgttacaagaggcagagcagctccagcgagagcacgagcagttccagcatgccattgagaaaacacatcagagcgcgctgcaggtgcagcagaaggcagaagccatgctacaggccaaccactacgacatggacatgatccgggactgcgccgagaaggtggcgtctcactggcaacagctcatgctcaagatggaagatcgcctcaagctcgtcaacgcctctgtcgctttctacaaaacctcagagcaggtctgcagcgtcctcgagagcctggaacaggagtacaagagagaagaagactggtgtggcggggcggataagctgggcccaaactctgagacggaccacgtgacgcccatgatcagcaagcacctggagcagaaggaggcattcctgaaggcttgcacccttgctcggaggaatgcagacgtcttcctgaaatacctgcacaggaacagcgtgaacatgccaggaatggtgacgcacatcaaagctcctgaacagcaagtgaaaaatatcttgaatgaactcttccaacgggagaacagggtattgcattactggaccatgaggaagagacggctggaccagtgtcagcagtacgtggtctttgagaggagtgccaagcaggctttggaatggatccatgacaatggcgagttctacctttccacacacacctccacgggctccagtatacagcacacccaggagctcctgaaagagcacgaggagttccagataactgcaaagcaaaccaaagagagagtgaagctattgatacagctggctgatggcttttgtgaaaaagggcatgcccatgcggcagagataaaaaaatgtgttactgctgtggataagaggtacagagatttctctctgcggatggagaagtacaggacctctttggaaaaagccctggggatttcttcagattccaacaaatcgagtaaaagtctccagctagatatcattccagccagtatccctggctcagaggtgaaacttcgagatgctgctcatgaacttaatgaagagaagcggaaatctgcccgcaggaaagagttcataatggctgagctcattcaaactgaaaaggcttatgtaagagacctccgggaatgtatggatacgtacctgtgggaaatgaccagtggcgtggaagagattccacctggcattgtaaacaaagaactcatcatcttcggaaacatgcaagaaatctacgaatttcataataacatattcctaaaggagctggaaaaatatgaacagttgccagaggatgttggacattgttttgttacttgggcagacaagtttcagatgtatgtcacatattgcaaaaataagcctgattctactcagctgatattggaacatgcagggtcctattttgacgagatacagcagcgacatggattagccaattccatttcttcctaccttattaaaccagttcagcgaataacgaagtatcagctccttttaaaagagctgctgacgtgctgtgaggaaggaaagggagagattaaagatggcctggaggtgatgctcagcgtgccgaagcgagccaatgatgccatgcacctcagcatgctggaagggtttgatgaaaacattgagtctcagggagaactcatcctacaggaatccttccaagtgtgggacccaaaaaccttaattcgaaagggtcgagaacggcatctcttcctttttgaaatgtccttagtatttagtaaagaagtgaaagattccagtgggagaagcaagtacctttataaaagcaaattgtttacctcagagttgggtgtcacagaacatgttgaaggagacccttgcaaatttgcactgtgggtggggagaacaccaacttcagataataaaattgtccttaaggcttccagcatagagaacaagcaggactggataaagcatatccgcgaagtcatccaggagcggacgatccacctgaagggagccctgaaggagcccattcacatccctaagaccgctcccgccacaagacagaagggaaggagggatggagaggatctggacagccaaggagacggcagcagccagcctgatacgatttccatcgcctcacggacgtctcagaacacgctggacagcgataagctctctggtggctgtgagctgacagtggtgatccatgacttcaccgcttgcaacagcaacgagctgaccatccgacggggccagaccgtggaagttctggagcggccgcatgacaagcctgactggtgtctggtgcggaccactgaccgctccccagcggcagaaggcctggtcccctgtggttcactgtgcatcgcccactccagaagtagcatggaaatggagggcatcttcaaccacaaagactcgctctccgtctccagcaatgacgccagtccacccgcatccgtggcttccctccagccccacatgatcggggcccagagctcgccgggccccaagcggccgggcaacaccctgcgcaagtggctcaccagccccgtgcggcggctcagcagcggcaaggccgacgggcacgtgaagaagctggcgcacaagcacaagaagagccgcgaggtccgcaagagcgccgacgccggctcgcagaaggactccgacgacagtgcggccaccccgcaggacgagacggtcgaggagagaggccggaacgagggcctgagcagcggtactctctccaaatcctcctcctcggggatgcagagctgtggagaagaggaaggcgaggagggggccgacgccgtgcccctgccgccacccatggccatccagcagcacagcctcctccagccagactcacaggatgacaaggcctcttctcggttattagtccgccccaccagctccgaaacaccgagtgcagccgagctcgtcagtgcaattgaggaactcgtgaaaagcaagatggtgaggcctcccagagaaagtctgacttttggaagctgctctgtgttgctacttgcagatggatttgcccttgtctttgtattgctctgggctgcagaatgtggctgtggcttatggcacatctcaggagtccccatgaccaccctcgggttcactgatttgaaggactcagagaactcaggaaagccattattcccacatttgcagtgtattcccatgaaaggacacagatcaaaataggcaagggaagaactgcatagggcaggtctcagggagtgcctggttcaagctgccagccatgctctcccagtggagtcaggcagacagaggattgccaaccacagcagctcacccgagccttggtgttgagtgtctgtttgggctcagacgcatatggctgactgctctgtgtggctgaccttaggtagtctcctgcccctccagagatcaagacactgtcacattgctagcatagactatttgccttggtcccaggcccccaggtaaacagacattctcatcaagcagaacattccaaggacttacaagttccctcctagaagctgggggcaaacctcactgcacataccctgcctgcagtcactgcaaatgtggtcagctccagtctgtctgaagatgtgccagggtcagtggtacccacagttagactctccgttttgttttgcaacccctgagatctttcatttgggttcacaatgtgtgagagagaagggtttacattattatataagggcttcattttcttagtgatctctttgttgccagttggccaacgtgggttcatttgataaaagccccaaattaaatgttggttctttgaagtt

SEQ ID NO: 457240 - DNA, 5083 bp, Homo sapiens
cgcggccgcgggcgccgccgcagccatgagcggcagcagcggcggagccgccgcccccgccgcgtcctccggccccgccgcggcggccagcgcggctggctcgggctgcgggggcggtgccggcgagggggcagaggaggcggccaaggacctggccgacatcgcggccttcttccgatccgggtttcgaaaaaacgatgaaatgaaagctatggatgttttaccaattttgaaggaaaaagttgcatacctttcaggtgggagagataaacgtggaggtcccattttaacgtttccggcccgcagcaatcatgacagaatacgacaggaggatctcaggagactcatttcctatctagcctgtattcccagcgaggaggtctgcaagcgtggcttcacggtgatcgtggacatgcgtgggtccaagtgggactccatcaagccccttctgaagatcctgcaggagtccttcccctgctgcatccatgtggccctgatcatcaagccagacaacttctggcagaaacagaggactaattttggcagttctaaatttgaatttgagacaaatatggtctctttagaaggccttaccaaagtagttgatccttctcagctaactcctgagtttgatggctgcctggaatacaaccacgaagaatggattgaaatcagagttgcttttgaagactacattagcaatgccacccacatgctgtctcggctggaggaacttcaggacatcctagctaagaaggagctgcctcaggatttagagggggctcggaatatgatcgaggaacattctcagctgaagaagaaggtgattaaggcccccatcgaggacctggatttggagggacagaagctgcttcagaggatacagagcagtgaaagctttcccaaaaagaactcaggctcaggcaatgcggacctgcagaacctcttgcccaaggtgtccaccatgctggaccggctgcactcgacacggcagcatctgcaccagatgtggcatgtgaggaagctgaagctggaccagtgcttccagctgaggctgtttgaacaggatgctgagaagatgtttgactggatcacacacaacaaaggcctgtttctaaacagctacacagagattgggaccagccaccctcatgccatggagcttcagacgcagcacaatcactttgccatgaactgtatgaacgtgtatgtaaatataaaccgcatcatgtcggtggccaatcgtctggtggagtctggccactatgcctcgcagcagatcaggcagatcgcgagtcagctggagcaggagtggaaggcgtttgcggcagccctggatgagcggagcaccttgctggacatgtcctccattttccaccagaaggccgaaaagtatatgagcaacgtggattcatggtgtaaagcttgcggtgaggtagaccttccctcagagctgcaggacctagaagatgccattcatcaccaccagggaatatatgaacatatcactcttgcttattctgaggtcagccaagatgggaagtcgctccttgacaagctccagcggcccttgactcccggcagctccgattccctgacagcctctgccaactactccaaggccgtgcaccatgtcctggatgtcatccacgaggtgctgcaccaccagcggcagcgtgagaacatctggcaacaccgcaaggtccggctgcatcagaggctgcagctgtgtgttttccagcaggacgttcagcaggtgctagactggatcgagaaccacggagaagcatttctgagcaaacatacaggtgtggggaaatctcttcatcgggccagagcattgcagaaacgtcatgaagattttgaagaagtggcacagaacacatacaccaatgcggataaattactggaagcagcagaacagctggctcagactggggaatgtgaccccgaagagatttatcaggctgcccatcagctggaagaccggattcaagatttcgttcggcgtgttgagcagcgaaagatcctactggacatgtcagtgtcctttcacacccatgtgaaagagctgtggacgtggctggaggagctgcagaaggagctgctggacgacgtgtatgccgagtcggtggaggccgtgcaggacctcatcaagcgctttggccagcagcagcagaccaccctgcaggtgactgtcaacgtgatcaaggaaggggaggacctcatccagcagctcagggactctgccatctccagtaacaagaccccccacaacagctccatcaaccacattgagacggtgctgcagcagctggacgaggcgcagtcgcagatggaggagctcttccaggagcgcaagatcaagctggagctcttcctgcacgtgcgcatcttcgagagggacgccatcgacattatctcagacctcgagtcttggaatgatgagctttctcagcaaatgaatgacttcgacacagaagatctcacgattgcagagcagcgcctccagcaccatgcagacaaagccttgaccatgaacaacttgacttttgacgtcatccaccaagggcaagatcttctgcagtatgtcaatgaggtccaggcctctggtgtggagctgctgtgtgatagagatgtagacatggcaactcgggtccaggacctgctggagtttcttcatgaaaaacagcaggaattggatttagccgcagagcagcatcggaaacacctggagcagtgcgtgcagctgcgccacctgcaggcagaagtgaaacaggtgctgggttggatccgcaacggagagtccatgttaaatgccggacttatcacagccagctcgttacaagaggcagagcagctccagcgagagcacgagcagttccagcatgccattgagaaaacacatcagagcgcgctgcaggtgcagcagaaggcagaagccatgctacaggccaaccactacgacatggacatgatccgggactgcgccgagaaggtggcgtctcactggcaacagctcatgctcaagatggaagatcgcctcaagctcgtcaacgcctctgtcgctttctacaaaacctcagagcaggtctgcagcgtcctcgagagcctggaacaggagtacaagagagaagaagactggtgtggcggggcggataagctgggcccaaactctgagacggaccacgtgacgcccatgatcagcaagcacctggagcagaaggaggcattcctgaaggcttgcacccttgctcggaggaatgcagacgtcttcctgaaatacctgcacaggaacagcgtgaacatgccaggaatggtgacgcacatcaaagctcctgaacagcaagtgaaaaatatcttgaatgaactcttccaacgggagaacagggtattgcattactggaccatgaggaagagacggctggaccagtgtcagcagtacgtggtctttgagaggagtgccaagcaggctttggaatggatccatgacaatggcgagttctacctttccacacacacctccacgggctccagtatacagcacacccaggagctcctgaaagagcacgaggagttccagataactgcaaagcaaaccaaagagagagtgaagctattgatacagctggctgatggcttttgtgaaaaagggcatgcccatgcggcagagataaaaaaatgtgttactgctgtggataagaggtacagagatttctctctgcggatggagaagtacaggacctctttggaaaaagccctggggatttcttcagattccaacaaatcgagtaaaagtctccagctagatatcattccagccagtatccctggctcagaggtgaaacttcgagatgctgctcatgaacttaatgaagagaagcggaaatctgcccgcaggaaagagttcataatggctgagctcattcaaactgaaaaggcttatgtaagagacctccgggaatgtatggatacgtacctgtgggaaatgaccagtggcgtggaagagattccacctggcattgtaaacaaagaactcatcatcttcggaaacatgcaagaaatctacgaatttcataataacatattcctaaaggagctggaaaaatatgaacagttgccagaggatgttggacattgttttgttacttgggcagacaagtttcagatgtatgtcacatattgcaaaaataagcctgattctactcagctgatattggaacatgcagggtcctattttgacgtaagtaatagattcctaaagagaccataattttccaagttgtgtacataaaatgcggcattactcataactttcacctaattgatagtacaatgttttcatttttgtctatcatttttgtctatcattttgtctatcatgtctattgggctattcttctattgtcttctgtttttaaaagatcctacacaaatactggaagccttatatctgtaaggaactcagattgtaatatatagatgtatgtttgtgtgtgtgtatatgttattatttatattcagtcatttataatatcattactatttatattcaatacattttttcacctgtaatactgtatacagaaggcataaactattaagcttcttttccccctcagtaaaacaaaaataaatgtgaatctttttatttttcctattttaatttcatgatgttacgaattttcaaaaacaacctaccagtaaagttttacaaatagtgccataacaactaggataattagaaggttaactaattgtgttctcattggagtaaacgtagatacaggtcatctgtgttttgaaagctgttgcagcggcttattcagcacaaaagagatggagctttagaacgtgatacacagagtgctttctgggtttccagaacttggtcaaatatgtgccaatacattttgattgaaggataaggtgctattgaatagtgtgcatagtttggtgcataaggttgtgaggatgttggacttgttttctgtctttacacttgtgcatggactggtgggatcatcagctcttatgtgaaagtctggggaagtagaataaacttttcagtttctatctttga

SEQ ID NO: 457241 - DNA, 3332 bp, Homo sapiens
cgcggccgcgggcgccgccgcagccatgagcggcagcagcggcggagccgccgcccccgccgcgtcctccggccccgccgcggcggccagcgcggctggctcgggctgcgggggcggtgccggcgagggggcagaggaggcggccaaggacctggccgacatcgcggccttcttccgatccgggtttcgaaaaaacgatgaaatgaaagctatggatgttttaccaattttgaaggaaaaagttgcatacctttcaggtgggagagataaacgtggaggtcccattttaacgtttccggcccgcagcaatcatgacagaatacgacaggaggatctcaggagactcatttcctatctagcctgtattcccagcgaggaggtctgcaagcgtggcttcacggtgatcgtggacatgcgtgggtccaagtgggactccatcaagccccttctgaagatcctgcaggagtccttcccctgctgcatccatgtggccctgatcatcaagccagacaacttctggcagaaacagaggactaattttggcagttctaaatttgaatttgagacaaatatggtctctttagaaggccttaccaaagtagttgatccttctcagctaactcctgagtttgatggctgcctggaatacaaccacgaagaatggattgaaatcagagttgcttttgaagactacattagcaatgccacccacatgctgtctcggctggaggaacttcaggacatcctagctaagaaggagctgcctcaggatttagagggggctcggaatatgatcgaggaacattctcagctgaagaagaaggtgattaaggcccccatcgaggacctggatttggagggacagaagctgcttcagaggatacagagcagtgaaagctttcccaaaaagaactcaggctcaggcaatgcggacctgcagaacctcttgcccaaggtgtccaccatgctggaccggctgcactcgacacggcagcatctgcaccagatgtggcatgtgaggaagctgaagctggaccagtgcttccagctgaggctgtttgaacaggatgctgagaagatgtttgactggatcacacacaacaaaggcctgtttctaaacagctacacagagattgggaccagccaccctcatgccatggagcttcagacgcagcacaatcactttgccatgaactgtatgaacgtgtatgtaaatataaaccgcatcatgtcggtggccaatcgtctggtggagtctggccactatgcctcgcagcagatcaggcagatcgcgagtcagctggagcaggagtggaaggcgtttgcggcagccctggatgagcggagcaccttgctggacatgtcctccattttccaccagaaggccgaaaagtatatgagcaacgtggattcatggtgtaaagcttgcggtgaggtagaccttccctcagagctgcaggacctagaagatgccattcatcaccaccagggaatatatgaacatatcactcttgcttattctgaggtcagccaagatgggaagtcgctccttgacaagctccagcggcccttgactcccggcagctccgattccctgacagcctctgccaactactccaaggccgtgcaccatgtcctggatgtcatccacgaggtgctgcaccaccagcggcagcgtgagaacatctggcaacaccgcaaggtccggctgcatcagaggctgcagctgtgtgttttccagcaggacgttcagcaggtgctagactggatcgagaaccacggagaagcatttctgagcaaacatacaggtgtggggaaatctcttcatcgggccagagcattgcagaaacgtcatgaagattttgaagaagtggcacagaacacatacaccaatgcggataaattactggaagcagcagaacagctggctcagactggggaatgtgaccccgaagagatttatcaggctgcccatcagctggaagaccggattcaagatttcgttcggcgtgttgagcagcgaaagatcctactggacatgtcagtgtcctttcacacccatgtgaaagagctgtggacgtggctggaggagctgcagaaggagctgctggacgacgtgtatgccgagtcggtggaggccgtgcaggacctcatcaagcgctttggccagcagcagcagaccaccctgcaggtgactgtcaacgtgatcaaggaaggggaggacctcatccagcagctcagggactctgccatctccagtaacaagaccccccacaacagctccatcaaccacattgagacggtgctgcagcagctggacgaggcgcagtcgcagatggaggagctcttccaggagcgcaagatcaagctggagctcttcctgcacgtgcgcatcttcgagagggacgccatcgacattatctcagacctcgagtcttggaatgatgagctttctcagcaaatgaatgacttcgacacagaagatctcacgattgcagagcagcgcctccagcaccatgcagacaaagccttgaccatgaacaacttgacttttgacgtcatccaccaagggcaagatcttctgcagtatgtcaatgaggtccaggcctctggtgtggagctgctgtgtgatagagatgtagacatggcaactcgggtccaggacctgctggagtttcttcatgaaaaacagcaggaattggatttagccgcagagcagcatcggaaacacctggagcagtgcgtgcagctgcgccacctgcaggcagaagtgaaacaggtgctgggttggatccgcaacggagagtccatgttaaatgccggacttatcacagccagctcgttacaagaggcagagcagctccagcgagagcacgagcagttccagcatgccattgagaaaacacatcagagcgcgctgcaggtgcagcagaaggcagaagccatgctacaggccaaccactacgacatggacatgatccgggactgcgccgagaaggtggcgtctcactggcaacagctcatgctcaagatggaagatcgcctcaagctcgtcaacgcctctgtcgctttctacaaaacctcagagcaggtctgcagcgtcctcgagagcctggaacaggagtacaagagagaagaagactggtgtggcggggcggataagctgggcccaaactctgagacggaccacgtgacgcccatgatcagcaagcacctggagcagaaggaggcattcctgaaggcttgcacccttgctcggaggaatgcagacgtcttcctgaaatacccagcacaagaccacacgccagcacaagagggatcctctagatcta

SEQ ID NO: 457242 - DNA, 1644 bp, Homo sapiens
cgcggccgcgggcgccgccgcagccatgagcggcagcagcggcggagccgccgcccccgccgcgtcctccggccccgccgcggcggccagcgcggctggctcgggctgcgggggcggtgccggcgagggggcagaggaggcggccaaggacctggccgacatcgcggccttcttccgatccgggtttcgaaaaaacgatgaaatgaaagctatggatgttttaccaattttgaaggaaaaagttgcatacctttcaggtgggagagataaacgtggaggtcccattttaacgtttccggcccgcagcaatcatgacagaatacgacaggaggatctcaggagactcatttcctatctagcctgtattcccagcgaggaggtctgcaagcgtggcttcacggtgatcgtggacatgcgtgggtccaagtgggactccatcaagccccttctgaagatcctgcaggagtccttcccctgctgcatccatgtggccctgatcatcaagccagacaacttctggcagaaacagaggactaattttggcagttctaaatttgaatttgagacaaatatggtctctttagaaggccttaccaaagtagttgatccttctcagctaactcctgagtttgatggctgcctggaatacaaccacgaagaatggattgaaatcagagttgcttttgaagactacattagcaatgccacccacatgctgtctcggctggaggaacttcaggacatcctagctaagaaggagctgcctcaggatttagagggggctcggaatatgatcgaggaacattctcagctgaagaagaaggtgattaaggcccccatcgaggacctggatttggagggacagaagctgcttcagaggatacagagcagtgaaagctttcccaaaaagaactcaggctcaggcaatgcggacctgcagaacctcttgcccaaggtgtccaccatgctggaccggctgcactcgacacggcagcatctgcaccagatgtggcatgtgaggaagctgaagctggaccagtgcttccagctgaggctgtttgaacaggatgctgagaaggtaaagacgggggaggctaatgcctcagtggacatgggggaagccagcgctggtgggttcgggtggaaggaaagagaaaaggtggagaatggtaaggctatactcaccgtgtgtgctctaaaccagcgagagtcatttcagaaatggcactgaaatctgttttccggttttactcgttgtgcaatacagtgctgttttagaaattttgagttcaaattacttattctttggtctaggatgcctgtaagataggaatgatattttcacttaaaagagtgaacatttcggccgtgctcacgcctgtaatcccagccctttgggaggccgaggtgggctgatcacctgaggtcaggagattgagaccagtctggccaacatagtgaaaccccgtctctactaaaaatacgaaaattagccgggtgtggtggcacgcgcctgtaatcccagctactcaggaggctgaggcaggagaatcgcttgaacccatgaggcagaggttgcagtgagccaagatcgtgccattgcatttcagcctgggcgacagagtgagactccgtcttaaaaaa

SEQ ID NO: 457243 - DNA, 599 bp, Homo sapiens
cgcggccgcgggcgccgccgcagccatgagcggcagcagcggcggagccgccgcccccgccgcgtcctccggccccgccgcggcggccagcgcggctggctcgggctgcgggggcggtgccggcgagggggcagaggaggcggccaaggacctggccgacatcgcggccttcttccgatccgggtttcgaaaaaacgatgaaatgaaagctatggatgttttaccaattttgaaggaaaaagttgcatacctttcaggtgggagagataaacgtggaggtcccattttaacgtttccggcccgcagcaatcatgacagaatacgacaggaggatctcaggagactcatttcctatctagcctgtattcccagcgaggaggtctgcaagcgtggcttcacggtgatcgtggacatgcgtgggtccaagtgggactccatcaagccccttctgaagatcctgcaggagtccttcccctgctgcatccatgtggccctgatcatcaagccagacaacttctggcagaaacagaggactaattttggcagttctaaatttgaatttgaggtaacttcccccgtgtggctagacccactaaaca

SEQ ID NO: 457244 - DNA, 1007 bp, Homo sapiens
tgccccgccccgctccccagcgccccggaagtgatctgtggcggctgctgcagagccgccaggaggagggtggatctccccagagcaaagcgtcggagtcctcctcctccttctcctcctcctcctcctcctcctccagccgcccaggctcccccgccacccgtcagactcctccttcgaccgctcccggcgcggggccttccaggcgacaaggaccgagtaccctccggccggagccacgcagccgcggcttccggagccctcggggcggcggactggctcgcggtgcagattcttcttaatcctttggtgaaaactgagacacaaaatggctgcaaataagcccaagggtcagaattctttggctttacacaaagtcatcatggtgggcagtggtggcgtgggcaagtcagctctgactctacagttcatgtacgatgagtttgtggaggactatgagcctaccaaagcagacagctatcggaagaaggtagtgctagatggggaggaagtccagatcgatatcttagatacagctgggcaggaggactacgctgcaattagagacaactacttccgaagtggggaggggttcctctgtgttttctctattacagaaatggaatcctttgcagctacagctgacttcagggagcagattttaagagtaaaagaagatgagaatgttccatttctactggttggtaacaaatcagatttagaagataaaagacaggtttctgtagaagaggcaaaaaacagagctgagcagtggaatgttaactacgtggaaacatctgctaaaacacgagctaatgttgacaaggtattttttgatttaatgagagaaattcgagcgagaaagatggaagacagcaaagaaaagaatggaaaaaagaagaggaaaagtttagccaagagaatcagagaaagatgctgcattttataatcaaagcccaaactcctttcttatcttgaccatactaataaatataatttataagcat

SEQ ID NO: 457245 - DNA, 355 bp, Homo sapiens
accacactcaagtcaccaaggccgcgcgggccagcggccccatttttttttttgtgtatttattacagtcttatttaaccaggggtcctaaccactaacattgtgactttgctttgagacctttcctctcctgggtactgaggtgctatgaagccaactgacaaagatgcatcacgtgtcttaggctgatgccactacccgatttgtttatttgcaatttgagccatttaaagaccaataaacttccttttttaaaatgtttgtggtgttacttgatgtttacaatgtaacatgtaacattcaaatgtatcaaatgaggcatctttaccaaacaactaaatcttttgagctctca

SEQ ID NO: 457246 - DNA, 2820 bp, Homo sapiens
tgccccgccccgctccccagcgccccggaagtgatctgtggcggctgctgcagagccgccaggaggagggtggatctccccagagcaaagcgtcggagtcctcctcctccttctcctcctcctcctcctcctcctccagccgcccaggctcccccgccacccgtcagactcctccttcgaccgctcccggcgcggggccttccaggcgacaaggaccgagtaccctccggccggagccacgcagccgcggcttccggagccctcggggcggcggactggctcgcggtgcagattcttcttaatcctttggtgaaaactgagacacaaaatggctgcaaataagcccaagggtcagaattctttggctttacacaaagtcatcatggtgggcagtggtggcgtgggcaagtcagctctgactctacagttcatgtacgatgagtttgtggaggactatgagcctaccaaagcagacagctatcggaagaaggtagtgctagatggggaggaagtccagatcgatatcttagatacagctgggcaggaggactacgctgcaattagagacaactacttccgaagtggggaggggttcctctgtgttttctctattacagaaatggaatcctttgcagctacagctgacttcagggagcagattttaagagtaaaagaagatgagaatgttccatttctactggttggtaacaaatcagatttagaagataaaagacaggtttctgtagaagaggcaaaaaacagagctgagcagtggaatgttaactacgtggaaacatctgctaaaacacgagctaatgttgacaaggtattttttgatttaatgagagaaattcgagcgagaaagatggaagacagcaaagaaaagaatggaaaaaagaagaggaaaagtttagccaagagaatcagagaaagatgctgcattttataatcaaagcccaaactcctttcttatcttgaccatactaataaatataatttataagcattgccattgaaggcttaattgactgaaattactttaacattttggaaattgttgtatatcactaaaagcatgaattggaactgcaatgaaagtcaaatttactttaaaaagaaattaatatggcttcaccaagaagcaaagttcaacttatttcataattgcctacatttatcatggtcctgaatgtagcgtgtaagcttgtgtttcttgggcagtctttcttgaaattgaagaggtgaaatgggggtggggagtgggaggaaaggtgacttcctctggtgtttattataaagcttaaattttatatcattttaaaatgtcttggtcttctactgccttgaaaaatgacaattgtgaacatgatagttaaactaccactttttttaaccattattatgcaaaatttagaagaaaagttattggcatggttgttgcatatagttaaactgagagtaattcatctgtgaatctgctttaattacctggtgagtaacttagaaaagtggtgtaaacttgtacatggaattttttgaatatgccttaatttagaaactgaaaaatatccggttatatcattctgggtgtgttcttactgacaccaggggtccgctgccccatgtgtcctggtgagaaaatatatgcctggcacagcttttgtatagaaaattcttgagaagtaactgtccgctagaagtctgtccaaatttaaaatgtgtgccatattctggttcttgaaaataagattccagagctctttgatcgcttttaataaactgcaagttcattttaaatgaagggccagcatatatacttgcaagataattttcagctgcaaggattcagcaccagttatgtttgaatgaaccctccttttctctgagattctggtccctggaaatccctttctgctagtggtgagcatgtaagtgttaagtttttaatctgggagcagggcataggaagaaaatgtcagtagtgctaatgcattttgcactagaacgcttcgggaaaatattcatgcttgccatctgttcatttctaaatttatattcataaagttacagtttgatacaggaattattaggagtaattcttttctgtttctgtttataatgaagaacactgtagctacattttcagaagttaacatcaagccatcaaacctgggtatagtgcagaaaacgtggcacacactgaccacacattaggctgtgtcaccattgtgtggtgtacctgctggaagaattctagcatgctacttggggacataatttcagtgggaaatatgccactgaccgatttttttttttttcctctttgcagtggggctaggacagttgattcaacaaagtatttttttcttttttctcagtcctaatttgaacaggtcaaagatgtgttcaggcattccaggtaacaggtgtgtatgtaaagttaaaaataggctttttaggaactcactctttagatatttacatccagcttctcatgttaaatatttgtccttaaagggtttgagatgtacatctttcatttcgtatttctcataggctatgccatgtgcggaattcaagttaccaatgtaacactggccagcgggcccagcaatctccatgtgtacttattacagtcttatttaaccaggggtcctaaccactaacattgtgactttgctttgagacctttcctctcctgggtactgaggtgctatgaagccaactgacaaagatgcatcacgtgtcttaggctgatgccactacccgatttgtttatttgcaatttgagccatttaaagaccaataaacttccttttt

SEQ ID NO: 457247 - DNA, 2923 bp, Homo sapiens
tgccccgccccgctccccagcgccccggaagtgatctgtggcggctgctgcagagccgccaggaggagggtggatctccccagagcaaagcgtcggagtcctcctcctccttctcctcctcctcctcctcctcctccagccgcccaggctcccccgccacccgtcagactcctccttcgaccgctcccggcgcggggccttccaggcgacaaggaccgagtaccctccggccggagccacgcagccgcggcttccggagccctcggggcggcggactggctcgcggtgcagattcttcttaatcctttggtgaaaactgagacacaaaatggctgcaaataagcccaagggtcagaattctttggctttacacaaagtcatcatggtgggcagtggtggcgtgggcaagtcagctctgactctacagttcatgtacgatgagtttgtggaggactatgagcctaccaaagcagacagctatcggaagaaggtagtgctagatggggaggaagtccagatcgatatcttagatacagctgggcaggaggactacgctgcaattagagacaactacttccgaagtggggaggggttcctctgtgttttctctattacagaaatggaatcctttgcagctacagctgacttcagggagcagattttaagagtaaaagaagatgagaatgttccatttctactggttggtaacaaatcagatttagaagataaaagacaggtttctgtagaagaggcaaaaaacagagctgagcagtggaatgttaactacgtggaaacatctgctaaaacacgagctaatgttgacaagagtggcccttcctgaagaccagatgtggaacacctgcaagtacatttcatcccactgccctagaccagctccagtatctagaaagactgctcactgggctgaggtattttttgatttaatgagagaaattcgagcgagaaagatggaagacagcaaagaaaagaatggaaaaaagaagaggaaaagtttagccaagagaatcagagaaagatgctgcattttataatcaaagcccaaactcctttcttatcttgaccatactaataaatataatttataagcattgccattgaaggcttaattgactgaaattactttaacattttggaaattgttgtatatcactaaaagcatgaattggaactgcaatgaaagtcaaatttactttaaaaagaaattaatatggcttcaccaagaagcaaagttcaacttatttcataattgcctacatttatcatggtcctgaatgtagcgtgtaagcttgtgtttcttgggcagtctttcttgaaattgaagaggtgaaatgggggtggggagtgggaggaaaggtgacttcctctggtgtttattataaagcttaaattttatatcattttaaaatgtcttggtcttctactgccttgaaaaatgacaattgtgaacatgatagttaaactaccactttttttaaccattattatgcaaaatttagaagaaaagttattggcatggttgttgcatatagttaaactgagagtaattcatctgtgaatctgctttaattacctggtgagtaacttagaaaagtggtgtaaacttgtacatggaattttttgaatatgccttaatttagaaactgaaaaatatccggttatatcattctgggtgtgttcttactgacaccaggggtccgctgccccatgtgtcctggtgagaaaatatatgcctggcacagcttttgtatagaaaattcttgagaagtaactgtccgctagaagtctgtccaaatttaaaatgtgtgccatattctggttcttgaaaataagattccagagctctttgatcgcttttaataaactgcaagttcattttaaatgaagggccagcatatatacttgcaagataattttcagctgcaaggattcagcaccagttatgtttgaatgaaccctccttttctctgagattctggtccctggaaatccctttctgctagtggtgagcatgtaagtgttaagtttttaatctgggagcagggcataggaagaaaatgtcagtagtgctaatgcattttgcactagaacgcttcgggaaaatattcatgcttgccatctgttcatttctaaatttatattcataaagttacagtttgatacaggaattattaggagtaattcttttctgtttctgtttataatgaagaacactgtagctacattttcagaagttaacatcaagccatcaaacctgggtatagtgcagaaaacgtggcacacactgaccacacattaggctgtgtcaccattgtgtggtgtacctgctggaagaattctagcatgctacttggggacataatttcagtgggaaatatgccactgaccgatttttttttttttcctctttgcagtggggctaggacagttgattcaacaaagtatttttttcttttttctcagtcctaatttgaacaggtcaaagatgtgttcaggcattccaggtaacaggtgtgtatgtaaagttaaaaataggctttttaggaactcactctttagatatttacatccagcttctcatgttaaatatttgtccttaaagggtttgagatgtacatctttcatttcgtatttctcataggctatgccatgtgcggaattcaagttaccaatgtaacactggccagcgggcccagcaatctccatgtgtacttattacagtcttatttaaccaggggtcctaaccactaacattgtgactttgctttgagacctttcctctcctgggtactgaggtgctatgaagccaactgacaaagatgcatcacgtgtcttaggctgatgccactacccgatttgtttatttgcaatttgagccatttaaagaccaataaacttccttttt

SEQ ID NO: 457248 - DNA, 2923 bp, Homo sapiens
tgccccgccccgctccccagcgccccggaagtgatctgtggcggctgctgcagagccgccaggaggagggtggatctccccagagcaaagcgtcggagtcctcctcctccttctcctcctcctcctcctcctcctccagccgcccaggctcccccgccacccgtcagactcctccttcgaccgctcccggcgcggggccttccaggcgacaaggaccgagtaccctccggccggagccacgcagccgcggcttccggagccctcggggcggcggactggctcgcggtgcagattcttcttaatcctttggtgaaaactgagacacaaaatggctgcaaataagcccaagggtcagaattctttggctttacacaaagtcatcatggtgggcagtggtggcgtgggcaagtcagctctgactctacagttcatgtacgatgagtttgtggaggactatgagcctaccaaagcagacagctatcggaagaaggtagtgctagatggggaggaagtccagatcgatatcttagatacagctgggcaggaggactacgctgcaattagagacaactacttccgaagtggggaggggttcctctgtgttttctctattacagaaatggaatcctttgcagctacagctgacttcagggagcagattttaagagtaaaagaagatgagaatgttccatttctactggttggtaacaaatcagatttagaagataaaagacaggtttctgtagaagaggcaaaaaacagagctgagcagtggaatgttaactacgtggaaacatctgctaaaacacgagctaatgttgacaaggtattttttgatttaatgagagaaattcgagcgagaaagatggaagacagcaaagaaaagaatggaaaaaagaagaggaaaagtttagccaagagaatcagagaaagatgctgcattttataatcaaagcccaaactcctttcttatcttgaccatactaataaatataatttataagcattgccattgaaggcttaattgactgaaattactttaacattttggaaattgttgtatatcactaaaagcatgaattggaactgcaatgaaagtcaaatttactttaaaaagaaattaatatggcttcaccaagaagcaaagttcaacttatttcataattgcctacatttatcatggtcctgaatgtagcgtgtaagcttgtgtttcttgggcagtctttcttgaaattgaagaggtgaaatgggggtggggagtgggaggaaaggtgacttcctctggtgtttattataaagcttaaattttatatcattttaaaatgtcttggtcttctactgccttgaaaaatgacaattgtgaacatgatagttaaactaccactttttttaaccattattatgcaaaatttagaagaaaagttattggcatggttgttgcatatagttaaactgagagtaattcatctgtgaatctgctttaattacctggtgagtaacttagaaaagtggtgtaaacttgtacatggaattttttgaatatgccttaatttagaaactgaaaaatatccggttatatcattctgggtgtgttcttactgacaccaggggtccgctgccccatgtgtcctggtgagaaaatatatgcctggcacagcttttgtatagaaaattcttgagaagtaactgtccgctagaagtctgtccaaatttaaaatgtgtgccatattctggttcttgaaaataagattccagagctctttgatcgcttttaataaactgcaagttcattttaaatgaagggccagcatatatacttgcaagataattttcagctgcaaggattcagcaccagttatgtttgaatgaaccctccttttctctgagattctggtccctggaaatccctttctgctagtggtgagcatgtaagtgttaagtttttaatctgggagcagggcataggaagaaaatgtcagtagtgctaatgcattttgcactagaacgcttcgggaaaatattcatgcttgccatctgttcatttctaaatttatattcataaagttacagtttgatacaggaattattaggagtaattcttttctgtttctgtttataatgaagaacactgtagctacattttcagaagttaacatcaagccatcaaacctgggtatagtgcagaaaacgtggcacacactgaccacacattaggctgtgtcaccattgtgtggtgtacctgctggaagaattctagcatgctacttggggacataatttcagtgggaaatatgccactgaccgatttttttttttttcctctttgcagtggggctaggacagttgattcaacaaagtatttttttcttttttctcagtcctaatttgaacaggtcaaagatgtgttcaggcattccaggtaacaggtgtgtatgtaaagttaaaaataggctttttaggaactcactctttagatatttacatccagcttctcatgttaaatatttgtccttaaagggtttgagatgtacatctttcatttcgtatttctcataggctatgccatgtgcggaattcaagttaccaatgtaacactggccagcgggcccagcaatctccatgtgtacttattacagtcttatttaaccaggggtcctaaccactaacattgtgactttgctttgagacctttcctctcctgggtactgaggtgctatgaagccaactgacaaagatgcatcacgtgtcttaggctgatgccactacccgatttgtttatttgcaatttgagccatttaaagaccaataaacttccttttttaaaatgtttgtggtgttacttgatgtttacaatgtaacatgtaacattcaaatgtatcaaatgaggcatctttaccaaacaactaaatcttttgagctctca

SEQ ID NO: 457249 - DNA, 2134 bp, Homo sapiens
gctacataaaagtcatttgcagcaactattcaatttccagaattaggttatacttgtgtttgtggttgttttcctgaggaaataatctaataatcagaaaagctaatatttatttgtgtttataagagccaggcactgtggtattttttgatttaatgagagaaattcgagcgagaaagatggaagacagcaaagaaaagaatggaaaaaagaagaggaaaagtttagccaagagaatcagagaaagatgctgcattttataatcaaagcccaaactcctttcttatcttgaccatactaataaatataatttataagcattgccattgaaggcttaattgactgaaattactttaacattttggaaattgttgtatatcactaaaagcatgaattggaactgcaatgaaagtcaaatttactttaaaaagaaattaatatggcttcaccaagaagcaaagttcaacttatttcataattgcctacatttatcatggtcctgaatgtagcgtgtaagcttgtgtttcttgggcagtctttcttgaaattgaagaggtgaaatgggggtggggagtgggaggaaaggtgacttcctctggtgtttattataaagcttaaattttatatcattttaaaatgtcttggtcttctactgccttgaaaaatgacaattgtgaacatgatagttaaactaccactttttttaaccattattatgcaaaatttagaagaaaagttattggcatggttgttgcatatagttaaactgagagtaattcatctgtgaatctgctttaattacctggtgagtaacttagaaaagtggtgtaaacttgtacatggaattttttgaatatgccttaatttagaaactgaaaaatatccggttatatcattctgggtgtgttcttactgacaccaggggtccgctgccccatgtgtcctggtgagaaaatatatgcctggcacagcttttgtatagaaaattcttgagaagtaactgtccgctagaagtctgtccaaatttaaaatgtgtgccatattctggttcttgaaaataagattccagagctctttgatcgcttttaataaactgcaagttcattttaaatgaagggccagcatatatacttgcaagataattttcagctgcaaggattcagcaccagttatgtttgaatgaaccctccttttctctgagattctggtccctggaaatccctttctgctagtggtgagcatgtaagtgttaagtttttaatctgggagcagggcataggaagaaaatgtcagtagtgctaatgcattttgcactagaacgcttcgggaaaatattcatgcttgccatctgttcatttctaaatttatattcataaagttacagtttgatacaggaattattaggagtaattcttttctgtttctgtttataatgaagaacactgtagctacattttcagaagttaacatcaagccatcaaacctgggtatagtgcagaaaacgtggcacacactgaccacacattaggctgtgtcaccattgtgtggtgtacctgctggaagaattctagcatgctacttggggacataatttcagtgggaaatatgccactgaccgatttttttttttttcctctttgcagtggggctaggacagttgattcaacaaagtatttttttcttttttctcagtcctaatttgaacaggtcaaagatgtgttcaggcattccaggtaacaggtgtgtatgtaaagttaaaaataggctttttaggaactcactctttagatatttacatccagcttctcatgttaaatatttgtccttaaagggtttgagatgtacatctttcatttcgtatttctcataggctatgccatgtgcggaattcaagttaccaatgtaacactggccagcgggcccagcaatctccatgtgtacttattacagtcttatttaaccaggggtcctaaccactaacattgtgactttgctttgagacctttcctctcctgggtactgaggtgctatgaagccaactgacaaagatgcatcacgtgtcttaggctgatgccactacccgatttgtttatttgcaatttgagccatttaaagaccaataaacttccttttt

SEQ ID NO: 457250 - DNA, 790 bp, Homo sapiens
  misc_feature (657)..(657): n is a, c, g, or t
  misc_feature (677)..(677): n is a, c, g, or t
  misc_feature (764)..(764): n is a, c, g, or t
tgccccgccccgctccccagcgccccggaagtgatctgtggcggctgctgcagagccgccaggaggagggtggatctccccagagcaaagcgtcggagtcctcctcctccttctcctcctcctcctcctcctcctccagccgcccaggctcccccgccacccgtcagactcctccttcgaccgctcccggcgcggggccttccaggcgacaaggaccgagtaccctccggccggagccacgcagccgcggcttccggagccctcggggcggcggactggctcgcggtgcagattcttcttaatcctttggtgaaaactgagacacaaaatggctgcaaataagcccaagggtcagaattctttggctttacacaaagtcatcatggtgggcagtggtggcgtgggcaagtcagctctgactctacagttcatgtacgatgagtttgtggaggactatgagcctaccaaagcagacagctatcggaagaaggtagtgctagatggggaggaagtccagatcgatatcttagatacagctgggcaggaggactacgctgcaattagagacaactacttccgaagtggggaggggttcctctgtgttttctctattacagaaatggaatcctttgcagctacagctgacttcaggggaancaagaattttaaagaaattnaaaagaaagatgaagaattgttcccattttcttactgggtttgggtaaccaaaatccaagaattttaggaaagaattaaaaagaacngggttttcctgttaaaaaaaaaaggc

SEQ ID NO: 457251 - DNA, 2767 bp, Homo sapiens
tgccccgccccgctccccagcgccccggaagtgatctgtggcggctgctgcagagccgccaggaggagggtggatctccccagagcaaagcgtcggagtcctcctcctccttctcctcctcctcctcctcctcctccagccgcccaggctcccccgccacccgtcagactcctccttcgaccgctcccggcgcggggccttccaggcgacaaggaccgagtaccctccggccggagccacgcagccgcggcttccggagccctcggggcggcggactggctcgcggtgcagattcttcttaatcctttggtgaaaactgagacatcatcatggtgggcagtggtggcgtgggcaagtcagctctgactctacagttcatgtacgatgagtttgtggaggactatgagcctaccaaagcagacagctatcggaagaaggtagtgctagatggggaggaagtccagatcgatatcttagatacagctgggcaggaggactacgctgcaattagagacaactacttccgaagtggggaggggttcctctgtgttttctctattacagaaatggaatcctttgcagctacagctgacttcagggagcagattttaagagtaaaagaagatgagaatgttccatttctactggttggtaacaaatcagatttagaagataaaagacaggtttctgtagaagaggcaaaaaacagagctgagcagtggaatgttaactacgtggaaacatctgctaaaacacgagctaatgttgacaaggtattttttgatttaatgagagaaattcgagcgagaaagatggaagacagcaaagaaaagaatggaaaaaagaagaggaaaagtttagccaagagaatcagagaaagatgctgcattttataatcaaagcccaaactcctttcttatcttgaccatactaataaatataatttataagcattgccattgaaggcttaattgactgaaattactttaacattttggaaattgttgtatatcactaaaagcatgaattggaactgcaatgaaagtcaaatttactttaaaaagaaattaatatggcttcaccaagaagcaaagttcaacttatttcataattgcctacatttatcatggtcctgaatgtagcgtgtaagcttgtgtttcttgggcagtctttcttgaaattgaagaggtgaaatgggggtggggagtgggaggaaaggtgacttcctctggtgtttattataaagcttaaattttatatcattttaaaatgtcttggtcttctactgccttgaaaaatgacaattgtgaacatgatagttaaactaccactttttttaaccattattatgcaaaatttagaagaaaagttattggcatggttgttgcatatagttaaactgagagtaattcatctgtgaatctgctttaattacctggtgagtaacttagaaaagtggtgtaaacttgtacatggaattttttgaatatgccttaatttagaaactgaaaaatatccggttatatcattctgggtgtgttcttactgacaccaggggtccgctgccccatgtgtcctggtgagaaaatatatgcctggcacagcttttgtatagaaaattcttgagaagtaactgtccgctagaagtctgtccaaatttaaaatgtgtgccatattctggttcttgaaaataagattccagagctctttgatcgcttttaataaactgcaagttcattttaaatgaagggccagcatatatacttgcaagataattttcagctgcaaggattcagcaccagttatgtttgaatgaaccctccttttctctgagattctggtccctggaaatccctttctgctagtggtgagcatgtaagtgttaagtttttaatctgggagcagggcataggaagaaaatgtcagtagtgctaatgcattttgcactagaacgcttcgggaaaatattcatgcttgccatctgttcatttctaaatttatattcataaagttacagtttgatacaggaattattaggagtaattcttttctgtttctgtttataatgaagaacactgtagctacattttcagaagttaacatcaagccatcaaacctgggtatagtgcagaaaacgtggcacacactgaccacacattaggctgtgtcaccattgtgtggtgtacctgctggaagaattctagcatgctacttggggacataatttcagtgggaaatatgccactgaccgatttttttttttttcctctttgcagtggggctaggacagttgattcaacaaagtatttttttcttttttctcagtcctaatttgaacaggtcaaagatgtgttcaggcattccaggtaacaggtgtgtatgtaaagttaaaaataggctttttaggaactcactctttagatatttacatccagcttctcatgttaaatatttgtccttaaagggtttgagatgtacatctttcatttcgtatttctcataggctatgccatgtgcggaattcaagttaccaatgtaacactggccagcgggcccagcaatctccatgtgtacttattacagtcttatttaaccaggggtcctaaccactaacattgtgactttgctttgagacctttcctctcctgggtactgaggtgctatgaagccaactgacaaagatgcatcacgtgtcttaggctgatgccactacccgatttgtttatttgcaatttgagccatttaaagaccaataaacttccttttt

SEQ ID NO: 457252 - DNA, 1524 bp, Homo sapiens
tgccccgccccgctccccagcgccccggaagtgatctgtggcggctgctgcagagccgccaggaggagggtggatctccccagagcaaagcgtcggagtcctcctcctccttctcctcctcctcctcctcctcctccagccgcccaggctcccccgccacccgtcagactcctccttcgaccgctcccggcgcggggccttccaggcgacaaggaccgagtaccctccggccggagccacgcagccgcggcttccggagccctcggggcggcggactggctcgcggtgcaggtgtgttcttactgacaccaggggtccgctgccccatgtgtcctggtgagaaaatatatgcctggcacagcttttgtatagaaaattcttgagaagtaactgtccgctagaagtctgtccaaatttaaaatgtgtgccatattctggttcttgaaaataagattccagagctctttgatcgcttttaataaactgcaagttcattttaaatgaagggccagcatatatacttgcaagataattttcagctgcaaggattcagcaccagttatgtttgaatgaaccctccttttctctgagattctggtccctggaaatccctttctgctagtggtgagcatgtaagtgttaagtttttaatctgggagcagggcataggaagaaaatgtcagtagtgctaatgcattttgcactagaacgcttcgggaaaatattcatgcttgccatctgttcatttctaaatttatattcataaagttacagtttgatacaggaattattaggagtaattcttttctgtttctgtttataatgaagaacactgtagctacattttcagaagttaacatcaagccatcaaacctgggtatagtgcagaaaacgtggcacacactgaccacacattaggctgtgtcaccattgtgtggtgtacctgctggaagaattctagcatgctacttggggacataatttcagtgggaaatatgccactgaccgatttttttttttttcctctttgcagtggggctaggacagttgattcaacaaagtatttttttcttttttctcagtcctaatttgaacaggtcaaagatgtgttcaggcattccaggtaacaggtgtgtatgtaaagttaaaaataggctttttaggaactcactctttagatatttacatccagcttctcatgttaaatatttgtccttaaagggtttgagatgtacatctttcatttcgtatttctcataggctatgccatgtgcggaattcaagttaccaatgtaacactggccagcgggcccagcaatctccatgtgtacttattacagtcttatttaaccaggggtcctaaccactaacattgtgactttgctttgagacctttcctctcctgggtactgaggtgctatgaagccaactgacaaagatgcatcacgtgtcttaggctgatgccactacccgatttgtttatttgcaatttgagccatttaaagaccaataaacttccttttt

SEQ ID NO: 457253 - DNA, 3718 bp, Homo sapiens
gcggacggacgcgcctggtgccccggggaggggcgccaccgggggaggaggaggaggagaaggtggagaggaagagacgccccctctgcccgagacctctcaaggccctgacctcaggggccagggcactgacaggacaggagagccaagttcctccacttgggctgcccgaagaggccgcgaccctggagggccctgagcccaccgcaccaggggccccagcaccaccccgggggcctaaagcgacagtctcaggggccatcgcaaggtttccagttgcctagacaacaggcccagggtcagagcaacaatccttccagccacctgcctcaactgctgccccaggcaccagccccagtccctacgcggcagccagcccaggtgacatgccggtgctctccaggccccggccctggcgggggaacacgctgaagcgcacggccgtgctcctggccctcgcggcctatggagcccacaaagtctaccccttggtgcgccagtgcctggccccggccaggggtcttcaggcgcccgccggggagcccacgcaggaggcctccggggtcgcggcggccaaagctggcatgaaccgggtattcctgcagcggctcctgtggctcctgcggctgctgttcccccgggtcctgtgccgggagacggggctgctggccctgcactcggccgccttggtgagccgcaccttcctgtcggtgtatgtggcccgcctggacggaaggctggcccgctgcatcgtccgcaaggacccgcgggcttttggctggcagctgctgcagtggctcctcatcgccctccctgctaccttcgtcaacagtgccatccgttacctggagggccaactggccctgtcgttccgcagccgtctggtggcccacgcctaccgcctctacttctcccagcagacctactaccgggtcagcaacatggacgggcggcttcgcaaccctgaccagtctctgacggaggacgtggtggcctttgcggcctctgtggcccacctctactccaacctgaccaagccactcctggacgtggctgtgacttcctacaccctgcttcgggcggcccgctcccgtggagccggcacagcctggccctcggccatcgccggcctcgtggtgttcctcacggccaacgtgctgcgggccttctcgcccaagttcggggagctggtggcagaggaggcgcggcggaagggggagctgcgctacatgcactcgcgtgtggtggccaactcggaggagatcgccttctatgggggccatgaggtggagctggccctgctacagcgctcctaccaggacctggcctcgcagatcaacctcatccttctggaacgcctgtggtatgttatgctggagcagttcctcatgaagtatgtgtggagcgcctcgggcctgctcatggtggctgtccccatcatcactgccactggctactcagagtcagatgcagaggccgtgaagaaggcagccttggaaaagaaggaggaggagctggtgagcgagcgcacagaagccttcactattgcccgcaacctcctgacagcggctgcagatgccattgagcggatcatgtcgtcgtacaaggaggtgacggagctggctggctacacagcccgggtgcacgagatgttccaggtatttgaagatgttcagcgctgtcacttcaagaggcccagggagctagaggacgctcaggcggggtctgggaccataggccggtctggtgtccgtgtggagggccccctgaagatccgaggccaggtggtggatgtggaacaggggatcatctgcgagaacatccccatcgtcacgccctcaggagaggtggtggtggccagcctcaacatcagggtggaggaaggcatgcatctgctcatcacaggccccaatggctgcggcaagagctccctgttccggatcctgggtgggctctggcccacgtacggtggtgtgctctacaagcccccaccccagcgcatgttctacatcccgcagaggccctacatgtctgtgggctccctgcgtgaccaggtgatctacccggactcagtggaggacatgcaaaggaagggctactcggagcaggacctggaagccatcctggacgtcgtgcacctgcaccacatcctgcagcgggagggaggttgggaggctatgtgtgactggaaggacgtcctgtcgggtggcgagaagcagagaatcggcatggcccgcatgttctaccacaggcccaagtacgccctcctggatgaatgcaccagcgccgtgagcatcgacgtggaaggcaagatcttccaggcggccaaggacgcgggcattgccctgctctccatcacccaccggccctccctgtggaaataccacacacacttgctacagttcgatggggagggcggctggaagttcgagaagctggactcagctgcccgcctgagcctgacggaggagaagcagcggctggagcagcagctggcgggcattcccaagatgcagcggcgcctccaggagctctgccagatcctgggcgaggccgtggccccagcgcatgtgccggcacctagcccgcaaggccctggtggcctccagggtgcctccacctgacacaaccgtccccggcccctgccccgcccccaagctcggatcacatgaaggagacagcagcacccacccatgcacgcaccccgcccctgcatgcctggcccctcctcctagaaaacccttcccgccctcgggaaagtagatgtggagggtggcgccctgcgtaaccctcgccctgtccctcccactccctgggggcgctgttccacagtgactgggccctgtccagggcagtgagtcctctactttgctccgtggaggaagctggggtacaaggggcccagtgctggccacacagcagcgcagccgagccccaggagcccgtcaggccacagcccctggcactgcaggtggcctccctccagagactcgagtccccatgattccctcctcgtcagtctctcaaagaccccatggtccatcccctgagggtggtcagccaaggctcccgttccgtgggatgccataaaagccgcccagtgggacccacagtcacacagagcgcctcacctgcatcctctcccccacaagagccccaaagatcccacgggagaggggagagggacgcacagcactgcctgccaagcgagaatgcaggccccgccccctcggcccctcaccacctctttctacagcctaatttattggattccctattcgtagccatctccgtggccaatgtgactaccgtgccagcagcgggggcggcccagcctctgagtcccgtggggccccggctcccaccggtgccaaacccagcccctgcggccgtcaccccgccagcctacactgccagccgccaccggggcacacgggcctctgcttgccagccaggagtgcggacaccatgttcccagctcagtgccaaagaggggtcaccagggggagctgtctgcggagccagcgcctgcccgagagagaccccaccgccaccgtgtgcctttcccgggccctcagccctcgggccgggcaccacccccagtccccccagtaaaagcctccactggcaaatgcagtccttccaatacaataatatatactcgaggggaggccctgtcccattatccctattggagttctttaacattacatggcct

SEQ ID NO: 457254 - DNA, 3243 bp, Homo sapiens
gcggacggacgcgcctggtgccccggggaggggcgccaccgggggaggaggaggaggagaaggtggagaggaagagacgccccctctgcccgagacctctcaaggccctgacctcaggggccagggcactgacaggacaggagagccaagttcctccacttgggctgcccgaagaggccgcgaccctggagggccctgagcccaccgcaccaggggccccagcaccaccccgggggcctaaagcgacagtctcaggggccatcgcaaggtttccagttgcctagacaacaggcccagggtcagagcaacaatccttccagccacctgcctcaactgctggcccgctgcatcgtccgcaaggacccgcgggcttttggctggcagctgctgcagtggctcctcatcgccctccctgctaccttcgtcaacagtgccatccgttacctggagggccaactggccctgtcgttccgcagccgtctggtggcccacgcctaccgcctctacttctcccagcagacctactaccgggtcagcaacatggacgggcggcttcgcaaccctgaccagtctctgacggaggacgtggtggcctttgcggcctctgtggcccacctctactccaacctgaccaagccactcctggacgtggctgtgacttcctacaccctgcttcgggcggcccgctcccgtggagccggcacagcctggccctcggccatcgccggcctcgtggtgttcctcacggccaacgtgctgcgggccttctcgcccaagttcggggagctggtggcagaggaggcgcggcggaagggggagctgcgctacatgcactcgcgtgtggtggccaactcggaggagatcgccttctatgggggccatgaggtggagctggccctgctacagcgctcctaccaggacctggcctcgcagatcaacctcatccttctggaacgcctgtggtatgttatgctggagcagttcctcatgaagtatgtgtggagcgcctcgggcctgctcatggtggctgtccccatcatcactgccactggctactcagagtcagatgcagaggccgtgaagaaggcagccttggaaaagaaggaggaggagctggtgagcgagcgcacagaagccttcactattgcccgcaacctcctgacagcggctgcagatgccattgagcggatcatgtcgtcgtacaaggaggtgacggagctggctggctacacagcccgggtgcacgagatgttccaggtatttgaagatgttcagcgctgtcacttcaagaggcccagggagctagaggacgctcaggcggggtctgggaccataggccggtctggtgtccgtgtggagggccccctgaagatccgaggccaggtggtggatgtggaacaggggatcatctgcgagaacatccccatcgtcacgccctcaggagaggtggtggtggccagcctcaacatcagggtggaggaaggcatgcatctgctcatcacaggccccaatggctgcggcaagagctccctgttccggatcctgggtgggctctggcccacgtacggtggtgtgctctacaagcccccaccccagcgcatgttctacatcccgcagaggccctacatgtctgtgggctccctgcgtgaccaggtgatctacccggactcagtggaggacatgcaaaggaagggctactcggagcaggacctggaagccatcctggacgtcgtgcacctgcaccacatcctgcagcgggagggaggttgggaggctatgtgtgactggaaggacgtcctgtcgggtggcgagaagcagagaatcggcatggcccgcatgttctaccacaggcccaagtacgccctcctggatgaatgcaccagcgccgtgagcatcgacgtggaaggcaagatcttccaggcggccaaggacgcgggcattgccctgctctccatcacccaccggccctccctgtggaaataccacacacacttgctacagttcgatggggagggcggctggaagttcgagaagctggactcagctgcccgcctgagcctgacggaggagaagcagcggctggagcagcagctggcgggcattcccaagatgcagcggcgcctccaggagctctgccagatcctgggcgaggccgtggccccagcgcatgtgccggcacctagcccgcaaggccctggtggcctccagggtgcctccacctgacacaaccgtccccggcccctgccccgcccccaagctcggatcacatgaaggagacagcagcacccacccatgcacgcaccccgcccctgcatgcctggcccctcctcctagaaaacccttcccgccctcgggaaagtagatgtggagggtggcgccctgcgtaaccctcgccctgtccctcccactccctgggggcgctgttccacagtgactgggccctgtccagggcagtgagtcctctactttgctccgtggaggaagctggggtacaaggggcccagtgctggccacacagcagcgcagccgagccccaggagcccgtcaggccacagcccctggcactgcaggtggcctccctccagagactcgagtccccatgattccctcctcgtcagtctctcaaagaccccatggtccatcccctgagggtggtcagccaaggctcccgttccgtgggatgccataaaagccgcccagtgggacccacagtcacacagagcgcctcacctgcatcctctcccccacaagagccccaaagatcccacgggagaggggagagggacgcacagcactgcctgccaagcgagaatgcaggccccgccccctcggcccctcaccacctctttctacagcctaatttattggattccctattcgtagccatctccgtggccaatgtgactaccgtgccagcagcgggggcggcccagcctctgagtcccgtggggccccggctcccaccggtgccaaacccagcccctgcggccgtcaccccgccagcctacactgccagccgccaccggggcacacgggcctctgcttgccagccaggagtgcggacaccatgttcccagctcagtgccaaagaggggtcaccagggggagctgtctgcggagccagcgcctgcccgagagagaccccaccgccaccgtgtgcctttcccgggccctcagccctcgggccgggcaccacccccagtccccccagtaaaagcctccactggcaaatgcagtccttcc

SEQ ID NO: 457255 - DNA, 1950 bp, Homo sapiens
gcggacggacgcgcctggtgccccggggaggggcgccaccgggggaggaggaggaggagaaggtggagaggaagagacgccccctctgcccgagacctctcaaggccctgacctcaggggccagggcactgacaggacaggagagccaagttcctccacttgggctgcccgaagaggccgcgaccctggagggccctgagcccaccgcaccaggggccccagcaccaccccgggggcctaaagcgacagtctcaggggccatcgcaaggtttccagttgcctagacaacaggcccagggtcagagcaacaatccttccagccacctgcctcaactgctgccccaggcaccagccccagtccctacgcggcagccagcccaggtgacatgccggtgctctccaggccccggccctggcgggggaacacgctgaagcgcacggccgtgctcctggccctcgcggcctatggagcccacaaagtctaccccttggtgcgccagtgcctggccccggccaggggtcttcaggcgcccgccggggagcccacgcaggaggcctccggggtcgcggcggccaaagctggcatgaaccgggtattcctgcagcggctcctgtggctcctgcggctgctgttcccccgggtcctgtgccgggagacggggctgctggccctgcactcggccgccttggtgagccgcaccttcctgtcggtgtatgtggcccgcctggacggaaggctggcccgctgcatcgtccgcaaggacccgcgggcttttggctggcagctgctgcagtggctcctcatcgccctccctgctaccttcgtcaacagtgccatccgttacctggagggccaactggccctgtcgttccgcagccgtctggtggcccacgcctaccgcctctacttctcccagcagacctactaccgggtcagcaacatggacgggcggcttcgcaaccctgaccagtctctgacggaggacgtggtggcctttgcggcctctgtggcccacctctactccaacctgaccaagccactcctggacgtggctgtgacttcctacaccctgcttcgggcggcccgctcccgtggagccggcacagcctggccctcggccatcgccggcctcgtggtgttcctcacggccaacgtgctgcgggccttctcgcccaagttcggggagctggtggcagaggaggcgcggcggaagggggagctgcgctacatgcactcgcgtgtggtggccaactcggaggagatcgccttctatgggggccatgaggtggagctggccctgctacagcgctcctaccaggacctggcctcgcagatcaacctcatccttctggaacgcctgtggtatgttatgctggagcagttcctcatgaagtatgtgtggagcgcctcgggcctgctcatggtggctgtccccatcatcactgccactggctactcagagtcaggtgagacccagggctccaagaggatccaggccaggggcctgtcccccataccgctgggtgctgagctcacgagggcccaactcagccagcccgccgccacttctgctgccggggccaccgaggccctgctgccagccttgatgctttcagaggttgagctcgcttgcccctccttgttgccttttgccctgcgcgcacctcacgccctttgttaccactcagacaagcccaggactgcaagtcaggaacactacatgtcacttctccaggcacagataccctcacccacctgtccctgtcctcaacccaactgcgacttagaggtgggagaatgtgcggagtacctggagtgagccccttcatcactccagccttggtttcctcgccctgaaacagctcttgcaccctaaggtgttttagaggagtgggaagcctgttctacctgttattttagtgataagattaaatgtttaggtttctgca

SEQ ID NO: 457256 - DNA, 596 bp, Homo sapiens
tgttctccacagtggctgccccattttaccttcccgccagcagtgttggagggttccaccttttcatcgtggctagcactggttatcatctcctttgtattctagccacctagtgggtgtgaggcagtatctcttggtggttttgatttgcatttccctgatgactaatgacgctgagcctcttttgatgtgttgagtggccatttgtatgtcttctttggagaaatgtctgttcacgtccttcgcccatgtgtgatcgggttatctctgtcgctgagttgtaaaagctctttgtatattctggatactgcaccctcatcagatgtgtggttcaccagtccagagttttctcccagtctgtaggttgtctttttcactgtctcgatattgtcctttggtgcacaaaagtgttgagttgaatgaggttcagttgatctgtttttctcttgttgctcatgcttttggtgtcctagtgaaggaactattgccatatccaaggtcgtgaagttttatcccattttcttctgagagtttcatactttgggccacactacacatcagcctgtgatgtgctctgggttggtttgtctgtatgg

SEQ ID NO: 457257 - DNA, 3644 bp, Homo sapiens
gcggacggacgcgcctggtgccccggggaggggcgccaccgggggaggaggaggaggagaaggtggagaggaagagacgccccctctgcccgagacctctcaaggccctgacctcaggggccagggcactgacaggacaggagagccaagttcctccacttgggctgcccgaagaggccgcgaccctggagggccctgagcccaccgcaccaggggccccagcaccaccccgggggcctaaagcgacagtctcaggggccatcgcaaggtttccagttgcctagacaacaggcccagggtcagagcaacaatccttccagccacctgcctcaactgctgccccaggcaccagccccagtccctacgcggcagccagcccaggtgacatgccggtgctctccaggccccggccctggcgggggaacacgctgaagcgcacggccgtgctcctggccctcgcggcctatggagcccacaaagtctaccccttggtgcgccagtgcctggccccggccaggggtcttcaggcgcccgccggggagcccacgcaggaggcctccggggtcgcggcggccaaagctggcatgaaccgggtattcctgcagcggctcctgtggctcctgcggctgctgttcccccgggtcctgtgccgggagacggggctgctggccctgcactcggccgccttggtgagccgcaccttcctgtcggtgtatgtggcccgcctggacggaaggctggcccgctgcatcgtccgcaaggacccgcgggcttttggctggcagctgctgcagtggctcctcatcgccctccctgctaccttcgtcaacagtgccatccgttacctggagggccaactggccctgtcgttccgcagccgtctggtggcccacgcctaccgcctctacttctcccagcagacctactaccgggtcagcaacatggacgggcggcttcgcaaccctgaccagtctctgacggaggacgtggtggcctttgcggcctctgtggcccacctctactccaacctgaccaagccactcctggacgtggctgtgacttcctacaccctgcttcgggcggcccgctcccgtggagccggcacagcctggccctcggccatcgccggcctcgtggtgttcctcacggccaacgtgctgcgggccttctcgcccaagttcggggagctggtggcagaggaggcgcggcggaagggggagctgcgctacatgcactcgcgtgtggtggccaactcggaggagatcgccttctatgggggccatgaggtggagctggccctgctacagcgctcctaccaggacctggcctcgcagatcaacctcatccttctggaacgcctgtggtatgttatgctggagcagttcctcatgaagtatgtgtggagcgcctcgggcctgctcatggtggctgtccccatcatcactgccactggctactcagagtcagatgcagaggccgtgaagaaggcagccttggaaaagaaggaggaggagctggtgagcgagcgcacagaagccttcactattgcccgcaacctcctgacagcggctgcagatgccattgagcggatcatgtcgtcgtacaaggaggtgacggagctggctggctacacagcccgggtgcacgagatgttccaggtatttgaagatgttcagcgctgtcacttcaagaggcccagggagctagaggacgctcaggcggggtctgggaccataggccggtctggtgtccgtgtggagggccccctgaagatccgaggccaggtggtggatgtggaacaggggatcatctgcgagaacatccccatcgtcacgccctcaggagaggtggtggtggccagcctcaacatcagggtggaggaaggcatgcatctgctcatcacaggccccaatggctgcggcaagagctccctgttccggatcctgggtgggctctggcccacgtacggtggtgtgctctacaagcccccaccccagcgcatgttctacatcccgcagaggccctacatgtctgtgggctccctgcgtgaccaggtgatctacccggactcagtggaggacatgcaaaggaagggctactcggagcaggacctggaagccatcctggacgtcgtgcacctgcaccacatcctgcagcgggagggaggttgggaggctatgtgtgactggaaggacgtcctgtcgggtggcgagaagcagagaatcggcatggcccgcatgttctaccacaggcccaagtacgccctcctggatgaatgcaccagcgccgtgagcatcgacgtggaaggcaagatcttccaggcggccaaggacgcgggcattgccctgctctccatcacccaccggccctccctgtggaaataccacacacacttgctacagttcgatggggagggcggctggaagttcgagaagctggactcagctgcccgcctgagcctgacggaggagaagcagcggctggagcagcagctggcgggcattcccaagatgcagcggcgcctccaggagctctgccagatcctgggcgaggccgtggccccagcgcatgtgccggcacctagcccgcaaggccctggtggcctccagggtgcctccacctgacacaaccgtccccggcccctgccccgcccccaagctcggatcacatgaaggagacagcagcacccacccatgcacgcaccccgcccctgcatgcctggcccctcctcctagaaaacccttcccgccctcgggaaagtagatgtggagggtggcgccctgcgtaaccctcgccctgtccctcccactccctgggggcgctgttccacagtgactgggccctgtccagggcagtgagtcctctactttgctccgtggaggaagctggggtacaaggggcccagtgctggccacacagcagcgcagccgagccccaggagcccgtcaggccacagcccctggcactgcaggtggcctccctccagagactcgagtccccatgattccctcctcgtcagtctctcaaagaccccatggtccatcccctgagggtggtcagccaaggctcccgttccgtgggatgccataaaagccgcccagtgggacccacagtcacacagagcgcctcacctgcatcctctcccccacaagagccccaaagatcccacgggagaggggagagggacgcacagcactgcctgccaagcgagaatgcaggccccgccccctcggcccctcaccacctctttctacagcctaatttattggattccctattcgtagccatctccgtggccaatgtgactaccgtgccagcagcgggggcggcccagcctctgagtcccgtggggccccggctcccaccggtgccaaacccagcccctgcggccgtcaccccgccagcctacactgccagccgccaccggggcacacgggcctctgcttgccagccaggagtgcggacaccatgttcccagctcagtgccaaagaggggtcaccagggggagctgtctgcggagccagcgcctgcccgagagagaccccaccgccaccgtgtgcctttcccgggccctcagccctcgggccgggcaccacccccagtccccccagtaaaagcctccactggcaaatgcagtccttcc

SEQ ID NO: 457258 - DNA, 3585 bp, Homo sapiens
gcggacggacgcgcctggtgccccggggaggggcgccaccgggggaggaggaggaggagaaggtggagaggaagagacgccccctctgcccgagacctctcaaggccctgacctcaggggccagggcactgacaggacaggagagccaagttcctccacttgggctgcccgaagaggccgcgaccctggagggccctgagcccaccgcaccaggggccccagcaccaccccgggggcctaaagcgacagtctcaggggccatcgcaaggtttccagttgcctagacaacaggcccagggtcagagcaacaatccttccagccacctgcctcaactgctgccccaggcaccagccccagtccctacgcggcagccagcccaggtgacatgccggtgctctccaggccccggccctggcgggggaacacgctgaagcgcacggccgtgctcctggccctcgcggcctatggagcccacaaagtctaccccttggtgcgccagtgcctggccccggccaggggtcttcaggcgcccgccggggagcccacgcaggaggcctccggggtcgcggcggccaaagctggcatgaaccgggtattcctgcagcggctcctgtggctcctgcggctgctgttcccccgggtcctgtgccgggagacggggctgctggccctgcactcggccgccttggtgagccgcaccttcctgtcggtgtatgtggcccgcctggacggaaggctggcccgctgcatcgtccgcaaggacccgcgggcttttggctggcagctgctgcagtggctcctcatcgccctccctgctaccttcgtcaacagtgccatccgttacctggagggccaactggccctgtcgttccgcagccgtctggtggcccacgcctaccgcctctacttctcccagcagacctactaccgggtcagcaacatggacgggcggcttcgcaaccctgaccagtctctgacggaggacgtggtggcctttgcggcctctgtggcccacctctactccaacctgaccaagccactcctggacgtggctgtgacttcctacaccctgcttcgggcggcccgctcccgtggagccggcacagcctggccctcggccatcgccggcctcgtggtgttcctcacggccaacgtgctgcgggccttctcgcccaagttcggggagctggtggcagaggaggcgcggcggaagggggagctgcgctacatgcactcgcgtgtggtggccaactcggaggagatcgccttctatgggggccatgaggtggagctggccctgctacagcgctcctaccaggacctggcctcgcagatcaacctcatccttctggaacgcctgtggtatgttatgctggagcagttcctcatgaagtatgtgtggagcgcctcgggcctgctcatggtggctgtccccatcatcactgccactggctactcagagtcagatgcagaggccgtgaagaaggcagccttggaaaagaaggaggaggagctggtgagcgagcgcacagaagccttcactattgcccgcaacctcctgacagcggctgcagatgccattgagcggatcatgtcgtcgtacaaggaggtgacggagctggctggctacacagcccgggtgcacgagatgttccaggtatttgaagatgttcagcgctgtcacttcaagaggcccagggagctagaggacgctcaggcggggtctgggaccataggccggtctggtgtccgtgtggagggccccctgaagatccgaggccaggtggtggatgtggaacaggggatcatctgcgagaacatccccatcgtcacgccctcaggagaggtggtggtggccagcctcaacatcagggtggaggaaggcatgcatctgctcatcacaggccccaatggctgcggcaagagctccctgttccggatcctgggtgggctctggcccacgtacggtggtgtgctctacaagcccccaccccagcgcatgttctacatcccgcagaggccctacatgtctgtgggctccctgcgtgaccaggtgatctacccggactcagtggaggacatgcaaaggaagggctactcggagcaggacctggaagccatcctggacgtcgtgcacctgcaccacatcctgcagcgggagggaggttgggaggctatgtgtgactggaaggacgtcctgtcgggtggcgagaagcagagaatcggcatggcccgcatgttctaccacaggcccaagtacgccctcctggatgaatgcaccagcgccgtgagcatcgacgtggaaggcaagatcttccaggcggccaaggacgcgggcattgccctgctctccatcacccaccggccctccctgtggaaataccacacacacttgctacagttcgatggggagggcggctggaagttcgagaagctggactcagctgcccgcctgagcctgacggaggagaagcagcggctggagcagcagctggcgggcattcccaagatgcagcggcgcctccaggagctctgccagatcctgggcgaggccgtggccccagcgcatgtgccggcacctagcccgcaaggccctggtggcctccagggtgcctccacctgacacaaccgtccccggcccctgccccgcccccaagctcggatcacatgaaggagacagcagcacccacccatgcacgcaccccgcccctgcatgcctggcccctcctcctagaaaacccttcccgccctcgggaaagtagatgtggagggtggcgccctgcgtaaccctcgccctgtccctcccactccctgggggcgctgttccacagtgactgggccctgtccagggcagtgagtcctctactttgctccgtggaggaagctggggtacaaggggcccagtgctggccacacagcagcgcagccgagccccaggagcccgtcaggccacagcccctggcactgcaggtggcctccctccagagactcgagtccccatgattccctcctcgtcagtctctcaaagaccccatggtccatcccctgagggtggtcagccaaggctcccgttccgtgggatgccataaaagccgcccagtgggacccacagtcacacagagcgcctcacctgcatcctctcccccacaagagccccaaagatcccacgggagaggggagagggacgcacagcactgcctgccaagcgagaatgcaggccccgccccctcggcccctcaccacctctttctacagcctaatttattggattccctattcgtagccatctccgtggccaatgtgactaccgtgccagcagcgggggcggcccagcctctgagtcccgtggggccccggctcccaccggtgccaaacccagcccctgcggccgtcaccccgccagcctacactgccagccgccaccggggcacacgggcctctgcttgccagccaggagtgcggacaccatgttcccagctcagtcccaccgccaccgtgtgcctttcccgggccctcagccctcgggccgggcaccacccccagtccccccagtaaaagcctccactggcaaatgcagtccttcc

SEQ ID NO: 457259 - DNA, 3420 bp, Homo sapiens
gcggacggacgcgcctggtgccccggggaggggcgccaccgggggaggaggaggaggagaaggtggagaggaagagacgccccctctgcccgagacctctcaaggccctgacctcaggggccagggcactgacaggacaggagagccaagttcctccacttgggctgcccgaagaggccgcgaccctggagggccctgagcccaccgcaccaggggccccagcaccaccccgggggcctaaagcgacagtctcaggggccatcgcaaggtttccagttgcctagacaacaggcccagggtcagagcaacaatccttccagccacctgcctcaactgctgccccaggcaccagccccagtccctacgcggcagccagcccaggtgacatgccggtgctctccaggccccggccctggcgggggaacacgctgaagcgcacggccgtgctcctggccctcgcggcctatggagcccacaaagtctaccccttggtgcgccagtgcctggccccggccaggggtcttcaggcgcccgccggggagcccacgcaggaggcctccggggtcgcggcggccaaagctggcatgaaccgggtattcctgcagcggctcctgtggctcctgcggctgctgttcccccgggtcctgtgccgggagacggggctgctggccctgcactcggccgccttggtgagccgcaccttcctgtcggtgtatgtggcccgcctggacggaaggctggcccgctgcatcgtccgcaaggacccgcgggcttttggctggcagctgctgcagtggctcctcatcgccctccctgctaccttcgtcaacagtgccatccgttacctggagggccaactggccctgtcgttccgcagccgtctggtggcccacgcctaccgcctctacttctcccagcagacctactaccgggtcagcaacatggacgggcggcttcgcaaccctgaccagtctctgacggaggacgtggtggcctttgcggcctctgtggcccacctctactccaacctgaccaagccactcctggacgtggctgtgacttcctacaccctgcttcgggcggcccgctcccgtggagccggcacagcctggccctcggccatcgccggcctcgtggtgttcctcacggccaacgtgctgcgggccttctcgcccaagttcggggagctggtggcagaggaggcgcggcggaagggggagctgcgctacatgcactcgcgtgtggtggccaactcggaggagatcgccttctatgggggccatgaggtggagctggccctgctacagcgctcctaccaggacctggcctcgcagatcaacctcatccttctggaacgcctgtggtatgttatgctggagcagttcctcatgaagtatgtgtggagcgcctcgggcctgctcatggtggctgtccccatcatcactgccactggctactcagagtcagatgcagaggccgtgaagaaggcagccttggaaaagaaggaggaggagctggtgagcgagcgcacagaagccttcactattgcccgcaacctcctgacagcggctgcagatgccattgagcggatcatgtcgtcgtacaaggaggtgacggagctggctggctacacagcccgggtgcacgagatgttccaggtatttgaagatgttcagcgctgtcacttcaagaggcccagggagctagaggacgctcaggcggggtctgggaccataggccggtctggtgtccgtgtggagggccccctgaagatccgaggccaggtggtggatgtggaacaggggatcatctgcgagaacatccccatcgtcacgccctcaggagaggtggtggtggccagcctcaacatcagggtggaggaaggcatgcatctgctcatcacaggccccaatggctgcggcaagagctccctgttccggatcctgggtgggctctggcccacgtacggtggtgtgctctacaagcccccaccccagcgcatgttctacatcccgcagaggccctacatgtctgtgggctccctgcgtgaccaggtgatctacccggactcagtggaggacatgcaaaggaagggctactcggagcaggacctggaagccatcctggacgtcgtgcacctgcaccacatcctgcagcgggagggaggttgggaggctatgtgtgactggaaggacgtcctgtcgggtggcgagaagcagagaatcggcatggcccgcatgttctaccacaggcccaagtacgccctcctggatgaatgcaccagcgccgtgagcatcgacgtggaaggcaagatcttccaggcggccaaggacgcgggcattgccctgctctccatcacccaccggccctccctgtggaaataccacacacacttgctacagttcgatggggagggcggctggaagttcgagaagctggactcagctgcccgcctgagcctgacggaggagaagcagcggctggagcagcagctggcgggcattcccaagatgcagcggcgcctccaggagctctgccagatcctgggcgaggccgtggccccagcgcatgtgccggcacctagcccgcaaggccctggtggcctccagggtgcctccacctgacacaaccgtccccggcccctgccccgcccccaagctcggatcacatgaaggagacagcagcacccacccatgcacgcaccccgcccctgcatgcctggcccctcctcctagaaaacccttcccgccctcgggaaagtagatgtggagggtggcgccctgcgtaaccctcgccctgtccctcccactccctgggggcgctgttccacagtgactgggccctgtccagggcagtgagtcctctactttgctccgtggaggaagctggggtacaaggggcccagtgctggccacacagcagcgcagccgagccccaggagcccgtcaggccacagcccctggcactgcaggtggcctccctccagagactcgagtccccatgattccctcctcgtcagtctctcaaagaccccatggtccatcccctgagggtggtcagccaaggctcccgttccgtgggatgccataaaagccgcccagtgggacccacagtcacacagagcgcctcacctgcatcctctcccccacaagagccccaaagatcccacgggagaggggagagggacgcacagcactgcctgccaagcgagaatgcaggccccgccccctcggcccctcaccacctctttctacagcctaatttattggattccctattcgtagccatctccgtggccaatgtgactaccgtgccagcagcgggggcggcccagcctctgagtcccgtggggccccggctcccaccggtgccaaacccatccccccagtaaaagcctccactggcaaatgcagtccttcc

SEQ ID NO: 457260 - DNA, 2261 bp, Homo sapiens
gactgttctccacagtggctgccccattttaccttcccgccagcagtgttggagggttccaccttttcatcgtggctagcactgatgcagaggccgtgaagaaggcagccttggaaaagaaggaggaggagctggtgagcgagcgcacagaagccttcactattgcccgcaacctcctgacagcggctgcagatgccattgagcggatcatgtcgtcgtacaaggaggtgacggagctggctggctacacagcccgggtgcacgagatgttccaggtatttgaagatgttcagcgctgtcacttcaagaggcccagggagctagaggacgctcaggcggggtctgggaccataggccggtctggtgtccgtgtggagggccccctgaagatccgaggccaggtggtggatgtggaacaggggatcatctgcgagaacatccccatcgtcacgccctcaggagaggtggtggtggccagcctcaacatcagggtggaggaaggcatgcatctgctcatcacaggccccaatggctgcggcaagagctccctgttccggatcctgggtgggctctggcccacgtacggtggtgtgctctacaagcccccaccccagcgcatgttctacatcccgcagaggccctacatgtctgtgggctccctgcgtgaccaggtgatctacccggactcagtggaggacatgcaaaggaagggctactcggagcaggacctggaagccatcctggacgtcgtgcacctgcaccacatcctgcagcgggagggaggttgggaggctatgtgtgactggaaggacgtcctgtcgggtggcgagaagcagagaatcggcatggcccgcatgttctaccacaggcccaagtacgccctcctggatgaatgcaccagcgccgtgagcatcgacgtggaaggcaagatcttccaggcggccaaggacgcgggcattgccctgctctccatcacccaccggccctccctgtggaaataccacacacacttgctacagttcgatggggagggcggctggaagttcgagaagctggactcagctgcccgcctgagcctgacggaggagaagcagcggctggagcagcagctggcgggcattcccaagatgcagcggcgcctccaggagctctgccagatcctgggcgaggccgtggccccagcgcatgtgccggcacctagcccgcaaggccctggtggcctccagggtgcctccacctgacacaaccgtccccggcccctgccccgcccccaagctcggatcacatgaaggagacagcagcacccacccatgcacgcaccccgcccctgcatgcctggcccctcctcctagaaaacccttcccgccctcgggaaagtagatgtggagggtggcgccctgcgtaaccctcgccctgtccctcccactccctgggggcgctgttccacagtgactgggccctgtccagggcagtgagtcctctactttgctccgtggaggaagctggggtacaaggggcccagtgctggccacacagcagcgcagccgagccccaggagcccgtcaggccacagcccctggcactgcaggtggcctccctccagagactcgagtccccatgattccctcctcgtcagtctctcaaagaccccatggtccatcccctgagggtggtcagccaaggctcccgttccgtgggatgccataaaagccgcccagtgggacccacagtcacacagagcgcctcacctgcatcctctcccccacaagagccccaaagatcccacgggagaggggagagggacgcacagcactgcctgccaagcgagaatgcaggccccgccccctcggcccctcaccacctctttctacagcctaatttattggattccctattcgtagccatctccgtggccaatgtgactaccgtgccagcagcgggggcggcccagcctctgagtcccgtggggccccggctcccaccggtgccaaacccagcccctgcggccgtcaccccgccagcctacactgccagccgccaccggggcacacgggcctctgcttgccagccaggagtgcggacaccatgttcccagctcagtgccaaagaggggtcaccagggggagctgtctgcggagccagcgcctgcccgagagagaccccaccgccaccgtgtgcctttcccgggccctcagccctcgggccgggcaccacccccagtccccccagtaaaagcctccactggcaaatgcagtccttcc

SEQ ID NO: 457261 - DNA, 1158 bp, Homo sapiens
ggctggggatttcgccggaaatcccggaagtgacagctttgggggtttgctgctggctctgactcccgtcctgcgatgggttgcgacgggggaacaatccccaagaggcatgaactggtgaaggggccgaagaaggttgagaagaaggaggatgtggacgtgctgaagacaaggatggaggagagaaggctgagagcgaagctgggaaaagaaaacaaagaaacccaaggcagcagagtctgtttcaaaaccagatgtcagtgaagaagccccagggccatcaaaagttaagacagggaagcctgaagaagccagccttgattctagagagaagaaaaccaacttggctcccaaaagcacagcaatgaatgagagctcttctggaaaagctgggaagcctccgtgtggagccacaaagaggtccatcgctgacagtgaagaatcggaggcctacaagtccctctttaccactcacagctccgccaagcgctccaaggaggagtctgcccactgggtcacccacacgtcctactgcttctgaagcccgcactgccaccgctcctgccccagaaggttgtttagtttccacgtaggcaggtcgctttgtgcctctgagtgcgctgctgtgtgttctctctatagttctgtgtcataaagctgtcctggccagccttcaagctggtgtggccactcttgatgtgaggcgtgtcggttccaggggggacatgggaggggctgcacagtggcccgaggtcatgcttgcttccacctgcaggtgcatttggtcctttccatggccaggaagccctgtgggctgcactttttatgcttgcagtaacaagagactccagagtcctcaccggtgcagagttggcacatattaattaactaaaattctaatgatcttgctaccagcaataaatcaagtaggccaagtgaaactgggctttaaaaaggatggatttcaaatacactgtgcccactagaagcttcgaagggcctcgtccctctgctacagccctgggaggagccaggatccttgttggtctagctaaatactgttaggggagtgtgccccatctcatcatttcgaagatagcagagtcatagttgggcacccagtgattgggttcaaaaataaagctggtctgcctcttc

SEQ ID NO: 457262 - DNA, 1614 bp, Homo sapiens
ggctggggatttcgccggaaatcccggaagtgacagctttgggggtttgctgctggctctgactcccgtcctgcgatgggttgcgacgggggaacaatccccaagaggcatgaactggtgaaggggccgaagaaggttgagaaggtcgacaaagatgctgaattagtggcccaatggaactattgtactctaagtcaggaaatattaagacgaccaatagttgcctgtgaacttggcagactttataacaaagatgccgtcattgaatttctcttggacaaatctgcagaaaaggctcttgggaaggcagcatctcacattaaaagcattaagaatgtgacagagctgaagctttctgataatcctgcctgggaaggggataaaggaaacactaaaggtgacaagcacgatgacctccagcgggcgcgtttcatctgccccgttgtgggcctggagatgaacggccgacacaggttctgcttccttcggtgctgcggctgtgtgttttctgagcgagccttgaaagagataaaagcggaagtttgccacacgtgtggggctgccttccaggaggatgatgtcatcgtgctcaatggcaccaaggaggatgtggacgtgctgaagacaaggatggaggagagaaggctgagagcgaagctgggaaaagaaaacaaagaaacccaaggcagcagagtctgtttcaaaaccagatgtcagtgaagaagccccagggccatcaaaagttaagacagggaagcctgaagaagccagccttgattctagagagaagaaaaccaacttggctcccaaaagcacagcaatgaatgagagctcttctggaaaagctgggaagcctccgtgtggagccacaaagaggtccatcgctgacagtgaagaatcggaggcctacaagtccctctttaccactcacagctccgccaagcgctccaaggaggagtctgcccactgggtcacccacacgtcctactgcttctgaagcccgcactgccaccgctcctgccccagaaggttgtttagtttccacgtaggcaggtcgctttgtgcctctgagtgcgctgctgtgtgttctctctatagttctgtgtcataaagctgtcctggccagccttcaagctggtgtggccactcttgatgtgaggcgtgtcggttccaggggggacatgggaggggctgcacagtggcccgaggtcatgcttgcttccacctgcaggtgcatttggtcctttccatggccaggaagccctgtgggctgcactttttatgcttgcagtaacaagagactccagagtcctcaccggtgcagagttggcacatattaattaactaaaattctaatgatcttgctaccagcaataaatcaagtaggccaagtgaaactgggctttaaaaaggatggatttcaaatacactgtgcccactagaagcttcgaagggcctcgtccctctgctacagccctgggaggagccaggatccttgttggtctagctaaatactgttaggggagtgtgccccatctcatcatttcgaagatagcagagtcatagttgggcacccagtgattgggttcaaaaataaagctggtctgcctcttc

SEQ ID NO: 457263 - DNA, 478 bp, Homo sapiens
  misc_feature (30)..(30): n is a, c, g, or t
aaaacagaacatgagtcaaggtacgaggcngggtgttggctctgactcccgtcctgcgatgggttgcgacgggggaacaatccccaagaggcatgaactggtgaaggggccgaagaaggttgagaaggcaattattggtgggctcctggatggggcctggtcaccagaaacaccaagccaagattagaagcctggaactttcagccccacctcacccccatccttcagggaggagaagaggaattggacatggagttaataatccatcatgcctacgtggtggggtctccataaagatccctgaagttgagggtctggagattttctgggttgccgacaacatccacatgccaggagagttaccccaactccatgaggacagccctgcacttgggacccttccagattacttctttatctggctatttatttgtatcctttaaaatgtatttgtaataaatcagcaatggtaactaaa

SEQ ID NO: 457264 - DNA, 484 bp, Homo sapiens
tttgcttcagtccaggaggtggaggttgcagtgagtgaagattgcgccactacactccagcctgggcaacagagtgagaccccgtctcaaaaacaaacaaacaacaaaccaaaaacccaacttcctatgtcattatctttgatttaaaaaacaaaaatcattacagtgcggtattactgaatatgcttttatatgtagaattgtgaaccatgtgtctttcagagttgaaaattaattgaattttttgttttttattaggtcgacaaagatgctgaattagtggcccaatggaactattgtactctaagtcaggaaatattaagacgaccaatagttgcctgtgaacttggcaggtatggtttttacacttaatcaagatgagtttgttaagtgattttgaggagaattttgatgtgtaaatgcagttttccattcatcaagcgtggattatcccaagcaaatttgtgaggcataggctgtcgtt

SEQ ID NO: 457265 - DNA, 752 bp, Homo sapiens
  misc_feature (30)..(30): n is a, c, g, or t
  misc_feature (495)..(495): n is a, c, g, or t
  misc_feature (534)..(534): n is a, c, g, or t
aaaacagaacatgagtcaaggtacgaggcngggtgttggctctgactcccgtcctgcgatgggttgcgacgggggaacaatccccaagaggcatgaactggtgaaggggccgaagaaggttgagaaggcaattattggtgggctcctggatggggcctggtcaccagaaacaccaagccaagattagaagcctggaactttcagccccacctcacccccatccttcagggaggagaagaggaattggacatggagttaataatccatcatgcctacgtggtggggtctccataaagatccctgaagttgagggtctggagattttctgggttgccgacaacatccacatgccaggagagttaccccaactccatgaggacagccctgcacttgggacccttccagattacttctttatctggctatttatttgtatcctttaaaatgtatttgtaataaatcagcaatggtaactaaaaaaaaaaaaaaaaaaanaaaaagcccggggggcttcttattttcggggttccgggnaacatgggcttgttccaacctgtgcatgtgggccatgctgtgttcctgccccagcttttgttggtcacatgcggggaaatcagcgcggcaccccctaacagtcgaacggagtaatttcagattagccggtatacctgtgatatttggtccacaacggttgggctggcaattttggtacttcatcgcattcctctaaccccgaaaggcctgcccgagcc

SEQ ID NO: 457266 - DNA, 352 bp, Homo sapiens
aataaattaataaaataaattcagcaggattgtttttgtcttctttttttcttttctcttcctattttcttccaaatgtgctgtcctgttaaattattcagatttggcatttgaagaatgggaaagagtggtgcagtctacacagtgaaggaaaaaacaagaacgggaaggagtgggacatggaatatgatgtatgtgaaaatgtcattcgagggccagggagggtcttatgtctggattttcatactggggataaagtttgatgtatcccttagtgaataagccccaaaacacttatttctgttaaattgaacattttataaagaattatgtagtctttgttctgaacttt

SEQ ID NO: 457267 - DNA, 2111 bp, Homo sapiens
  misc_feature (1631)..(1631): n is a, c, g, or t
  misc_feature (1642)..(1642): n is a, c, g, or t
ggctggggatttcgccggaaatcccggaagtgacagctttgggggtttgctgctggctctgactcccgtcctgcgatgggttgcgacgggggaacaatccccaagaggcatgaactggtgaaggggccgaagaaggttgagaaggtcgacaaagatgctgaattagtggcccaatggaactattgtactctaagtcaggaaatattaagacgaccaatagttgcctgtgaacttggcagactttataacaaagatgccgtcattgaatttctcttggacaaatctgcagaaaaggctcttgggaaggcagcatctcacattaaaagcattaagaatgtgacagagctgaagctttctgataatcctgcctgggaaggggataaaggaaacactaaaggtgacaagcacgatgacctccagcgggcgcgtttcatctgccccgttgtgggcctggagatgaacggccgacacaggttctgcttccttcggtgctgcggctgtgtgttttctgagcgagccttgaaagagataaaagcggaagtttgccacacgtgtggggctgccttccaggaggatgatgtcatcgtgctcaatggcaccaaggaggatgtggacgtgctgaagacaaggatggaggagagaaggctgagagcgaagctgggaaaagaaaacaaagaaacccaaggcagcagagtctgtttcaaaaccagatgtcagtgaagaagccccagggccatcaaaagttaagacagggaagcctgaagaagccagccttgattctagagagaagaaaaccaacttggctcccaaaagcacagcaatgaatgagagctcttctggaaaagctgggaagcctccgtgtggagccacaaagaggtccatcgctgacagtgaagaatcggaggcctacaagtccctctttaccactcacagctccgccaagcgctccaaggaggagtctgcccactgggtcacccacacgtcctactgcttctgaagcccgcactgccaccgctcctgccccagaaggttgtttagtttccacgtaggcaggtcgctttgtgcctctgagtgcgctgctgtgtgttctctctatagttctgtgtcataaagctgtcctggccagccttcaagctggtgtggccactcttgatgtgaggcgtgtcggttccaggggggacatgggaggggctgcacagtggcccgaggtcatgcttgcttccacctgcaggtgcatttggtcctttccatggccaggaagccctgtgggctgcactttttatgcttgcagtaacaagagactccagagtcctcaccggtgcagagttggcacatattaattaactaaaattctaatgatcttgctaccagcaataaatcaagtaggccaagtgaaactgggctttaaaaaggatggatttcaaatacactgtgcccactagaagcttcgaagggcctcgtccctctgctacagccctgggaggagccaggatccttgttggtctagctaaatactgttaggggagtgtgccccatctcatcatttcgaagatagcagagtcatagttgggcacccagtgattgggttcaaaaataaagctggtctgcctcttcaaaaaaaaaaaaaaaanaaaaaaaaaanaaaaaaaaaaaaaaaaaaaaaaaaaaaaaacaaaagaacaaacagaaaaagaaaagaaagaagaaagataaacgaaggagaggccaccagcaacagaacggcacccagagcaatcggaatacacgagccaaccctatcatgaccagggcgatcagacgagacatacattgatactagcaagcgcgggaacgctagagcacacactgacgctgactgaatgtgttgctcgacaaacaggtaaaagaaactaagccaacaacaatcaacccataaagagaaacaacagataaacttactaacatcaaaatggcttgaaagtaaaaataaaatatagctgatactccattagaacatacaaaacaaaaactaaactccattaccaactcctccgcgcatcaatactaatacacaaataagcagcaaagcacaacattaatataccagaaaaaaacatacacctatcgtccac

SEQ ID NO: 457268 - DNA, 1533 bp, Homo sapiens
ggctggggatttcgccggaaatcccggaagtgacagctttgggggtttgctgctggctctgactcccgtcctgcgatgggttgcgacgggggaacaatccccaagaggcatgaactggtgaaggggccgaagaaggttgagaaggtcgacaaagatgctgaattagtggcccaatggaactattgtactctaagtcaggaaatattaagacgaccaatagttgcctgtgaacttggcagactttataacaaagatgccgtcattgaatttctcttggacaaatctgcagaaaaggctcttgggaaggcagcatctcacattaaaagcattaagaatgtgacagagctgaagctttctgataatcctgcctgggaaggggataaaggaaacactaaaggtgacaagcacgatgacctccagcgggcgcgtttcatctgccccgttgtgggcctggagatgaacggccgacacaggttctgcttccttcggtgctgcggctgtgtgttttctgagcgagccttgaaagagataaaagcggaagtttgccacacgtgtggggctgccttccaggaggatgatgtcatcgtgctcaatggcaccaaggaggatgtggacgtgctgaagacaaggatggaggagagaaggctgagagcgaagctgggaaaagaaaacaaagaaacccaaggcagcagagtctgtttcaaaaccagatgtcagtgaagaagccccagggccatcaaaagttaagacagggaagcctgaagaagccagccttgattctagagagaagaaaaccaacttggctcccaaaagcacagcaatgaatgagagctcttctggaaaagctgggaagcctccgtgtggagccacaaagaggtccatcgctgacagtgaagaatcggaggcctacaagtccctctttaccactcacagctccgccaagcgctccaaggaggagtctgcccactgggtcacccacacgtcctactgcttctgaagcccgcactgccaccgctcctgccccagaaggttgtttagtttccacgtaggcaggtcgctttgtgcctctgagtgcgctgctgtgtgttctctctatagttctgtgtcataaagctgtcctggccagccttcaagctggtgtggccactcttgatgtgaggcgtgtcggttccaggggggacatgggaggggctgcacagtggcccgaggtcatgcttgcttccacctgcaggtgcatttggtcctttccatggccaggaagccctgtgggctgcactttttatgcttgcagtaacaagagactccagagtcctcaccggtgcagagttggcacatattaattaactaaaattctaatgatcttgctaccagcaataaatcaagtaggccaagtgaaactgggctttaaaaagccttgttggtctagctaaatactgttaggggagtgtgccccatctcatcatttcgaagatagcagagtcatagttgggcacccagtgattgggttcaaaaataaagctggtctgcctcttc

SEQ ID NO: 457269 - DNA, 1560 bp, Homo sapiens
ggctggggatttcgccggaaatcccggaagtgacagctttgggggtttgctgctggctctgactcccgtcctgcgatgggttgcgacgggggaacaatccccaagaggcatgaactggtgaaggggccgaagaaggttgagaaggtcgacaaagatgctgaattagtggcccaatggaactattgtactctaagtcaggaaatattaagacgaccaatagttgcctgtgaacttggcagactttataacaaagatgccgtcattgaatttctcttggacaaatctgcagaaaaggctcttgggaaggcagcatctcacattaaaagcattaagaatgtgacagagctgaagctttctgataatcctgcctgggaaggggataaaggaaacactaaaggtgacaagcacgatgacctccagcgggcgcgtttcatctgccccgttgtgggcctggagatgaacggccgacacaggttctgcttccttcggtgctgcggctgtgtgttttctgagcgagccttgaaagagataaaagcggaagtttgccacacgtgtggggctgccttccaggaggatgatgtcatcgtgctcaatggcaccaaggaggatgtggacgtgctgaagacaaggatggaggagagaaggctgagagcgaagctgggaaaagaaaacaaagaaacccaaggcagcagagtctgtttcaaaaccagatgtcagtgaagaagccccagggccatcaaaagttaagacagggaagcctgaagaagccagccttgattctagagagaagaaaaccaacttggctcccaaaagcacagcaatgaatgagagctcttctggaaaagctgggaagcctccgtgtggagccacaaagaggtccatcgctgacagtgaagaatcggaggcctacaagtccctctttaccactcacagctccgccaagcgctccaaggaggagtctgcccactgggtcacccacacgtcctactgcttctgaagcccgcactgccaccgctcctgccccagaaggttgtttagtttccacgtaggcaggtcgctttgtgcctctgagtgcgctgctgtgtgttctctctatagttctgtgtcataaagctgtcctggccagccttcaagctggtgtggccactcttgatgtgaggcgtgtcggttccaggggggacatgggaggggctgcacagtggcccgaggtcatgcttgcttccacctatgcttgcagtaacaagagactccagagtcctcaccggtgcagagttggcacatattaattaactaaaattctaatgatcttgctaccagcaataaatcaagtaggccaagtgaaactgggctttaaaaaggatggatttcaaatacactgtgcccactagaagcttcgaagggcctcgtccctctgctacagccctgggaggagccaggatccttgttggtctagctaaatactgttaggggagtgtgccccatctcatcatttcgaagatagcagagtcatagttgggcacccagtgattgggttcaaaaataaagctggtctgcctcttc

SEQ ID NO: 457270 - DNA, 1687 bp, Homo sapiens
  misc_feature (30)..(30): n is a, c, g, or t
aaaacagaacatgagtcaaggtacgaggcngggtgttggctctgactcccgtcctgcgatgggttgcgacgggggaacaatccccaagaggcatgaactggtgaaggggccgaagaaggttgagaagatttggcatttgaagaatgggaaagagtggtgcagtctacacagtgaaggaaaaaacaagaacgggaaggagtgggacatggaatatgatgtcgacaaagatgctgaattagtggcccaatggaactattgtactctaagtcaggaaatattaagacgaccaatagttgcctgtgaacttggcagactttataacaaagatgccgtcattgaatttctcttggacaaatctgcagaaaaggctcttgggaaggcagcatctcacattaaaagcattaagaatgtgacagagctgaagctttctgataatcctgcctgggaaggggataaaggaaacactaaaggtgacaagcacgatgacctccagcgggcgcgtttcatctgccccgttgtgggcctggagatgaacggccgacacaggttctgcttccttcggtgctgcggctgtgtgttttctgagcgagccttgaaagagataaaagcggaagtttgccacacgtgtggggctgccttccaggaggatgatgtcatcgtgctcaatggcaccaaggaggatgtggacgtgctgaagacaaggatggaggagagaaggctgagagcgaagctgggaaaagaaaacaaagaaacccaaggcagcagagtctgtttcaaaaccagatgtcagtgaagaagccccagggccatcaaaagttaagacagggaagcctgaagaagccagccttgattctagagagaagaaaaccaacttggctcccaaaagcacagcaatgaatgagagctcttctggaaaagctgggaagcctccgtgtggagccacaaagaggtccatcgctgacagtgaagaatcggaggcctacaagtccctctttaccactcacagctccgccaagcgctccaaggaggagtctgcccactgggtcacccacacgtcctactgcttctgaagcccgcactgccaccgctcctgccccagaaggttgtttagtttccacgtaggcaggtcgctttgtgcctctgagtgcgctgctgtgtgttctctctatagttctgtgtcataaagctgtcctggccagccttcaagctggtgtggccactcttgatgtgaggcgtgtcggttccaggggggacatgggaggggctgcacagtggcccgaggtcatgcttgcttccacctgcaggtgcatttggtcctttccatggccaggaagccctgtgggctgcactttttatgcttgcagtaacaagagactccagagtcctcaccggtgcagagttggcacatattaattaactaaaattctaatgatcttgctaccagcaataaatcaagtaggccaagtgaaactgggctttaaaaaggatggatttcaaatacactgtgcccactagaagcttcgaagggcctcgtccctctgctacagccctgggaggagccaggatccttgttggtctagctaaatactgttaggggagtgtgccccatctcatcatttcgaagatagcagagtcatagttgggcacccagtgattgggttcaaaaataaagctggtctgcctcttc

SEQ ID NO: 457271 - DNA, 2094 bp, Homo sapiens
  misc_feature (30)..(30): n is a, c, g, or t
aaaacagaacatgagtcaaggtacgaggcngggtgttggctctgactcccgtcctgcgatgggttgcgacgggggaacaatccccaagaggcatgaactggtgaaggggccgaagaaggttgagaaggcaattattggtgggctcctggatggggcctggtcaccagaaacaccaagccaagattagaagcctggaactttcagccccacctcacccccatccttcagggaggagaagaggaattggacatggagttaataatccatcatgcctacgtggtggggtctccataaagatccctgaagttgagggtctggagattttctgggttgccgacaacatccacatgccaggagagttaccccaactccatgaggacagccctgcacttgggacccttccagattacttctttatctggctatttatttgtatcctttaaaatgtatttgtaataaatcagcaatggtaactaaatacagatatgtaaaaacttaaaagaagaaagaccctaggaaagaagagagaccctgatttggcatttgaagaatgggaaagagtggtgcagtctacacagtgaaggaaaaaacaagaacgggaaggagtgggacatggaatatgatgtcgacaaagatgctgaattagtggcccaatggaactattgtactctaagtcaggaaatattaagacgaccaatagttgcctgtgaacttggcagactttataacaaagatgccgtcattgaatttctcttggacaaatctgcagaaaaggctcttgggaaggcagcatctcacattaaaagcattaagaatgtgacagagctgaagctttctgataatcctgcctgggaaggggataaaggaaacactaaaggtgacaagcacgatgacctccagcgggcgcgtttcatctgccccgttgtgggcctggagatgaacggccgacacaggttctgcttccttcggtgctgcggctgtgtgttttctgagcgagccttgaaagagataaaagcggaagtttgccacacgtgtggggctgccttccaggaggatgatgtcatcgtgctcaatggcaccaaggaggatgtggacgtgctgaagacaaggatggaggagagaaggctgagagcgaagctgggaaaagaaaacaaagaaacccaaggcagcagagtctgtttcaaaaccagatgtcagtgaagaagccccagggccatcaaaagttaagacagggaagcctgaagaagccagccttgattctagagagaagaaaaccaacttggctcccaaaagcacagcaatgaatgagagctcttctggaaaagctgggaagcctccgtgtggagccacaaagaggtccatcgctgacagtgaagaatcggaggcctacaagtccctctttaccactcacagctccgccaagcgctccaaggaggagtctgcccactgggtcacccacacgtcctactgcttctgaagcccgcactgccaccgctcctgccccagaaggttgtttagtttccacgtaggcaggtcgctttgtgcctctgagtgcgctgctgtgtgttctctctatagttctgtgtcataaagctgtcctggccagccttcaagctggtgtggccactcttgatgtgaggcgtgtcggttccaggggggacatgggaggggctgcacagtggcccgaggtcatgcttgcttccacctgcaggtgcatttggtcctttccatggccaggaagccctgtgggctgcactttttatgcttgcagtaacaagagactccagagtcctcaccggtgcagagttggcacatattaattaactaaaattctaatgatcttgctaccagcaataaatcaagtaggccaagtgaaactgggctttaaaaaggatggatttcaaatacactgtgcccactagaagcttcgaagggcctcgtccctctgctacagccctgggaggagccaggatccttgttggtctagctaaatactgttaggggagtgtgccccatctcatcatttcgaagatagcagagtcatagttgggcacccagtgattgggttcaaaaataaagctggtctgcctcttc

SEQ ID NO: 457272 - DNA, 1743 bp, Homo sapiens
  misc_feature (30)..(30): n is a, c, g, or t
aaaacagaacatgagtcaaggtacgaggcngggtgttggctctgactcccgtcctgcgatgggttgcgacgggggaacaatccccaagaggcatgaactggtgaaggggccgaagaaggttgagaagtacagatatgtaaaaacttaaaagaagaaagaccctaggaaagaagagagaccctgatttggcatttgaagaatgggaaagagtggtgcagtctacacagtgaaggaaaaaacaagaacgggaaggagtgggacatggaatatgatgtcgacaaagatgctgaattagtggcccaatggaactattgtactctaagtcaggaaatattaagacgaccaatagttgcctgtgaacttggcagactttataacaaagatgccgtcattgaatttctcttggacaaatctgcagaaaaggctcttgggaaggcagcatctcacattaaaagcattaagaatgtgacagagctgaagctttctgataatcctgcctgggaaggggataaaggaaacactaaaggtgacaagcacgatgacctccagcgggcgcgtttcatctgccccgttgtgggcctggagatgaacggccgacacaggttctgcttccttcggtgctgcggctgtgtgttttctgagcgagccttgaaagagataaaagcggaagtttgccacacgtgtggggctgccttccaggaggatgatgtcatcgtgctcaatggcaccaaggaggatgtggacgtgctgaagacaaggatggaggagagaaggctgagagcgaagctgggaaaagaaaacaaagaaacccaaggcagcagagtctgtttcaaaaccagatgtcagtgaagaagccccagggccatcaaaagttaagacagggaagcctgaagaagccagccttgattctagagagaagaaaaccaacttggctcccaaaagcacagcaatgaatgagagctcttctggaaaagctgggaagcctccgtgtggagccacaaagaggtccatcgctgacagtgaagaatcggaggcctacaagtccctctttaccactcacagctccgccaagcgctccaaggaggagtctgcccactgggtcacccacacgtcctactgcttctgaagcccgcactgccaccgctcctgccccagaaggttgtttagtttccacgtaggcaggtcgctttgtgcctctgagtgcgctgctgtgtgttctctctatagttctgtgtcataaagctgtcctggccagccttcaagctggtgtggccactcttgatgtgaggcgtgtcggttccaggggggacatgggaggggctgcacagtggcccgaggtcatgcttgcttccacctgcaggtgcatttggtcctttccatggccaggaagccctgtgggctgcactttttatgcttgcagtaacaagagactccagagtcctcaccggtgcagagttggcacatattaattaactaaaattctaatgatcttgctaccagcaataaatcaagtaggccaagtgaaactgggctttaaaaaggatggatttcaaatacactgtgcccactagaagcttcgaagggcctcgtccctctgctacagccctgggaggagccaggatccttgttggtctagctaaatactgttaggggagtgtgccccatctcatcatttcgaagatagcagagtcatagttgggcacccagtgattgggttcaaaaataaagctggtctgcctcttc

SEQ ID NO: 457273 - DNA, 1260 bp, Homo sapiens
tctagaggagcgtatttttttatggtgagaaggaagacacgcatttacatgcacgatgacctccagcgggcgcgtttcatctgccccgttgtgggcctggagatgaacggccgacacaggttctgcttccttcggtgctgcggctgtgtgttttctgagcgagccttgaaagagataaaagcggaagtttgccacacgtgtggggctgccttccaggaggatgatgtcatcgtgctcaatggcaccaaggaggatgtggacgtgctgaagacaaggatggaggagagaaggctgagagcgaagctgggaaaagaaaacaaagaaacccaaggcagcagagtctgtttcaaaaccagatgtcagtgaagaagccccagggccatcaaaagttaagacagggaagcctgaagaagccagccttgattctagagagaagaaaaccaacttggctcccaaaagcacagcaatgaatgagagctcttctggaaaagctgggaagcctccgtgtggagccacaaagaggtccatcgctgacagtgaagaatcggaggcctacaagtccctctttaccactcacagctccgccaagcgctccaaggaggagtctgcccactgggtcacccacacgtcctactgcttctgaagcccgcactgccaccgctcctgccccagaaggttgtttagtttccacgtaggcaggtcgctttgtgcctctgagtgcgctgctgtgtgttctctctatagttctgtgtcataaagctgtcctggccagccttcaagctggtgtggccactcttgatgtgaggcgtgtcggttccaggggggacatgggaggggctgcacagtggcccgaggtcatgcttgcttccacctgcaggtgcatttggtcctttccatggccaggaagccctgtgggctgcactttttatgcttgcagtaacaagagactccagagtcctcaccggtgcagagttggcacatattaattaactaaaattctaatgatcttgctaccagcaataaatcaagtaggccaagtgaaactgggctttaaaaaggatggatttcaaatacactgtgcccactagaagcttcgaagggcctcgtccctctgctacagccctgggaggagccaggatccttgttggtctagctaaatactgttaggggagtgtgccccatctcatcatttcgaagatagcagagtcatagttgggcacccagtgattgggttcaaaaataaagctggtctgcctcttc

SEQ ID NO: 457274 - DNA, 1284 bp, Homo sapiens
ggctggggatttcgccggaaatcccggaagtgacagctttgggggtttgctgctggctctgactcccgtcctgcgatgggttgcgacgggggaacaatccccaagaggcatgaactggtgaaggggccgaagaaggttgagaaggtcgacaaagatgctgaattagtggcccaatggaactattgtactctaagtcaggaaatattaagacgaccaatagttgcctgtgaacttggcagactttataacaaagatgccgtcattgaatttaaggaggatgtggacgtgctgaagacaaggatggaggagagaaggctgagagcgaagctgggaaaagaaaacaaagaaacccaaggcagcagagtctgtttcaaaaccagatgtcagtgaagaagccccagggccatcaaaagttaagacagggaagcctgaagaagccagccttgattctagagagaagaaaaccaacttggctcccaaaagcacagcaatgaatgagagctcttctggaaaagctgggaagcctccgtgtggagccacaaagaggtccatcgctgacagtgaagaatcggaggcctacaagtccctctttaccactcacagctccgccaagcgctccaaggaggagtctgcccactgggtcacccacacgtcctactgcttctgaagcccgcactgccaccgctcctgccccagaaggttgtttagtttccacgtaggcaggtcgctttgtgcctctgagtgcgctgctgtgtgttctctctatagttctgtgtcataaagctgtcctggccagccttcaagctggtgtggccactcttgatgtgaggcgtgtcggttccaggggggacatgggaggggctgcacagtggcccgaggtcatgcttgcttccacctgcaggtgcatttggtcctttccatggccaggaagccctgtgggctgcactttttatgcttgcagtaacaagagactccagagtcctcaccggtgcagagttggcacatattaattaactaaaattctaatgatcttgctaccagcaataaatcaagtaggccaagtgaaactgggctttaaaaaggatggatttcaaatacactgtgcccactagaagcttcgaagggcctcgtccctctgctacagccctgggaggagccaggatccttgttggtctagctaaatactgttaggggagtgtgccccatctcatcatttcgaagatagcagagtcatagttgggcacccagtgattgggttcaaaaataaagctggtctgcctcttc

SEQ ID NO: 457275 - DNA, 1151 bp, Homo sapiens
cagaagtgcatgactggtgtcacatgcagagggtgaaggctttaggagttacggaacatcaaaagccttcttcagagtgactgtctgtctcatgtgactagcatcggtcagtcagacagggcacccgggacaatgggcagccacactgacgctgaagtggagtgaatctgagcacagcctccaacattctctatctttttgtagaaaacaaagaaacccaaggcagcagagtctgtttcaaaaccagatgtcagtgaagaagccccagggccatcaaaagttaagacagggaagcctgaagaagccagccttgattctagagagaagaaaaccaacttggctcccaaaagcacagcaatgaatgagagctcttctggaaaagctgggaagcctccgtgtggagccacaaagaggtccatcgctgacagtgaagaatcggaggcctacaagtccctctttaccactcacagctccgccaagcgctccaaggaggagtctgcccactgggtcacccacacgtcctactgcttctgaagcccgcactgccaccgctcctgccccagaaggttgtttagtttccacgtaggcaggtcgctttgtgcctctgagtgcgctgctgtgtgttctctctatagttctgtgtcataaagctgtcctggccagccttcaagctggtgtggccactcttgatgtgaggcgtgtcggttccaggggggacatgggaggggctgcacagtggcccgaggtcatgcttgcttccacctgcaggtgcatttggtcctttccatggccaggaagccctgtgggctgcactttttatgcttgcagtaacaagagactccagagtcctcaccggtgcagagttggcacatattaattaactaaaattctaatgatcttgctaccagcaataaatcaagtaggccaagtgaaactgggctttaaaaaggatggatttcaaatacactgtgcccactagaagcttcgaagggcctcgtccctctgctacagccctgggaggagccaggatccttgttggtctagctaaatactgttaggggagtgtgccccatctcatcatttcgaagatagcagagtcatagttgggcacccagtgattgggttcaaaaataaagctggtctgcctcttc

SEQ ID NO: 457276 - DNA, 1568 bp, Homo sapiens
ggctggggatttcgccggaaatcccggaagtgacagctttgggggtttgctgctggctctgactcccgtcctgcgatgggttgcgacgggggaacaatccccaagaggcatgaactggtgaaggggccgaagaaggttgagaaggtcgacaaagatgctgaattagtggcccaatggaactattgtactctaagtcaggaaatattaagacgaccaatagttgcctgtgaacttggcagactttataacaaagatgccgtcattgaatttctcttggacaaatctgcagaaaaggctcttgggaaggcagcatctcacattaaaagcattaaggctgtgtgttttctgagcgagccttgaaagagataaaagcggaagtttgccacacgtgtggggctgccttccaggaggatgatgtcatcgtgctcaatggcaccaaggaggatgtggacgtgctgaagacaaggatggaggagagaaggctgagagcgaagctgggaaaagaaaacaaagaaacccaaggcagcagagtctgtttcaaaaccagatgtcagtgaagggtaagatccttcaagagatccttattttagcaaaatgcgactctagggcagtctgctaatatgttcatgctttgttttgcattgtttttgctttgcctactttgtttcttttacagaagccccagggccatcaaaagttaagacagggaagcctgaagaagccagccttgattctagagagaagaaaaccaacttggctcccaaaagcacagcaatgaatgagagctcttctggaaaagctgggaagcctccgtgtggagccacaaagaggtccatcgctgacagtgaagaatcggaggcctacaagtccctctttaccactcacagctccgccaagcgctccaaggaggagtctgcccactgggtcacccacacgtcctactgcttctgaagcccgcactgccaccgctcctgccccagaaggttgtttagtttccacgtaggcaggtcgctttgtgcctctgagtgcgctgctgtgtgttctctctatagttctgtgtcataaagctgtcctggccagccttcaagctggtgtggccactcttgatgtgaggcgtgtcggttccaggggggacatgggaggggctgcacagtggcccgaggtcatgcttgcttccacctgcaggtgcatttggtcctttccatggccaggaagccctgtgggctgcactttttatgcttgcagtaacaagagactccagagtcctcaccggtgcagagttggcacatattaattaactaaaattctaatgatcttgctaccagcaataaatcaagtaggccaagtgaaactgggctttaaaaaggatggatttcaaatacactgtgcccactagaagcttcgaagggcctcgtccctctgctacagccctgggaggagccaggatccttgttggtctagctaaatactgttaggggagtgtgccccatctcatcatttcgaagatagcagagtcatagttgggcacccagtgattgggttcaaaaataaagctggtctgcctcttc

SEQ ID NO: 457277 - DNA, 1419 bp, Homo sapiens
  misc_feature (950)..(950): n is a, c, g, or t
ggctggggatttcgccggaaatcccggaagtgacagctttgggggtttgctgctggctctgactcccgtcctgcgatgggttgcgacgggggaacaatccccaagaggcatgaactggtgaaggggccgaagaaggttgagaaggtcgacaaagatgctgaattagtggcccaatggaactattgtactctaagtcaggaaatattaagacgaccaatagttgcctgtgaacttggcagactttataacaaagatgccgtcattgaatttctcttggacaaatctgcagaaaaggctcttgggaaggcagcatctcacattaaaagcattaagaatgtgacagagctgaagctttctgataatcctgcctgggaaggggataaaggaaacactaaaggtgacaagcacgatgacctccagcgggcgcgtttcatctgccccgttgtgggcctggagatgaacggccgacacaggttctgcttccttcggtgctgcggctgtgtgttttctgagcgagccttgaaagagataaaagcggaagtttgccacacgtgtggggctgccttccaggaggatgatgtcatcgtgctcaatggcaccaaggaggatgtggacgtgctgaagacaaggatggaggagagaaggctgagagcgaagctgggaaaagaaaacaaagaaacccaaggcagcagagtctgtttcaaaaccagatgtcagtgaagtgaaactgggctttaaaaaggatggatttcaaatacactgtgcccactagaagcttcgaagggcctcgtccctctgctacagccctgggaggagccaggatccttgttggtctagctaaatactgttaggggagtgtgccccatctcatcatttcgaagatagcagagtcatagttgggcacccagtgattgggttcaaaaataaagctggtctgcctcttcaaaaanaaaaaaaaaaaaaaaaaaaaaaaaaaaaaacaaaagaacaaacagaaaaagaaaagaaagaagaaagataaacgaaggagaggccaccagcaacagaacggcacccagagcaatcggaatacacgagccaaccctatcatgaccagggcgatcagacgagacatacattgatactagcaagcgcgggaacgctagagcacacactgacgctgactgaatgtgttgctcgacaaacaggtaaaagaaactaagccaacaacaatcaacccataaagagaaacaacagataaacttactaacatcaaaatggcttgaaagtaaaaataaaatatagctgatactccattagaacatacaaaacaaaaactaaactccattaccaactcctccgcgcatcaatactaatacacaaataagcagcaaagcacaacattaatataccagaaaaaaacatacacctatcgtccac

SEQ ID NO: 457278 - DNA, 719 bp, Homo sapiens
ggctggggatttcgccggaaatcccggaagtgacagctttgggggtttgctgctggctctgactcccgtcctgcgatgggttgcgacgggggaacaatccccaagaggcatgaactggtgaaggggccgaagaaggttgagaaggtcgacaaagatgctgaattagtggcccaatggaactattgtactctaagtcaggaaatattaagacgaccaatagttgcctgtgaacttggcagactttataacaaagatgccgtcattgaatttctcttggacaaatctgcagaaaaggctcttgggaaggcagcatctcacattaaaagcattaagaatgtgacagagctgaagctttctgataatcctgcctgggaaggggataaaggaaacactaaaggtgacaagcacgatgacctccagcgggcgcgtttcatctgccccgttgtgggcctggagatgaacggccgacacaggttctgcttccttcggtgctgcggctgtgtgttttctgagcgagccttgaaagagataaaagcggaagtttgccacacgtgtggggctgccttccaggaggatgatgtcatcgtgctcaatggcaccaaggaggatgtggacgtgctgaagacaaggatgacttctttaaggcttttaactaagcctgttcatctacccctatgttctcttctttttgtctccagttgttgctctcctctcctcgt

SEQ ID NO: 457279 - DNA, 908 bp, Homo sapiens
  misc_feature (30)..(30): n is a, c, g, or t
aaaacagaacatgagtcaaggtacgaggcngggtgttggctctgactcccgtcctgcgatgggttgcgacgggggaacaatccccaagaggcatgaactggtgaaggggccgaagaaggttgagaaggcaattattggtgggctcctggatggggcctggtcaccagaaacaccaagccaagattagaagcctggaactttcagccccacctcacccccatccttcagggaggagaagaggaattggacatggagttaataatccatcatgcctacgtggtggggtctccataaagatccctgaagttgagggtctggagattttctgggttgccgacaacatccacatgccaggagagttaccccaactccatgaggacagccctgcacttgggacccttccagattacttctttatctggctatttatttgtatcctttaaaatgtatttgtaataaatcagcaatggtaactaaatacagatatgtaaaaacttaaaagaagaaagaccctaggaaagaagagagaccctggtaaacacattttttactgctttttcgggggaaacaattttcaaagccctggataaggagtgatttgtcacttttctccctgtccccaactctctgaggtgctttttgaatataacctaatctcttggtgcctcactttcctcatcttcaaaagtaaaaatactaactcatagagtttttctgaggattaaaaagttatggaaactgcttagcacagtgcctggcacacagtaagcacttaagcagtttttactttaaaaattaaattcagagggccaggtgtgttggcttacgcctgtaaactcagccctttgggagatcgaggcaggagaatcacttgagctcagcagttggagaacagcctgggcaacaca

SEQ ID NO: 457280 - DNA, 1465 bp, Homo sapiens
ggctggggatttcgccggaaatcccggaagtgacagctttgggggtttgctgctggctctgactcccgtcctgcgatgggttgcgacgggggaacaatccccaagaggcatgaactggtgaaggggccgaagaaggttgagaaggtcgacaaagatgctgaattagtggcccaatggaactattgtactctaagtcaggaaatattaagacgaccaatagttgcctgtgaacttggcagactttataacaaagatgccgtcattgaatttctcttggacaaatctgcagaaaaggctcttgggaaggcagcatctcacattaaaagcattaagaatgtgacagagctgaagctttctgataatcctgcctgggaaggggataaaggaaacactaaaggtgacaagcacgatgacctccagcgggcgcgtttcatctgccccgttgtgggcctggagatgaacggccgacacaggttctgcttccttcggtgctgcggctgtgtgttttctgagcgagccttgaaagagataaaagcggaagtttgccacacgtgtggggctgccttccaggaggatgatgtcatcgtgctcaatggcaccaaggaggatgtggacgtgctgaagacaaggatggaggagagaaggctgagagcgaagctgggaaaagaaaacaaagaaacccaaggcagcagagtctgtttcaaaaccagatgtcagtgaagaagccccagggccatcaaaagttaagacagggaagcctgaagaagccagccttgattctagagagaagaaaaccaacttggctcccaaaagcacagcaatgaatgagagctcttctggaaaagctgggaagcctccgtgtggagccacaaagaggtccatcgctgacagtgaagaatcggaggcctacaagtccctctttaccactcacagctccgccaagcgctccaaggaggagtctgcccactgggtcacccacacgtcctactgcttctgaagcccgcactgccaccgctcctgccccagaaggttgtttagtttccacgtaggcaggtcgctttgtgcctctgagtgcgctgctgtgtgttctctctatagttctgtgtcataaagctgtcctggccagccttcaagctggtgtggccactcttgatgtgaggcgtgtcggttccaggggggacatgggaggggctgcacagtggcccgaggtcatgcttgcttccacctgcaggtgcatttggtcctttccatggccaggaagccctgtgggctgcactttttatgcttgcagtaacaagagactccagagtcctcaccggtgcagagttggcacatattaattaaccttgttggtctagctaaatactgttaggggagtgtgccccatctcatcatttcgaagatagcagagtcatagttgggcacccagtgattgggttcaaaaataaagctggtctgcctcttc

SEQ ID NO: 457281 - DNA, 1559 bp, Homo sapiens
ggctggggatttcgccggaaatcccggaagtgacagctttgggggtttgctgctggctctgactcccgtcctgcgatgggttgcgacgggggaacaatccccaagaggcatgaactggtgaaggggccgaagaaggttgagaaggtcgacaaagatgctgaattagtggcccaatggaactattgtactctaagtcaggaaatattaagacgaccaatagttgcctgtgaacttggcagactttataacaaagatgccgtcattgaatttctcttggacaaatctgcagaaaaggctcttgggaaggcagcatctcacattaaaagcattaagaatgtgacagagctgaagctttctgataatcctgcctgggaaggggataaaggaaacactaaaggtgacaagcacgatgacctccagcgggcgcgtttcatctgccccgttgtgggcctggagatgaacggccgacacaggttctgcttccttcggtgctgcggctgtgtgttttctgagcgagccttgaaagagataaaagcggaagtttgccacacgtgtggggctgccttccaggaggatgatgtcatcgtgctcaatggcaccaaggaggatgtggacgtgctgaagacaaggatggaggagagaaggctgagagcgaagctgggaaaagaaaacaaagaaacccaaggcagcagagtctgtttcaaaaccagatgtcagtgaagaagccccagggccatcaaaagttaagacagggaagcctgaagaagccagccttgattctagagagaagaaaaccaacttggctcccaaaagcacagcaatgaatgagagctctttgaagaatcggaggcctacaagtccctctttaccactcacagctccgccaagcgctccaaggaggagtctgcccactgggtcacccacacgtcctactgcttctgaagcccgcactgccaccgctcctgccccagaaggttgtttagtttccacgtaggcaggtcgctttgtgcctctgagtgcgctgctgtgtgttctctctatagttctgtgtcataaagctgtcctggccagccttcaagctggtgtggccactcttgatgtgaggcgtgtcggttccaggggggacatgggaggggctgcacagtggcccgaggtcatgcttgcttccacctgcaggtgcatttggtcctttccatggccaggaagccctgtgggctgcactttttatgcttgcagtaacaagagactccagagtcctcaccggtgcagagttggcacatattaattaactaaaattctaatgatcttgctaccagcaataaatcaagtaggccaagtgaaactgggctttaaaaaggatggatttcaaatacactgtgcccactagaagcttcgaagggcctcgtccctctgctacagccctgggaggagccaggatccttgttggtctagctaaatactgttaggggagtgtgccccatctcatcatttcgaagatagcagagtcatagttgggcacccagtgattgggttcaaaaataaagctggtctgcctcttc

SEQ ID NO: 457282 - DNA, 1895 bp, Homo sapiens
  misc_feature (30)..(30): n is a, c, g, or t
aaaacagaacatgagtcaaggtacgaggcngggtgttggctctgactcccgtcctgcgatgggttgcgacgggggaacaatccccaagaggcatgaactggtgaaggggccgaagaaggttgagaaggcaattattggtgggctcctggatggggcctggtcaccagaaacaccaagccaagattagaagcctggaactttcagccccacctcacccccatccttcagggaggagaagaggaattggacatggagttaataatccatcatgcctacgtgtacagatatgtaaaaacttaaaagaagaaagaccctaggaaagaagagagaccctgatttggcatttgaagaatgggaaagagtggtgcagtctacacagtgaaggaaaaaacaagaacgggaaggagtgggacatggaatatgatgtcgacaaagatgctgaattagtggcccaatggaactattgtactctaagtcaggaaatattaagacgaccaatagttgcctgtgaacttggcagactttataacaaagatgccgtcattgaatttctcttggacaaatctgcagaaaaggctcttgggaaggcagcatctcacattaaaagcattaagaatgtgacagagctgaagctttctgataatcctgcctgggaaggggataaaggaaacactaaaggtgacaagcacgatgacctccagcgggcgcgtttcatctgccccgttgtgggcctggagatgaacggccgacacaggttctgcttccttcggtgctgcggctgtgtgttttctgagcgagccttgaaagagataaaagcggaagtttgccacacgtgtggggctgccttccaggaggatgatgtcatcgtgctcaatggcaccaaggaggatgtggacgtgctgaagacaaggatggaggagagaaggctgagagcgaagctgggaaaagaaaacaaagaaacccaaggcagcagagtctgtttcaaaaccagatgtcagtgaagaagccccagggccatcaaaagttaagacagggaagcctgaagaagccagccttgattctagagagaagaaaaccaacttggctcccaaaagcacagcaatgaatgagagctcttctggaaaagctgggaagcctccgtgtggagccacaaagaggtccatcgctgacagtgaagaatcggaggcctacaagtccctctttaccactcacagctccgccaagcgctccaaggaggagtctgcccactgggtcacccacacgtcctactgcttctgaagcccgcactgccaccgctcctgccccagaaggttgtttagtttccacgtaggcaggtcgctttgtgcctctgagtgcgctgctgtgtgttctctctatagttctgtgtcataaagctgtcctggccagccttcaagctggtgtggccactcttgatgtgaggcgtgtcggttccaggggggacatgggaggggctgcacagtggcccgaggtcatgcttgcttccacctgcaggtgcatttggtcctttccatggccaggaagccctgtgggctgcactttttatgcttgcagtaacaagagactccagagtcctcaccggtgcagagttggcacatattaattaactaaaattctaatgatcttgctaccagcaataaatcaagtaggccaagtgaaactgggctttaaaaaggatggatttcaaatacactgtgcccactagaagcttcgaagggcctcgtccctctgctacagccctgggaggagccaggatccttgttggtctagctaaatactgttaggggagtgtgccccatctcatcatttcgaagatagcagagtcatagttgggcacccagtgattgggttcaaaaataaagctggtctgcctcttc

SEQ ID NO: 457283 - DNA, 1731 bp, Homo sapiens
ggctggggatttcgccggaaatcccggaagtgacagctttgggggtttgctgctggctctgactcccgtcctgcgatgggttgcgacgggggaacaatccccaagaggcatgaactggtgaaggggccgaagaaggttgagaaggtcgacaaagatgctgaattagtggcccaatggaactattgtactctaagtcaggaaatattaagacgaccaatagttgcctgtgaacttggcagactttataacaaagatgccgtcattgaatttctcttggacaaatctgcagaaaaggctcttgggaaggcagcatctcacattaaaagcattaagaatgtgacagagctgaagctttctgataatcctgcctgggaaggggataaaggaaacactaaaggtgacaagcacgatgacctccagcgggcgcgtttcatctgccccgttgtgggcctggagatgaacggccgacacaggttctgcttccttcggtgctgcggctgtgtgttttctgagcgagccttgaaagagataaaagcggaagtttgccacacgtgtggggctgccttccaggaggatgatgtcatcgtgctcaatggcaccaaggaggatgtggacgtgctgaagacaaggatggaggagagaaggctgagagcgaagctgggaaaagaaaacaaagaaacccaaggcagcagagtctgtttcaaaaccagatgtcagtgaagggtaagatccttcaagagatccttattttagcaaaatgcgactctagggcagtctgctaatatgttcatgctttgttttgcattgtttttgctttgcctactttgtttcttttacagaagccccagggccatcaaaagttaagacagggaagcctgaagaagccagccttgattctagagagaagaaaaccaacttggctcccaaaagcacagcaatgaatgagagctcttctggaaaagctgggaagcctccgtgtggagccacaaagaggtccatcgctgacagtgaagaatcggaggcctacaagtccctctttaccactcacagctccgccaagcgctccaaggaggagtctgcccactgggtcacccacacgtcctactgcttctgaagcccgcactgccaccgctcctgccccagaaggttgtttagtttccacgtaggcaggtcgctttgtgcctctgagtgcgctgctgtgtgttctctctatagttctgtgtcataaagctgtcctggccagccttcaagctggtgtggccactcttgatgtgaggcgtgtcggttccaggggggacatgggaggggctgcacagtggcccgaggtcatgcttgcttccacctgcaggtgcatttggtcctttccatggccaggaagccctgtgggctgcactttttatgcttgcagtaacaagagactccagagtcctcaccggtgcagagttggcacatattaattaactaaaattctaatgatcttgctaccagcaataaatcaagtaggccaagtgaaactgggctttaaaaaggatggatttcaaatacactgtgcccactagaagcttcgaagggcctcgtccctctgctacagccctgggaggagccaggatccttgttggtctagctaaatactgttaggggagtgtgccccatctcatcatttcgaagatagcagagtcatagttgggcacccagtgattgggttcaaaaataaagctggtctgcctcttc

SEQ ID NO: 457284 - DNA, 1559 bp, Homo sapiens
ggctggggatttcgccggaaatcccggaagtgacagctttgggggtttgctgctggctctgactcccgtcctgcgatgggttgcgacgggggaacaatccccaagaggcatgaactggtgaaggggccgaagaaggttgagaaggtcgacaaagatgctgaattagtggcccaatggaactattgtactctaagtcaggaaatattaagacgaccaatagttgcctgtgaacttggcagactttataacaaagatgccgtcattgaatttctcttggacaaatctgcagaaaaggctcttgggaaggcagcatctcacattaaaagcattaagaatgtgacagagctgaagctttctgataatcctgcctgggaaggggataaaggaaacactaaaggtgacaagcacgatgacctccagcgggcgcgtttcatctgccccgttgtgggcctggagatgaacggccgacacaggttctgcttccttcggtgctgcggctgtgtgttttctgagcgagccttgaaagagataaaagcggaagtttgccacacgtgtggggctgccttccaggaggatgatgtcatcgtgctcaatggcaccaaggaggatgtggacgtgctgaagacaaggatggaggagagaaggctgagagcgaagctgggaaaagaagccccagggccatcaaaagttaagacagggaagcctgaagaagccagccttgattctagagagaagaaaaccaacttggctcccaaaagcacagcaatgaatgagagctcttctggaaaagctgggaagcctccgtgtggagccacaaagaggtccatcgctgacagtgaagaatcggaggcctacaagtccctctttaccactcacagctccgccaagcgctccaaggaggagtctgcccactgggtcacccacacgtcctactgcttctgaagcccgcactgccaccgctcctgccccagaaggttgtttagtttccacgtaggcaggtcgctttgtgcctctgagtgcgctgctgtgtgttctctctatagttctgtgtcataaagctgtcctggccagccttcaagctggtgtggccactcttgatgtgaggcgtgtcggttccaggggggacatgggaggggctgcacagtggcccgaggtcatgcttgcttccacctgcaggtgcatttggtcctttccatggccaggaagccctgtgggctgcactttttatgcttgcagtaacaagagactccagagtcctcaccggtgcagagttggcacatattaattaactaaaattctaatgatcttgctaccagcaataaatcaagtaggccaagtgaaactgggctttaaaaaggatggatttcaaatacactgtgcccactagaagcttcgaagggcctcgtccctctgctacagccctgggaggagccaggatccttgttggtctagctaaatactgttaggggagtgtgccccatctcatcatttcgaagatagcagagtcatagttgggcacccagtgattgggttcaaaaataaagctggtctgcctcttc

SEQ ID NO: 457285 - DNA, 1026 bp, Homo sapiens
ccaggtacggactgtgtgaccgtgcctgacacaacggactggatggacgacgaacggctgagacgcgacgctggaaaagaaaacaaagaaacccaaggcagcagagtctgtttcaaaaccagatgtcagtgaagaagccccagggccatcaaaagttaagacagggaagcctgaagaagccagccttgattctagagagaagaaaaccaacttggctcccaaaagcacagcaatgaatgagagctcttctggaaaagctgggaagcctccgtgtggagccacaaagaggtccatcgctgacagtgaagaatcggaggcctacaagtccctctttaccactcacagctccgccaagcgctccaaggaggagtctgcccactgggtcacccacacgtcctactgcttctgaagcccgcactgccaccgctcctgccccagaaggttgtttagtttccacgtaggcaggtcgctttgtgcctctgagtgcgctgctgtgtgttctctctatagttctgtgtcataaagctgtcctggccagccttcaagctggtgtggccactcttgatgtgaggcgtgtcggttccaggggggacatgggaggggctgcacagtggcccgaggtcatgcttgcttccacctgcaggtgcatttggtcctttccatggccaggaagccctgtgggctgcactttttatgcttgcagtaacaagagactccagagtcctcaccggtgcagagttggcacatattaattaactaaaattctaatgatcttgctaccagcaataaatcaagtaggccaagtgaaactgggctttaaaaaggatggatttcaaatacactgtgcccactagaagcttcgaagggcctcgtccctctgctacagccctgggaggagccaggatccttgttggtctagctaaatactgttaggggagtgtgccccatctcatcatttcgaagatagcagagtcatagttgggcacccagtgattgggttcaaaaataaagctggtctgcctcttc

SEQ ID NO: 457286 - DNA, 728 bp, Homo sapiens
  misc_feature (30)..(30): n is a, c, g, or t
  misc_feature (728)..(728): n is a, c, g, or t
aaaacagaacatgagtcaaggtacgaggcngggtgttggctctgactcccgtcctgcgatgggttgcgacgggggaacaatccccaagaggcatgaactggtgaaggggccgaagaaggttgagaaggcaattattggtgggctcctggatggggcctggtcaccagaaacaccaagccaagattagaagcctggaactttcagccccacctcacccccatccttcagggaggagaagaggaattggacatggagttaataatccatcatgcctacgtggtggggtctccataaagatccctgaagttgagggtctggagattttctgggttgccgacaacatccacaaggaggatgtggacgtgctgaagacaaggatggaggagagaaggctgagagcgaagctgggaaaagaaaacaaagaaacccaaggcagcagagtctgtttcaaaaccagatgtcagtgaagaagccccagggccatcaaaagttaagacagggaagcctgaagaagccagccttgattctagagagaagaaaaccaacttggctcccaaaagcacagaatggatgagagctttcttgtaaagctgtgaagctcgtgttgggcacaaagaggggcatatctgcagtgagaaatggaggctacaatgcctttttaacacatacaggtcggcgcttaaaggggagagttggcactgtgtacacacatgctctggtttggcccn

SEQ ID NO: 457287 - DNA, 611 bp, Homo sapiens
ggcgaccttatcactgagctggggaaggcagctgccatgagtcattttaagtctctgagctccagcccagttctaggggcacaaggctggagtagggatactcctagttacctgcttgaggaaaagcacgaagaaattggtatcaaagtcttggctttgttctgggagttgagggaaaagtagggaggtatttaagtggcttgattatgagaaaacaccagagacagtagtaaatagttatttaccgatttttacccatttctaccctggtaatcctccctgcaaatgaagaaaaccaagacttctttatttattatctttccccatctgtattgaaacagtgatcttacttatctcacccagtgactctgtaggacatttaaaaagtggtcatgggtttcattggagtgagaatggtattaacgtttcctcttgtcatctcaaagttttctctccccttaataccatctctacagcttgctgagatgctttaaggatcacagagacacaaagaaaatttgaaccctacgcttctcccatcccacttcttactccatcccgggtgagcgctcgtcctcaaataaagcatgttggaacttccaaatatctct

SEQ ID NO: 457288 - DNA, 366 bp, Homo sapiens
cgccactgggagaacccaactcaaaatcaacctgtacctttttcatttggtggctcctctcattcctccaactgaacatctttgtggaaagatgatggctgcctgcacccactgctggcgaatggtgagaaggtagagcaagggggccaagttgctgctggtgggcacctggggttcaggccggcccaactgtggctgagccgatctgtagctgagctgagtgtcaaccagctgtgtccacaccctgcctgaggcctgccctctcctccctggctggggtgggaccttgaagaggcatatcttcccactaggtgaggaggaacaagagcctcactccccttctccctcttgcctttcacagctgag

SEQ ID NO: 457289 - DNA, 609 bp, Homo sapiens
cgccactgggagaacccaactcaaaaaaaaaaaaagttttgggttatggagcatttttgattttggatctttgggttaaggacgctcaacctgtacctttttcatttggtggctcctctcattcctccaactgaacatctttgtggaaagatgatggctgcctgcacccactgctggcgaatggtgagaaggtagagcaagggggccaagttgctgctggtgggcacctggggttcaggccggcccaactgtggctgagccgatctgtagctgagctgagtgtcaaccagctgtgtccacaccctgcctgaggcctgccctctcctccctggctggggtgggaccttgaagaggcatatcttcccactaggtgaggaggaacaagagcctcactccccttctccctcttgcctttcacagctgaggcagagcttatgggaggagtcactatgggagtgatggacctgggctttggtctccagtgtttggcaggggcgaccttatcactgagctggggaaggcagctgccatgagtcattttaagtctctgagctccagcccagttctaggggcacaaggctggagtagggatactcctagttacctgct

SEQ ID NO: 457290 - DNA, 2729 bp, Homo sapiens
  misc_feature (1291)..(1292): n is a, c, g, or t
  misc_feature (1311)..(1311): n is a, c, g, or t
  misc_feature (1315)..(1315): n is a, c, g, or t
  misc_feature (2196)..(2196): n is a, c, g, or t
tctctgtcctgccagcactgagggctcatccctctgcagagcgcggggtcaccgggaggagacgccatgacgcccgccctcacagccctgctctgccttgggctgagtctgggccccaggacccgcatgcaggcagggcccttccccaaacccaccctctgggctgagccaggctctgtgatcagctgggggagccccgtgaccatctggtgtcaggggagcctggaggcccaggagtaccaactggataaagagggaagcccagagccctgggacagaaataacccactggaacccaagaacaaggccagattctccatcccatccatgacacagcaccatgcagggagataccgctgccactattacagctctgcaggctggtcagagcccagcgaccccctggagctggtgatgacaggattctacaacaaacccaccctctcagccctgcccagccctgtggtggcctcaggggggaatatgaccctccgatgtggctcacagaagggatatcaccattttgttctgatgaaggaaggagaacaccagctcccccggaccctggactcacagcagctccacagtggggggttccaggccctgttccctgtgggccccgtgacccccagccacaggtggaggttcacatgctattactattatatgaacaccccccgggtgtggtcccaccccagtgaccccctggagattctgccctcaggcgtgtctaggaagccctccctcctgaccctgcagggccctgtcctggcccctgggcagagcctgaccctccagtgtggctctgatgtcggctacgacagatttgttctgtataaggagggggaacgtgacttcctccagcgccctggccagcagccccaggctgggctctcccaggccaacttcaccctgggccctgtgagcccctcccacgggggccagtacaggtgctatggtgcacacaacctctcctccgagtggtcggcccccagcgaccccctgaacatcctgatggcaggacagatctatgacaccgtctccctgtcagcacagccgggccccacagtggcctcaggagagaacgtgaccctgctgtgtcagtcatggtggcagtttgacactttccttctgaccaaagaaggggcagcccatcccccactgcgtctgagatcaatgtacggagctcataagtaccaggctgaattccccatgagtcctgtgacctcagcccacgcggggacctacaggtgctacggctcacgcagctccaacccccacctgctgtctnnccccagtgagcccctgganctcntggtctcaggacactctggaggctccagcctcccacccacagggccgccctccacacctggtctgggaagatacctggaggttttgattggggtctcggtggccttcgtcctgctgctcttcctcctcctcttcctcctcctccgacgtcagcgtcacagcaaacacaggacatctgaccagagaaagactgatttccagcgtcctgcaggggctgcggagacagagcccaaggacaggggcctgctgaggaggtccagcccagctgctgacgtccaggaagaaaacctctatgctgccgtgaaggacacacagtctgaggacagggtggagctggacagtcagagcccacacgatgaagacccccaggcagtgacgtatgccccggtgaaacactccagtcctaggagagaaatggcctctcctccctcctcactgtctggggaattcctggacacaaaggacagacaggtggaagaggacaggcagatggacactgaggctgctgcatctgaagcctcccaggatgtgacctacgcccagctgcacagcttgacccttagacggaaggcaactgagcctcctccatcccaggaaggggaacctccagctgagcccagcatctacgccactctggccatccactagcccggggggtacgcagaccccacactcagcagaaggagactcaggactgctgaaggcacgggagctgcccccagtggacaccagtgaaccccagtcagcctggacccctaacacagaccatgaggagacgctgggaacttgtgggactcacctgactcaaagatgactaatatcgtcccattttggaaataaagcaacagacttctcaacaatcaatgagttaataacaaaaanacaaaaaacaaaaacagacgtaaaggccgggtgtggtactcaggaggctgagtggggaggattccttgaacacaagaagttaaggctgctgaggctgcagtgagctatgactgtgccactgcactccagcctgtgtgacagagcgagaccttgtctctaaaaaaaaaaacagtgaatgttttaaactgaatgataatgtaaatattatacatcgaacttatgacatgggaaaattaagaagcataaataggccgggcgcggtggctcacgcctataatctcagcactttgggaggctgatgcgggcggatcatgaggtcaggagatcgagaccatcctggctaacacggtgaaaccccgtctctactaaaaatacaaaaaaattagccgggcgtggtggcgagtgcctatagtcccagctactcaggaggctgaggcaggagaatggcatgagcccgggaggcagagcttgcagtgagctgagatcgcaccactgcactccagcctgggcgacagagtgagattccgtctcga

SEQ ID NO: 457291 - DNA, 2729 bp, Homo sapiens
  misc_feature (1291)..(1292): n is a, c, g, or t
  misc_feature (1311)..(1311): n is a, c, g, or t
  misc_feature (1315)..(1315): n is a, c, g, or t
  misc_feature (2196)..(2196): n is a, c, g, or t
tctctgtcctgccagcactgagggctcatccctctgcagagcgcggggtcaccgggaggagacgccatgacgcccgccctcacagccctgctctgccttgggctgagtctgggccccaggacccgcatgcaggcagggcccttccccaaacccaccctctgggctgagccaggctctgtgatcagctgggggagccccgtgaccatctggtgtcaggggagcctggaggcccaggagtaccaactggataaagagggaagcccagagccctgggacagaaataacccactggaacccaagaacaaggccagattctccatcccatccatgacacagcaccatgcagggagataccgctgccactattacagctctgcaggctggtcagagcccagcgaccccctggagctggtgatgacaggagcctatagcaaacccaccctctcagccctgcccagccctgtggtggcctcaggggggaatatgaccctccgatgtggctcacagaagagatatcaccattttgttctgatgaaggaaggagaacaccagctcccccggaccctggactcacagcagctccacagtggggggttccaggccctgttccctgtgggccccgtgaaccccagccacaggtggaggttcacatgctattactattatatgaacaccccccgggtgtggtcccaccccagtgaccccctggagattctgccctcaggcgtgtctaggaagccctccctcctgaccctgcagggccctgtcctggcccctgggcagagcctgaccctccagtgtggctctgatgtcggctacgacagatttgttctgtataaggagggggaacgtgacttcctccagcgccctggccagcagccccaggctgggctctcccaggccaacttcaccctgggccctgtgagcccctccaatgggggccagtacaggtgctacggtgcacacaacctctcctccgagtggtcggcccccagcgaccccctgaacatcctgatggcaggacagatctatgacaccgtctccctgtcagcacagccgggccccacagtggcctcaggagagaacgtgaccctgctgtgtcagtcatggtggcagtttgacactttccttctgaccaaagaaggggcagcccatcccccactgcgtctgagatcaatgtacggagctcataagtaccaggctgaattccccatgagtcctgtgacctcagcccacgcggggacctacaggtgctacggctcacgcagctccaacccccacctgctgtctnnccccagtgagcccctgganctcntggtctcaggacactctggaggctccagcctcccacccacagggccgccctccacacctggtctgggaagatacctggaggttttgattggggtctcggtggccttcgtcctgctgctcttcctcctcctcttcctcctcctccgacgtcagcgtcacagcaaacacaggacatctgaccagagaaagactgatttccagcgtcctgcaggggctgcggagacagagcccaaggacaggggcctgctgaggaggtccagcccagctgctgacgtccaggaagaaaacctctatgctgccgtgaaggacacacagtctgaggacagggtggagctggacagtcagagcccacacgatgaagacccccaggcagtgacgtatgccccggtgaaacactccagtcctaggagagaaatggcctctcctccctcctcactgtctggggaattcctggacacaaaggacagacaggtggaagaggacaggcagatggacactgaggctgctgcatctgaagcctcccaggatgtgacctacgcccagctgcacagcttgacccttagacggaaggcaactgagcctcctccatcccaggaaggggaacctccagctgagcccagcatctacgccactctggccatccactagcccggggggtacgcagaccccacactcagcagaaggagactcaggactgctgaaggcacgggagctgcccccagtggacaccagtgaaccccagtcagcctggacccctaacacagaccatgaggagacgctgggaacttgtgggactcacctgactcaaagatgactaatatcgtcccattttggaaataaagcaacagacttctcaacaatcaatgagttaataacaaaaanacaaaaaacaaaaacagacgtaaaggccgggtgtggtactcaggaggctgagtggggaggattccttgaacacaagaagttaaggctgctgaggctgcagtgagctatgactgtgccactgcactccagcctgtgtgacagagcgagaccttgtctctaaaaaaaaaaacagtgaatgttttaaactgaatgataatgtaaatattatacatcgaacttatgacatgggaaaattaagaagcataaataggccgggcgcggtggctcacgcctataatctcagcactttgggaggctgatgcgggcggatcatgaggtcaggagatcgagaccatcctggctaacacggtgaaaccccgtctctactaaaaatacaaaaaaattagccgggcgtggtggcgagtgcctatagtcccagctactcaggaggctgaggcaggagaatggcatgagcccgggaggcagagcttgcagtgagctgagatcgcaccactgcactccagcctgggcgacagagtgagattccgtctcga

SEQ ID NO: 457292 - DNA, 2646 bp, Homo sapiens
  misc_feature (1208)..(1209): n is a, c, g, or t
  misc_feature (1228)..(1228): n is a, c, g, or t
  misc_feature (1232)..(1232): n is a, c, g, or t
  misc_feature (2113)..(2113): n is a, c, g, or t
tctctgtcctgccagcactgagggctcatccctctgcagagcgcggggtcaccgggaggagacgccatgacgcccgccctcacagccctgctctgccttgggctgagtctgggccccaggacccgcatgcaggcagggcccttccccaaacccaccctctgggctgagccaggctctgtgatcagctgggggagccccgtgaccatctggtgtcaggggagcctggaggcccaggagtaccaactggataaagagggaagcccagagccctgggacagaaataacccactggaacccaagaacaaggccagattctccatcccatccatgacacagcaccatgcagggagataccgctgccactattacagctctgcaggctggtcagagcccagcgaccccctggagctggtgatgacaggattctacaacaaacccaccctctcagccctgcccagccctgtggtggcctcaggggggaatatgaccctccgatgtggctcacagaagggatatcaccattttgttctgatgaaggaaggagaacaccagctcccccggaccctggactcacagcagctccacagtggggggttccaggccctgttccctgtgggccccgtgacccccagccacaggtggcgtgtctaggaagccctccctcctgaccctgcagggccctgtcctggcccctgggcagagcctgaccctccagtgtggctctgatgtcggctacgacagatttgttctgtataaggagggggaacgtgacttcctccagcgccctggccagcagccccaggctgggctctcccaggccaacttcaccctgggccctgtgagcccctcccacgggggccagtacaggtgctatggtgcacacaacctctcctccgagtggtcggcccccagcgaccccctgaacatcctgatggcaggacagatctatgacaccgtctccctgtcagcacagccgggccccacagtggcctcaggagagaacgtgaccctgctgtgtcagtcatggtggcagtttgacactttccttctgaccaaagaaggggcagcccatcccccactgcgtctgagatcaatgtacggagctcataagtaccaggctgaattccccatgagtcctgtgacctcagcccacgcggggacctacaggtgctacggctcacgcagctccaacccccacctgctgtctnnccccagtgagcccctgganctcntggtctcaggacactctggaggctccagcctcccacccacagggccgccctccacacctggtctgggaagatacctggaggttttgattggggtctcggtggccttcgtcctgctgctcttcctcctcctcttcctcctcctccgacgtcagcgtcacagcaaacacaggacatctgaccagagaaagactgatttccagcgtcctgcaggggctgcggagacagagcccaaggacaggggcctgctgaggaggtccagcccagctgctgacgtccaggaagaaaacctctatgctgccgtgaaggacacacagtctgaggacagggtggagctggacagtcagagcccacacgatgaagacccccaggcagtgacgtatgccccggtgaaacactccagtcctaggagagaaatggcctctcctccctcctcactgtctggggaattcctggacacaaaggacagacaggtggaagaggacaggcagatggacactgaggctgctgcatctgaagcctcccaggatgtgacctacgcccagctgcacagcttgacccttagacggaaggcaactgagcctcctccatcccaggaaggggaacctccagctgagcccagcatctacgccactctggccatccactagcccggggggtacgcagaccccacactcagcagaaggagactcaggactgctgaaggcacgggagctgcccccagtggacaccagtgaaccccagtcagcctggacccctaacacagaccatgaggagacgctgggaacttgtgggactcacctgactcaaagatgactaatatcgtcccattttggaaataaagcaacagacttctcaacaatcaatgagttaataacaaaaanacaaaaaacaaaaacagacgtaaaggccgggtgtggtactcaggaggctgagtggggaggattccttgaacacaagaagttaaggctgctgaggctgcagtgagctatgactgtgccactgcactccagcctgtgtgacagagcgagaccttgtctctaaaaaaaaaaacagtgaatgttttaaactgaatgataatgtaaatattatacatcgaacttatgacatgggaaaattaagaagcataaataggccgggcgcggtggctcacgcctataatctcagcactttgggaggctgatgcgggcggatcatgaggtcaggagatcgagaccatcctggctaacacggtgaaaccccgtctctactaaaaatacaaaaaaattagccgggcgtggtggcgagtgcctatagtcccagctactcaggaggctgaggcaggagaatggcatgagcccgggaggcagagcttgcagtgagctgagatcgcaccactgcactccagcctgggcgacagagtgagattccgtctcga

SEQ ID NO: 457293 - DNA, 2593 bp, Homo sapiens
  misc_feature (2060)..(2060): n is a, c, g, or t
tctctgtcctgccagcactgagggctcatccctctgcagagcgcggggtcaccgggaggagacgccatgacgcccgccctcacagccctgctctgccttgggctgagtctgggccccaggacccgcatgcaggcagggcccttccccaaacccaccctctgggctgagccaggctctgtgatcagctgggggagccccgtgaccatctggtgtcaggggagcctggaggcccaggagtaccaactggataaagagggaagcccagagccctgggacagaaataacccactggaacccaagaacaaggccagattctccatcccatccatgacacagcaccatgcagggagataccgctgccactattacagctctgcaggctggtcagagcccagcgaccccctggagctggtgatgacaggattctacaacaaacccaccctctcagccctgcccagccctgtggtggcctcaggggggaatatgaccctccgatgtggctcacagaagggatatcaccattttgttctgatgaaggaaggagaacaccagctcccccggaccctggactcacagcagctccacagtggggggttccaggccctgttccctgtgggccccgtgacccccagccacaggtggcgtgtctaggaagccctccctcctgaccctgcagggccctgtcctggcccctgggcagagcctgaccctccagtgtggctctgatgtcggctacgacagatttgttctgtataaggagggggaacgtgacttcctccagcgccctggccagcagccccaggctgggctctcccaggccaacttcaccctgggccctgtgagcccctcccacgggggccagtacaggtgctatggtgcacacaacctctcctccgagtggtcggcccccagcgaccccctgaacatcctgatggcaggacagatctatgacaccgtctccctgtcagcacagccgggccccacagtggcctcaggagagaacgtgaccctgctgtgtcagtcatggtggcagtttgacactttccttctgaccaaagaaggggcagcccatcccccactgcgtctgagatcaatgtacggagctcataagtaccaggctgaattccccatgagtcctgtgacctcagcccacgcggggacctacaggtgctacggctcatacagctccaacccccacctgctgtctttccccagtgagcccctggaactcatggtctcaggacactctggaggctccagcctcccacccacagggccgccctccacacctggtctgggaagatacctggaggttttgattggggtctcggtggccttcgtcctgctgctcttcctcctcctcttcctcctcctccgacgtcagcgtcacagcaaacacaggacatctgaccagagaaagactgatttccagcgtcctgcaggggctgcggagacagagcccaaggacaggggcctgctgaggaggtccagcccagctgctgacgtccaggaagaaaacctctagcccacacgatgaagacccccaggcagtgacgtatgccccggtgaaacactccagtcctaggagagaaatggcctctcctccctcctcactgtctggggaattcctggacacaaaggacagacaggtggaagaggacaggcagatggacactgaggctgctgcatctgaagcctcccaggatgtgacctacgcccagctgcacagcttgacccttagacggaaggcaactgagcctcctccatcccaggaaggggaacctccagctgagcccagcatctacgccactctggccatccactagcccggggggtacgcagaccccacactcagcagaaggagactcaggactgctgaaggcacgggagctgcccccagtggacaccagtgaaccccagtcagcctggacccctaacacagaccatgaggagacgctgggaacttgtgggactcacctgactcaaagatgactaatatcgtcccattttggaaataaagcaacagacttctcaacaatcaatgagttaataacaaaaanacaaaaaacaaaaacagacgtaaaggccgggtgtggtactcaggaggctgagtggggaggattccttgaacacaagaagttaaggctgctgaggctgcagtgagctatgactgtgccactgcactccagcctgtgtgacagagcgagaccttgtctctaaaaaaaaaaacagtgaatgttttaaactgaatgataatgtaaatattatacatcgaacttatgacatgggaaaattaagaagcataaataggccgggcgcggtggctcacgcctataatctcagcactttgggaggctgatgcgggcggatcatgaggtcaggagatcgagaccatcctggctaacacggtgaaaccccgtctctactaaaaatacaaaaaaattagccgggcgtggtggcgagtgcctatagtcccagctactcaggaggctgaggcaggagaatggcatgagcccgggaggcagagcttgcagtgagctgagatcgcaccactgcactccagcctgggcgacagagtgagattccgtctcga

SEQ ID NO: 457294 - DNA, 391 bp, Homo sapiens
gactgcttgtgagggttggaggtcacgaaggaaagacctggctcgcgcctgcacacagtaggtgctcacatcaatgacatcattcccactcctgacgtcctcatgtcaaggtctgggaagatacctggaggttttgattggggtctcggtggccttcgtcctgctgctcttcctcctcctcttcctcctcctccgacgtcagcgtcacagcaaacacaggacatctgaccagagaaagactgatttccagcgtcctgcaggggctgcggagacagagcccaaggacaggggcctgctgaggaggtccagcccagctgctgacgtccaggaagaaaacctctgtaagaggaagagaggggacaaatgggggtgctggagagacaggagtccc

SEQ ID NO: 457295 - DNA, 1672 bp, Homo sapiens
tctctgtcctgccagcactgagggctcatccctctgcagagcgcggggtcaccgggaggagacgccatgacgcccgccctcacagccctgctctgccttggtgagatttcaagatggggagggggagatccgagtcttggaggaaccccaccccacacacaagccctggtccatcaggagacctcaaaagctcaggaggcacccgggcggggacctgctcaggcttcagggcaaatgcctcacagggaactctcttccagggctgagtctgggccccaggacccgcatgcaggcagggcccttccccaaacccaccctctgggctgagccaggctctgtgatcagctgggggagccccgtgaccatctggtgtcaggggagcctggaggcccaggagtaccaactggataaagagggaagcccagagccctgggacagaaataacccactggaacccaagaacaaggccagattctccatcccatccatgacacagcaccatgcagggagataccgctgccactattacagctctgcaggctggtcagagcccagcgaccccctggagctggtgatgacaggattctacaacaaacccaccctctcagccctgcccagccctgtggtggcctcaggggggaatatgaccctccgatgtggctcacagaagggatatcaccattttgttctgatgaaggaaggagaacaccagctcccccggaccctggactcacagcagctccacagtggggggttccaggccctgttccctgtgggccccgtgacccccagccacaggtggaggttcacatgctattactattatatgaacaccccccgggtgtggtcccaccccagtgaccccctggagattctgccctcaggcgtgtctaggaagccctccctcctgaccctgcagggccctgtcctggcccctgggcagagcctgaccctccagtgtggctctgatgtcggctacgacagatttgttctgtataaggagggggaacgtgacttcctccagcgccctggccagcagccccaggctgggctctcccaggccaacttcaccctgggccctgtgagcccctcccacgggggccagtacaggtgctatggtgcacacaacctctcctccgagtggtcggcccccagcgaccccctgaacatcctgatggcaggacagatctatgacaccgtctccctgtcagcacagccgggccccacagtggcctcaggagagaacgtgaccctgctgtgtcagtcatggtggcagtttgacactttccttctgaccaaagaaggggcagcccatcccccactgcgtctgagatcaatgtacggagctcataagtaccaggctgaattccccatgagtcctgtgacctcagcccacgcggggacctacaggtgctacggctcatacagctccaacccccacctgctgtctttccccagtgagcccctggaactcatggtctcaggacactctggaggctccagcctcccacccacagggccgccctccacacctgcctcacacgccaaggattacacagtggagaatctcatccgcatgggcatggcaggcttggtcctggtgttcctcgggattctgttatttgaggctcagcacagccagagaaacccccaagatgcagcaaggaggtaa

SEQ ID NO: 457296 - DNA, 2757 bp, Homo sapiens
  misc_feature (1291)..(1292): n is a, c, g, or t
  misc_feature (1311)..(1311): n is a, c, g, or t
  misc_feature (1315)..(1315): n is a, c, g, or t
  misc_feature (2224)..(2224): n is a, c, g, or t
tctctgtcctgccagcactgagggctcatccctctgcagagcgcggggtcaccgggaggagacgccatgacgcccgccctcacagccctgctctgccttgggctgagtctgggccccaggacccgcatgcaggcagggcccttccccaaacccaccctctgggctgagccaggctctgtgatcagctgggggagccccgtgaccatctggtgtcaggggagcctggaggcccaggagtaccaactggataaagagggaagcccagagccctgggacagaaataacccactggaacccaagaacaaggccagattctccatcccatccatgacacagcaccatgcagggagataccgctgccactattacagctctgcaggctggtcagagcccagcgaccccctggagctggtgatgacaggattctacaacaaacccaccctctcagccctgcccagccctgtggtggcctcaggggggaatatgaccctccgatgtggctcacagaagggatatcaccattttgttctgatgaaggaaggagaacaccagctcccccggaccctggactcacagcagctccacagtggggggttccaggccctgttccctgtgggccccgtgacccccagccacaggtggaggttcacatgctattactattatatgaacaccccccgggtgtggtcccaccccagtgaccccctggagattctgccctcaggcgtgtctaggaagccctccctcctgaccctgcagggccctgtcctggcccctgggcagagcctgaccctccagtgtggctctgatgtcggctacgacagatttgttctgtataaggagggggaacgtgacttcctccagcgccctggccagcagccccaggctgggctctcccaggccaacttcaccctgggccctgtgagcccctcccacgggggccagtacaggtgctatggtgcacacaacctctcctccgagtggtcggcccccagcgaccccctgaacatcctgatggcaggacagatctatgacaccgtctccctgtcagcacagccgggccccacagtggcctcaggagagaacgtgaccctgctgtgtcagtcatggtggcagtttgacactttccttctgaccaaagaaggggcagcccatcccccactgcgtctgagatcaatgtacggagctcataagtaccaggctgaattccccatgagtcctgtgacctcagcccacgcggggacctacaggtgctacggctcacgcagctccaacccccacctgctgtctnnccccagtgagcccctgganctcntggtctcaggacactctggaggctccagcctcccacccacagggccgccctccacacctggtctgggaagatacctggaggttttgattggggtctcggtggccttcgtcctgctgctcttcctcctcctcttcctcctcctccgacgtcagcgtcacagcaaacacaggacatctgggctgagactctgtccatcttcacccagaccagagaaagactgatttccagcgtcctgcaggggctgcggagacagagcccaaggacaggggcctgctgaggaggtccagcccagctgctgacgtccaggaagaaaacctctatgctgccgtgaaggacacacagtctgaggacagggtggagctggacagtcagagcccacacgatgaagacccccaggcagtgacgtatgccccggtgaaacactccagtcctaggagagaaatggcctctcctccctcctcactgtctggggaattcctggacacaaaggacagacaggtggaagaggacaggcagatggacactgaggctgctgcatctgaagcctcccaggatgtgacctacgcccagctgcacagcttgacccttagacggaaggcaactgagcctcctccatcccaggaaggggaacctccagctgagcccagcatctacgccactctggccatccactagcccggggggtacgcagaccccacactcagcagaaggagactcaggactgctgaaggcacgggagctgcccccagtggacaccagtgaaccccagtcagcctggacccctaacacagaccatgaggagacgctgggaacttgtgggactcacctgactcaaagatgactaatatcgtcccattttggaaataaagcaacagacttctcaacaatcaatgagttaataacaaaaanacaaaaaacaaaaacagacgtaaaggccgggtgtggtactcaggaggctgagtggggaggattccttgaacacaagaagttaaggctgctgaggctgcagtgagctatgactgtgccactgcactccagcctgtgtgacagagcgagaccttgtctctaaaaaaaaaaacagtgaatgttttaaactgaatgataatgtaaatattatacatcgaacttatgacatgggaaaattaagaagcataaataggccgggcgcggtggctcacgcctataatctcagcactttgggaggctgatgcgggcggatcatgaggtcaggagatcgagaccatcctggctaacacggtgaaaccccgtctctactaaaaatacaaaaaaattagccgggcgtggtggcgagtgcctatagtcccagctactcaggaggctgaggcaggagaatggcatgagcccgggaggcagagcttgcagtgagctgagatcgcaccactgcactccagcctgggcgacagagtgagattccgtctcga

SEQ ID NO: 457297 - DNA, 2780 bp, Homo sapiens
  misc_feature (1291)..(1292): n is a, c, g, or t
  misc_feature (1311)..(1311): n is a, c, g, or t
  misc_feature (1315)..(1315): n is a, c, g, or t
  misc_feature (1398)..(1398): n is a, c, g, or t
  misc_feature (2247)..(2247): n is a, c, g, or t
tctctgtcctgccagcactgagggctcatccctctgcagagcgcggggtcaccgggaggagacgccatgacgcccgccctcacagccctgctctgccttgggctgagtctgggccccaggacccgcatgcaggcagggcccttccccaaacccaccctctgggctgagccaggctctgtgatcagctgggggagccccgtgaccatctggtgtcaggggagcctggaggcccaggagtaccaactggataaagagggaagcccagagccctgggacagaaataacccactggaacccaagaacaaggccagattctccatcccatccatgacacagcaccatgcagggagataccgctgccactattacagctctgcaggctggtcagagcccagcgaccccctggagctggtgatgacaggagcctatagcaaacccaccctctcagccctgcccagccctgtggtggcctcaggggggaatatgaccctccgatgtggctcacagaagagatatcaccattttgttctgatgaaggaaggagaacaccagctcccccggaccctggactcacagcagctccacagtggggggttccaggccctgttccctgtgggccccgtgaaccccagccacaggtggaggttcacatgctattactattatatgaacaccccccgggtgtggtcccaccccagtgaccccctggagattctgccctcaggcgtgtctaggaagccctccctcctgaccctgcagggccctgtcctggcccctgggcagagcctgaccctccagtgtggctctgatgtcggctacgacagatttgttctgtataaggagggggaacgtgacttcctccagcgccctggccagcagccccaggctgggctctcccaggccaacttcaccctgggccctgtgagcccctccaatgggggccagtacaggtgctacggtgcacacaacctctcctccgagtggtcggcccccagcgaccccctgaacatcctgatggcaggacagatctatgacaccgtctccctgtcagcacagccgggccccacagtggcctcaggagagaacgtgaccctgctgtgtcagtcatggtggcagtttgacactttccttctgaccaaagaaggggcagcccatcccccactgcgtctgagatcaatgtacggagctcataagtaccaggctgaattccccatgagtcctgtgacctcagcccacgcggggacctacaggtgctacggctcacgcagctccaacccccacctgctgtctnnccccagtgagcccctgganctcntggtctcaggacactctggaggctccagcctcccacccacagggccgccctccacacctggaggtcctgaggaccagcccctnaaccccccagggtcaggccctcagaatggtctgggaagatacctggaggttttgattggggtctcggtggccttcgtcctgctgctcttcctcctcctcttcctcctcctccgacgtcagcgtcacagcaaacacaggacatctgaccagagaaagactgatttccagcgtcctgcaggggctgcggagacagagcccaaggacaggggcctgctgaggaggtccagcccagctgctgacgtccaggaagaaaacctctatgctgccgtgaaggacacacagtctgaggacagggtggagctggacagtcagagcccacacgatgaagacccccaggcagtgacgtatgccccggtgaaacactccagtcctaggagagaaatggcctctcctccctcctcactgtctggggaattcctggacacaaaggacagacaggtggaagaggacaggcagatggacactgaggctgctgcatctgaagcctcccaggatgtgacctacgcccagctgcacagcttgacccttagacggaaggcaactgagcctcctccatcccaggaaggggaacctccagctgagcccagcatctacgccactctggccatccactagcccggggggtacgcagaccccacactcagcagaaggagactcaggactgctgaaggcacgggagctgcccccagtggacaccagtgaaccccagtcagcctggacccctaacacagaccatgaggagacgctgggaacttgtgggactcacctgactcaaagatgactaatatcgtcccattttggaaataaagcaacagacttctcaacaatcaatgagttaataacaaaaanacaaaaaacaaaaacagacgtaaaggccgggtgtggtactcaggaggctgagtggggaggattccttgaacacaagaagttaaggctgctgaggctgcagtgagctatgactgtgccactgcactccagcctgtgtgacagagcgagaccttgtctctaaaaaaaaaaacagtgaatgttttaaactgaatgataatgtaaatattatacatcgaacttatgacatgggaaaattaagaagcataaataggccgggcgcggtggctcacgcctataatctcagcactttgggaggctgatgcgggcggatcatgaggtcaggagatcgagaccatcctggctaacacggtgaaaccccgtctctactaaaaatacaaaaaaattagccgggcgtggtggcgagtgcctatagtcccagctactcaggaggctgaggcaggagaatggcatgagcccgggaggcagagcttgcagtgagctgagatcgcaccactgcactccagcctgggcgacagagtgagattccgtctcga

SEQ ID NO: 457298 - DNA, 1395 bp, Homo sapiens
atgacccccatcctcacggtcctgatctgtctcgggctgagtctgggccccaggacccacgtgcaggcagggcccttccccaaacccaccctctgggctgagccaggctctgtgatcagctgggggagccccgtgaccatctggtgtcaggggagcctggaggcccaggagtaccaactggataaagagggaagcccagagccctgggacagaaataacccactggaacccaagaacaaggccagattctccatcccatccatgacacagcaccatgcagggagataccgctgccactattacagctctgcaggctggtcagagcccagcgaccccctggagctggtgatgacaggattctacaacaaacccaccctctcagccctgcccagccctgtggtggcctcaggggggaatatgaccctccgatgtggctcacagaagggatatcaccattttgttctgatgaaggaaggagaacaccagctcccccggaccctggactcacagcagctccacagtggggggttccaggccctgttccctgtgggccccgtgacccccagccacaggtggaggttcacatgctattactattatatgaacaccccccgggtgtggtcccaccccagtgaccccctggagattctgccctcaggcgtgtctaggaagccctccctcctgaccctgcagggccctgtcctggcccctgggcagagcctgaccctccagtgtggctctgatgtcggctacgacagatttgttctgtataaggagggggaacgtgacttcctccagcgccctggccagcagccccaggctgggctctcccaggccaacttcaccctgggccctgtgagcccctcccacgggggccagtacaggtgctatggtgcacacaacctctcctccgagtggtcggcccccagcgaccccctgaacatcctgatggcaggacagatctatgacaccgtctccctgtcagcacagccgggccccacagtggcctcaggagagaacgtgaccctgctgtgtcagtcatggtggcagtttgacactttccttctgaccaaagaaggggcagcccatcccccactgcgtctgagatcaatgtacggagctcataagtaccaggctgaattccccatgagtcctgtgacctcagcccacgcggggacctacaggtgctacggctcatacagctccaacccccacctgctgtctttccccagtgagcccctggaactcatggtctcagcctcacacgccaaggattacacagtggagaatctcatccgcatgggcatggcaggcttggtcctggtgttcctcgggattctgttatttgaggctcagcacagccagagaaacccccaagatgcagcaaggaggtaa

SEQ ID NO: 457299 - DNA, 2889 bp, Homo sapiens
  misc_feature (1451)..(1452): n is a, c, g, or t
  misc_feature (1471)..(1471): n is a, c, g, or t
  misc_feature (1475)..(1475): n is a, c, g, or t
  misc_feature (2356)..(2356): n is a, c, g, or t
tctctgtcctgccagcactgagggctcatccctctgcagagcgcggggtcaccgggaggagacgccatgacgcccgccctcacagccctgctctgccttggtgagatttcaagatggggagggggagatccgagtcttggaggaaccccaccccacacacaagccctggtccatcaggagacctcaaaagctcaggaggcacccgggcggggacctgctcaggcttcagggcaaatgcctcacagggaactctcttccagggctgagtctgggccccaggacccgcatgcaggcagggcccttccccaaacccaccctctgggctgagccaggctctgtgatcagctgggggagccccgtgaccatctggtgtcaggggagcctggaggcccaggagtaccaactggataaagagggaagcccagagccctgggacagaaataacccactggaacccaagaacaaggccagattctccatcccatccatgacacagcaccatgcagggagataccgctgccactattacagctctgcaggctggtcagagcccagcgaccccctggagctggtgatgacaggattctacaacaaacccaccctctcagccctgcccagccctgtggtggcctcaggggggaatatgaccctccgatgtggctcacagaagggatatcaccattttgttctgatgaaggaaggagaacaccagctcccccggaccctggactcacagcagctccacagtggggggttccaggccctgttccctgtgggccccgtgacccccagccacaggtggaggttcacatgctattactattatatgaacaccccccgggtgtggtcccaccccagtgaccccctggagattctgccctcaggcgtgtctaggaagccctccctcctgaccctgcagggccctgtcctggcccctgggcagagcctgaccctccagtgtggctctgatgtcggctacgacagatttgttctgtataaggagggggaacgtgacttcctccagcgccctggccagcagccccaggctgggctctcccaggccaacttcaccctgggccctgtgagcccctcccacgggggccagtacaggtgctatggtgcacacaacctctcctccgagtggtcggcccccagcgaccccctgaacatcctgatggcaggacagatctatgacaccgtctccctgtcagcacagccgggccccacagtggcctcaggagagaacgtgaccctgctgtgtcagtcatggtggcagtttgacactttccttctgaccaaagaaggggcagcccatcccccactgcgtctgagatcaatgtacggagctcataagtaccaggctgaattccccatgagtcctgtgacctcagcccacgcggggacctacaggtgctacggctcacgcagctccaacccccacctgctgtctnnccccagtgagcccctgganctcntggtctcaggacactctggaggctccagcctcccacccacagggccgccctccacacctggtctgggaagatacctggaggttttgattggggtctcggtggccttcgtcctgctgctcttcctcctcctcttcctcctcctccgacgtcagcgtcacagcaaacacaggacatctgaccagagaaagactgatttccagcgtcctgcaggggctgcggagacagagcccaaggacaggggcctgctgaggaggtccagcccagctgctgacgtccaggaagaaaacctctatgctgccgtgaaggacacacagtctgaggacagggtggagctggacagtcagagcccacacgatgaagacccccaggcagtgacgtatgccccggtgaaacactccagtcctaggagagaaatggcctctcctccctcctcactgtctggggaattcctggacacaaaggacagacaggtggaagaggacaggcagatggacactgaggctgctgcatctgaagcctcccaggatgtgacctacgcccagctgcacagcttgacccttagacggaaggcaactgagcctcctccatcccaggaaggggaacctccagctgagcccagcatctacgccactctggccatccactagcccggggggtacgcagaccccacactcagcagaaggagactcaggactgctgaaggcacgggagctgcccccagtggacaccagtgaaccccagtcagcctggacccctaacacagaccatgaggagacgctgggaacttgtgggactcacctgactcaaagatgactaatatcgtcccattttggaaataaagcaacagacttctcaacaatcaatgagttaataacaaaaanacaaaaaacaaaaacagacgtaaaggccgggtgtggtactcaggaggctgagtggggaggattccttgaacacaagaagttaaggctgctgaggctgcagtgagctatgactgtgccactgcactccagcctgtgtgacagagcgagaccttgtctctaaaaaaaaaaacagtgaatgttttaaactgaatgataatgtaaatattatacatcgaacttatgacatgggaaaattaagaagcataaataggccgggcgcggtggctcacgcctataatctcagcactttgggaggctgatgcgggcggatcatgaggtcaggagatcgagaccatcctggctaacacggtgaaaccccgtctctactaaaaatacaaaaaaattagccgggcgtggtggcgagtgcctatagtcccagctactcaggaggctgaggcaggagaatggcatgagcccgggaggcagagcttgcagtgagctgagatcgcaccactgcactccagcctgggcgacagagtgagattccgtctcga

SEQ ID NO: 457300 - DNA, 1373 bp, Homo sapiens
  misc_feature (840)..(840): n is a, c, g, or t
caggaaggcctgtgaggctgcagccaaatgggcaaggtcagagtgaggagcagaggccagaaccacagggagggagcggccagaccctccacggccttagggcgtccctgagattccatcaggaaagggatgtaatcggatcaccccgggaacagtgaggaaaattgactccaggaggtcagggggactcaaggacaccccccaccactgtctctctccagcagagcccacacgatgaagacccccaggcagtgacgtatgccccggtgaaacactccagtcctaggagagaaatggcctctcctccctcctcactgtctggggaattcctggacacaaaggacagacaggtggaagaggacaggcagatggacactgaggtgagtcctttcctctccaggcccccaggcctcccccacccccaccacgttccttacctctcactctcccccgctgcaggctgctgcatctgaagcctcccaggatgtgacctacgcccagctgcacagcttgacccttagacggaaggcaactgagcctcctccatcccaggaaggggaacctccagctgagcccagcatctacgccactctggccatccactagcccggggggtacgcagaccccacactcagcagaaggagactcaggactgctgaaggcacgggagctgcccccagtggacaccagtgaaccccagtcagcctggacccctaacacagaccatgaggagacgctgggaacttgtgggactcacctgactcaaagatgactaatatcgtcccattttggaaataaagcaacagacttctcaacaatcaatgagttaataacaaaaanacaaaaaacaaaaacagacgtaaaggccgggtgtggtactcaggaggctgagtggggaggattccttgaacacaagaagttaaggctgctgaggctgcagtgagctatgactgtgccactgcactccagcctgtgtgacagagcgagaccttgtctctaaaaaaaaaaacagtgaatgttttaaactgaatgataatgtaaatattatacatcgaacttatgacatgggaaaattaagaagcataaataggccgggcgcggtggctcacgcctataatctcagcactttgggaggctgatgcgggcggatcatgaggtcaggagatcgagaccatcctggctaacacggtgaaaccccgtctctactaaaaatacaaaaaaattagccgggcgtggtggcgagtgcctatagtcccagctactcaggaggctgaggcaggagaatggcatgagcccgggaggcagagcttgcagtgagctgagatcgcaccactgcactccagcctgggcgacagagtgagattccgtctcga

SEQ ID NO: 457301 - DNA, 1056 bp, Homo sapiens
cctgcttcaacagtgcttggacggaacccggcgctcgttccccaccccggccggccgcccatagccagccctccgtcacctcttcaccgcaccctcggactgccccaaggcccccgccgccgctccagcgccgcgcagccaccgccgccgccgccgcctctccttagtcgccgccatgacgaccgcgtccacctcgcaggtgcgccagaactaccaccaggactcagaggccgccatcaaccgccagatcaacctggagctctacgcctcctacgtttacctgtccatgtcttactactttgacctcctgacactaacttccttgccttttcccatggcaagagcaagtcatggactctgaactacttcctctcccttttttctatttattttattttattttatatttgtgatggagtctcgctctgtcacccaggctggagtgtggtggtgtgatcttggctcactgcaacctctgcctcccaggttcatgcaattctcctgcctctacctcccaagtagctgggaatacaggtgcccaccaccatgcccggctaatttttgtattcttagtagaggtggggtttcaccatgttggccaggctggtctcttaactccttacctcaaatgatccacccacctcggcctcccaaagtgctgggattatagatgtgagccactgcacccagcccttcctctccctttctctttggggttcccttcacaaacaggtgaggcagctttttcaagggcattccaagcacaaaagaccttgttgtacctaaatactataagggacctgtcattgaggacgaaccatcacagcaagaggaattatctcgtgccgcatcttcgcataactgacaggatccctggcaaggatgtctcaatgcagaaagttggctaagtgaactgcagtatctaccctggacctaaaagaacttgctaatgttttcaagactacaattcagaggctgtctgatttaatctttgcatttacaaaaacacccttttacgtacattaaatgtggaataaaactaaaaaaaaagtgatg

SEQ ID NO: 457302 - DNA, 514 bp, Homo sapiens
aacaaggctacaggctgggagtcactgccgaagtgataagctgtgggtggtgaatgcagagaaggccacaatagtgaaactccatctcaaaaaaaaaaaaaaaaaaagttgtattagaatctggccacacccctttgtgtgtgtattacttagaattgctttagcaacctccatactataacttcaaagtggagtagtggcacagagaccatatggcctgcagaatggaaaatgtcacctgtttggcctcttaccagaaaaatttgccaaccgctcaactagggtgtgatggagaatcccaaggtgtcccttccctcccaaagccactcagggaatcatctgtacccttgtggcctgcattttaacaaacatatacacaaacacattttttaaatttgctagaaatcttccctcccattttcaagtgtggttaatcaattgaccaaaacccagttttctttctttctttctttctttttttgagggtgacagagcaagatcttctgtctcggaa

SEQ ID NO: 457303 - DNA, 1419 bp, Homo sapiens
  misc_feature (3)..(3): n is a, c, g, or t
cgnctaggtacgaggcctgggtggttccgcttccggttctgacggacgcttcggccgtaacgatgatcggagacatcctgctgttcgggacgttgctgatgaatgccggggcggtgctgaactttaagctgaaaaagaaggacacgcagggctttggggaggagtccaggagcccagcacaggtgacaacatccgggaattcttgctgagcctcagatactttcgaatcttcatcgccctgtggaacatcttcatgatgttctgcatgattgtgctgttcggctcttgaatcccagcgatgaaaccaggaactcactttcccgggatgccgagtctccattcctccattcctgatgacttcaagaatgtttttgaccagaaaaccgacaaccttcccagaaagtccaagctcgtggtgggtggaaaagtgttcgccgaggtgtgcatggtttcccagccacgtccctgttttcaaagatagtttcactttggtctctgaattgaaatgctgtctactgaaagggtttcaggagcgtttatgtaaggggctgtgatgaaattgcattccccatagataaaagaaaaatcatttctatccagagatctgagcagaaggattggcttgttagtttaacacagccgtatttttggacattcagtgttacttgctgagtctgacagcctctgggcccggccaggggccctgttaacaaactgctttcacatcccaacagggtctgcttggccactcagtgcagctgcgattaaccctaaaggctttaaggaacgggccacctgtaacagagacaccagccttcctgtatagacactaaattgttagcaagagtgttgagctagttcctggtgaagtgtttccacagaagacatgtggagcagttgtggggatattaagggaaactttcctctgccttgacccctttgttaaataaaatgactttgggagccattcattgtacagttgcaggaatgagagtgattttatgatgtggtacattgggaccatgttctaaaaccttgggtttctgagtctgctttttgagtaggtgattttgaggttgaaaaaccaggggccttcatctaggaaatacagcattttccagaagcttctttgaaagggaatcctggttttgttgccaaaatgaaacgcccggggttggcgctgaatcccacaactgtgtgatttgcttgttgagttttttgttgtctggtttttttgtttgtttgtttataccaataagaatgagcctgaatgttggtggtttttgaaatcctgacttggaggtaaacctggaggaaggaaaaaaagtaaatatgcaggcttttaggactgagtagccttgaaaataaacctcatttctaaaaaaggaaaaaaaaacaaaacaaaagaaaacaacaaca

SEQ ID NO: 457304 - DNA, 2132 bp, Homo sapiens
  misc_feature (3)..(3): n is a, c, g, or t
  misc_feature (1361)..(1361): n is a, c, g, or t
  misc_feature (1856)..(1856): n is a, c, g, or t
  misc_feature (1864)..(1867): n is a, c, g, or t
  misc_feature (1876)..(1876): n is a, c, g, or t
  misc_feature (1888)..(1888): n is a, c, g, or t
  misc_feature (1909)..(1910): n is a, c, g, or t
  misc_feature (1923)..(1923): n is a, c, g, or t
  misc_feature (1926)..(1927): n is a, c, g, or t
  misc_feature (1934)..(1934): n is a, c, g, or t
  misc_feature (1942)..(1942): n is a, c, g, or t
  misc_feature (1957)..(1957): n is a, c, g, or t
  misc_feature (1962)..(1963): n is a, c, g, or t
  misc_feature (1981)..(1981): n is a, c, g, or t
  misc_feature (1992)..(1992): n is a, c, g, or t
  misc_feature (1994)..(1994): n is a, c, g, or t
  misc_feature (2004)..(2004): n is a, c, g, or t
  misc_feature (2007)..(2008): n is a, c, g, or t
  misc_feature (2016)..(2016): n is a, c, g, or t
  misc_feature (2023)..(2023): n is a, c, g, or t
  misc_feature (2028)..(2028): n is a, c, g, or t
  misc_feature (2051)..(2051): n is a, c, g, or t
  misc_feature (2062)..(2063): n is a, c, g, or t
  misc_feature (2065)..(2065): n is a, c, g, or t
  misc_feature (2068)..(2068): n is a, c, g, or t
  misc_feature (2072)..(2072): n is a, c, g, or t
  misc_feature (2076)..(2078): n is a, c, g, or t
  misc_feature (2082)..(2082): n is a, c, g, or t
  misc_feature (2085)..(2086): n is a, c, g, or t
  misc_feature (2090)..(2091): n is a, c, g, or t
  misc_feature (2093)..(2093): n is a, c, g, or t
  misc_feature (2097)..(2097): n is a, c, g, or t
  misc_feature (2108)..(2108): n is a, c, g, or t
  misc_feature (2114)..(2114): n is a, c, g, or t
  misc_feature (2124)..(2124): n is a, c, g, or t
cgnctaggtacgaggcctgggtggttccgcttccggttctgacggacgcttcggccgtaacgatgatcggagacatcctgctgttcgggacgttgctgatgaatgccggggcggtgctgaactttaagctgaaaaagaaggacacgcagggctttggggaggagtccaggagcccagcacaggtgacaacatccgggaattcttgctgagcctcagatactttcgaatcttcatcgccctgtggaacatcttcatgatgttctgcatgattgtgctgttcggctcttgaatcccagcgatgaaaccaggaactcactttcccgggatgccgagtctccattcctccattcctgatgacttcaagaatgtttttgaccagaaaaccgacaaccttcccagaaagtccaagctcgtggtgggtggaaaagtgttcgccgaggtgtgcatggtttcccagccacgtccctgttttcaaagatagtttcactttggtctctgaattgaaatgctgtctactgaaagggtttcaggagcgtttatgtaaggggctgtgatgaaattgcattccccatagataaaagaaaaatcatttctatccagagatctgagcagaaggattggcttgttagtttaacacagccgtatttttggacattcagtgttacttgctgagtctgacagcctctgggcccggccaggggccctgttaacaaactgctttcacatcccaacagggtctgcttggccactcagtgcagctgcgattaaccctaaaggctttaaggaacgggccacctgtaacagagacaccagccttcctgtatagacactaaattgttagcaagagtgttgagctagttcctggtgaagtgtttccacagaagacatgtggagcagttgtggggatattaagggaaactttcctctgccttgacccctttgttaaataaaatgactttgggagccattcattgtacagttgcaggaatgagagtgattttatgatgtggtacattgggaccatgttctaaaaccttgggtttctgagtctgctttttgagtaggtgattttgaggttgaaaaaccaggggccttcatctaggaaatacagcattttccagaagcttctttgaaagggaatcctggttttgttgccaaaatgaaacgcccggggttggcgctgaatcccacaactgtgtgatttgcttgttgagttttttgttgtctggtttttttgtttgtttgtttataccaataagaatgagccgagtgtggtggtacaggcctgtaatcccagttactagggaggctgaggcaggagaatcacttgaacctgggaagcagaggttgtgatgaaccgngattgcaccattgcactccagcctgggccacaagagtgaaactccatctcaaaaaaaaaaaaaaaaaaagttgtattagaatctggccacacccctttgtgtgtgtattacttagaattgctttagcaacctccatactataacttcaaagtggagtagtggcacagagaccatatggcctgcagaatggaaaatgtcacctgtttggcctcttaccagaaaaatttgccaaccgctcaactagggtgtgatggagaatcccaaggtgtcccttccctcccaaagccactcagggaatcatctgtacccttgtggcctgcattttaacaaacatatacacaaacacattttttaaatttgctagaaatcttccctcccattttcaagtgtggttaatcaattgaccaaaacccagttttctttctttctttctttctttttttgagcagcctggacgacagagctagactgtctccaaaggaaaaagttgtactnggccgggnnnngtggctcangcctgtaatccnagcactttgggaggccaaggnnggcggatcatgangtnnggagttngagaccancctggccaacatggngaaannctgtctctactaaaaatncaaaattagcngngtgtggtggnacnngcctgtantcccagntactngggaggctgaggcaggagaatcncttgaacctgnnangcngagnttgnnntganccnngatnncnccantgcactccagnctggcnacagagtganactctctc

SEQ ID NO: 457305 - DNA, 1713 bp, Homo sapiens
  misc_feature (3)..(3): n is a, c, g, or t
cgnctaggtacgaggcctgggtggttccgcttccggttctgacggacgcttcggccgtaacgatgatcggagacatcctgctgttcgggacgttgctgatgaatgccggggcggtgctgaactttaagctgaaaaagaaggacacgcagggctttggggaggagtccaggagcccagcacaggtgacaacatccgggaattcttgctgagcctcagatactttcgaatcttcatcgccctgtggaacatcttcatgatgttctgcatgattgtgctgttcggctcttgaatcccagcgatgaaaccaggaactcactttcccgggatgccgagtctccattcctccattcctgatgacttcaagaatgtttttgaccagaaaaccgacaaccttcccagaaagtccaagctcgtggtgggtggaaaagtgttcgccgaggtgtgcatggtttcccagccacgtccctgttttcaaagatagtttcactttggtctctgaattgaaatgctgtctactgaaagggtttcaggagcgtttatgtaaggggctgtgatgaaattgcattccccatagataaaagaaaaatcatttctatccagagatctgagcagaaggattggcttgttagtttaacacagccgtatttttggacattcagtgttacttgctgagtctgacagcctctgggcccggccaggggccctgttaacaaactgctttcacatcccaacagggtctgcttggccactcagtgcagctgcgattaaccctaaaggctttaaggaacgggccacctgtaacagagacaccagccttcctgtatagacactaaattgttagcaagagtgttgagctagttcctggtgaagtgtttccacagaagacatgtggagcagttgtggggatattaagggaaactttcctctgccttgacccctttgttaaataaaatgactttgggagccattcattgtacagttgcaggaatgagagtgattttatgatgtggtacattgggaccatgttctaaaaccttgggtttctgagtctgctttttgagtaggtgattttgaggttgaaaaaccaggggccttcatctaggaaatacagcattttccagaagcttctttgaaagggaatcctggttttgttgccaaaatgaaacgcccggggttggcgctgaatcccacaactgtgtgatttgcttgttgagttttttgttgtctggtttttttgtttgtttgtttataccaataagaatgagcctgaatgttggtggtttttgaaatcctgacttggaggtaaacctggaggaaggaaaaaaagtaaatatgcaggcttttaggactgagtagccttgaaaataaacctcatttctaaaaaggaccttttgtttatactttttttttttttaaccaagaagtcaatttccaacctgagtccttttgaatttaccctgctggaaaaacctaggattcatttgggaggccatgagaaagaaaagagtcagtggtagagtttccttttgggatttagctcaataaatgatggtcaagaattgggcaagtggggctgcgcgcagcggctcatacctgtaatcccagcactttggacggcgcgaggtaggcggatcacttgcggtcaggagttcgaaactagcctggccaacatggtgaaatcgcatctctactaaaaatagaaaaattagccag

SEQ ID NO: 457306 - DNA, 2824 bp, Homo sapiens
  misc_feature (3)..(3): n is a, c, g, or t
  misc_feature (1361)..(1361): n is a, c, g, or t
cgnctaggtacgaggcctgggtggttccgcttccggttctgacggacgcttcggccgtaacgatgatcggagacatcctgctgttcgggacgttgctgatgaatgccggggcggtgctgaactttaagctgaaaaagaaggacacgcagggctttggggaggagtccaggagcccagcacaggtgacaacatccgggaattcttgctgagcctcagatactttcgaatcttcatcgccctgtggaacatcttcatgatgttctgcatgattgtgctgttcggctcttgaatcccagcgatgaaaccaggaactcactttcccgggatgccgagtctccattcctccattcctgatgacttcaagaatgtttttgaccagaaaaccgacaaccttcccagaaagtccaagctcgtggtgggtggaaaagtgttcgccgaggtgtgcatggtttcccagccacgtccctgttttcaaagatagtttcactttggtctctgaattgaaatgctgtctactgaaagggtttcaggagcgtttatgtaaggggctgtgatgaaattgcattccccatagataaaagaaaaatcatttctatccagagatctgagcagaaggattggcttgttagtttaacacagccgtatttttggacattcagtgttacttgctgagtctgacagcctctgggcccggccaggggccctgttaacaaactgctttcacatcccaacagggtctgcttggccactcagtgcagctgcgattaaccctaaaggctttaaggaacgggccacctgtaacagagacaccagccttcctgtatagacactaaattgttagcaagagtgttgagctagttcctggtgaagtgtttccacagaagacatgtggagcagttgtggggatattaagggaaactttcctctgccttgacccctttgttaaataaaatgactttgggagccattcattgtacagttgcaggaatgagagtgattttatgatgtggtacattgggaccatgttctaaaaccttgggtttctgagtctgctttttgagtaggtgattttgaggttgaaaaaccaggggccttcatctaggaaatacagcattttccagaagcttctttgaaagggaatcctggttttgttgccaaaatgaaacgcccggggttggcgctgaatcccacaactgtgtgatttgcttgttgagttttttgttgtctggtttttttgtttgtttgtttataccaataagaatgagccgagtgtggtggtacaggcctgtaatcccagttactagggaggctgaggcaggagaatcacttgaacctgggaagcagaggttgtgatgaaccgngattgcaccattgcactccagcctgggccacaagagtgaaactccatctcaaaaaaaaaaaaaaaaaaagttgtattagaatctggccacacccctttgtgtgtgtattacttagaattgctttagcaacctccatactataacttcaaagtggagtagtggcacagagaccatatggcctgcagaatggaaaatgtcacctgtttggcctcttaccagaaaaatttgccaaccgctcaactagggtgtgatggagaatcccaaggtgtcccttccctcccaaagccactcagggaatcatctgtacccttgtggcctgcattttaacaaacatatacacaaacacattttttaaatttgctagaaatcttccctcccattttcaagtgtggttaatcaattgaccaaaacccagttttctttctttctttctttctttttttgagctctgtcacccaggctggagtgcagtggcgcaatctcagctcactgcagcctccgcctcccgggttcaggcgattttcttgcctcagcctcccaagtagctgggactacaggcagaaaccccatctctactaaaaatacaaaaattagccaggcgtggtggcacgtacctgtaatcccagctacttggaaggctgacaggagaatcgcttgaacctgggaggcggaggttgcagtgagcagagatcgtgccattgcactccagcctgtgcagcaagagtgaagctctgtctcagaaaaaaaaaaaaaaaaggaacaaacagaaacagaggtttatctgcactccagcctgggcgacagagcaagactccgtctcaaaaaaaaaaaaaaaaatgacatcttactagtggatcctgtttcctgttcattggtgtctagtttacattattatcttggcagttggtggtaaacctaggcaaaagagtgtggactgtgccaagggaactgtggaaatgttaggggaaataaagctttacatctaattagagtacattgtgtgcatgagaaagaaggtggaaaaggtggttgcagcagaaagcaagttggaggtgtagctcagacctgggttctgtgtcttggcccttctgcacctccacgtcctctccctttctctttggggttcccttcacaaacaggtgaggcagctttttcaagggcattccaagcacaaaagaccttgttgtacctaaatactataagggacctgtcattgaggacgaaccatcacagcaagaggaattatctcgtgccgcatcttcgcataactgacaggatccctggcaaggatgtctcaatgcagaaagttggctaagtgaactgcagtatctaccctggacctaaaagaacttgctaatgttttcaagactacaattcagaggctgtctgatttaatctttgcatttacaaaaacacccttttacgtacattaaatgtggaataaaactaaaaaaaaagtgatg

SEQ ID NO: 457307 - DNA, 1837 bp, Homo sapiens
  misc_feature (3)..(3): n is a, c, g, or t
  misc_feature (1361)..(1361): n is a, c, g, or t
cgnctaggtacgaggcctgggtggttccgcttccggttctgacggacgcttcggccgtaacgatgatcggagacatcctgctgttcgggacgttgctgatgaatgccggggcggtgctgaactttaagctgaaaaagaaggacacgcagggctttggggaggagtccaggagcccagcacaggtgacaacatccgggaattcttgctgagcctcagatactttcgaatcttcatcgccctgtggaacatcttcatgatgttctgcatgattgtgctgttcggctcttgaatcccagcgatgaaaccaggaactcactttcccgggatgccgagtctccattcctccattcctgatgacttcaagaatgtttttgaccagaaaaccgacaaccttcccagaaagtccaagctcgtggtgggtggaaaagtgttcgccgaggtgtgcatggtttcccagccacgtccctgttttcaaagatagtttcactttggtctctgaattgaaatgctgtctactgaaagggtttcaggagcgtttatgtaaggggctgtgatgaaattgcattccccatagataaaagaaaaatcatttctatccagagatctgagcagaaggattggcttgttagtttaacacagccgtatttttggacattcagtgttacttgctgagtctgacagcctctgggcccggccaggggccctgttaacaaactgctttcacatcccaacagggtctgcttggccactcagtgcagctgcgattaaccctaaaggctttaaggaacgggccacctgtaacagagacaccagccttcctgtatagacactaaattgttagcaagagtgttgagctagttcctggtgaagtgtttccacagaagacatgtggagcagttgtggggatattaagggaaactttcctctgccttgacccctttgttaaataaaatgactttgggagccattcattgtacagttgcaggaatgagagtgattttatgatgtggtacattgggaccatgttctaaaaccttgggtttctgagtctgctttttgagtaggtgattttgaggttgaaaaaccaggggccttcatctaggaaatacagcattttccagaagcttctttgaaagggaatcctggttttgttgccaaaatgaaacgcccggggttggcgctgaatcccacaactgtgtgatttgcttgttgagttttttgttgtctggtttttttgtttgtttgtttataccaataagaatgagccgagtgtggtggtacaggcctgtaatcccagttactagggaggctgaggcaggagaatcacttgaacctgggaagcagaggttgtgatgaaccgngattgcaccattgcactccagcctgggccacaagagtgaaactccatctcaaaaaaaaaaaaaaaaaaagttgtattagaatctggccacacccctttgtgtgtgtattacttagaattgctttagcaacctccatactataacttcaaagtggagtagtggcacagagaccatatggcctgcagaatggaaaatgtcacctgtttggcctcttaccagaaaaatttgccaaccgctcaactagggtgtgatggagaatcccaaggtgtcccttccctcccaaagccactcagggaatcatctgtacccttgtggcctgcattttaacaaacatatacacaaacacattttttaaatttgctagaaatcttccctcccattttcaagtgtggttaatcaattgaccaaaacccagttttctttctttctttctttctttttttgagggtgacagagcaagatcttctgtctcggaa

SEQ ID NO: 457308 - DNA, 2235 bp, Homo sapiens
  misc_feature (3)..(3): n is a, c, g, or t
  misc_feature (1361)..(1361): n is a, c, g, or t
cgnctaggtacgaggcctgggtggttccgcttccggttctgacggacgcttcggccgtaacgatgatcggagacatcctgctgttcgggacgttgctgatgaatgccggggcggtgctgaactttaagctgaaaaagaaggacacgcagggctttggggaggagtccaggagcccagcacaggtgacaacatccgggaattcttgctgagcctcagatactttcgaatcttcatcgccctgtggaacatcttcatgatgttctgcatgattgtgctgttcggctcttgaatcccagcgatgaaaccaggaactcactttcccgggatgccgagtctccattcctccattcctgatgacttcaagaatgtttttgaccagaaaaccgacaaccttcccagaaagtccaagctcgtggtgggtggaaaagtgttcgccgaggtgtgcatggtttcccagccacgtccctgttttcaaagatagtttcactttggtctctgaattgaaatgctgtctactgaaagggtttcaggagcgtttatgtaaggggctgtgatgaaattgcattccccatagataaaagaaaaatcatttctatccagagatctgagcagaaggattggcttgttagtttaacacagccgtatttttggacattcagtgttacttgctgagtctgacagcctctgggcccggccaggggccctgttaacaaactgctttcacatcccaacagggtctgcttggccactcagtgcagctgcgattaaccctaaaggctttaaggaacgggccacctgtaacagagacaccagccttcctgtatagacactaaattgttagcaagagtgttgagctagttcctggtgaagtgtttccacagaagacatgtggagcagttgtggggatattaagggaaactttcctctgccttgacccctttgttaaataaaatgactttgggagccattcattgtacagttgcaggaatgagagtgattttatgatgtggtacattgggaccatgttctaaaaccttgggtttctgagtctgctttttgagtaggtgattttgaggttgaaaaaccaggggccttcatctaggaaatacagcattttccagaagcttctttgaaagggaatcctggttttgttgccaaaatgaaacgcccggggttggcgctgaatcccacaactgtgtgatttgcttgttgagttttttgttgtctggtttttttgtttgtttgtttataccaataagaatgagccgagtgtggtggtacaggcctgtaatcccagttactagggaggctgaggcaggagaatcacttgaacctgggaagcagaggttgtgatgaaccgngattgcaccattgcactccagcctgggccacaagagtgaaactccatctcaaaaaaaaaaaaaaaaaaagttgtattagaatctggccacacccctttgtgtgtgtattacttagaattgctttagcaacctccatactataacttcaaagtggagtagtggcacagagaccatatggcctgcagaatggaaaatgtcacctgtttggcctcttaccagaaaaatttgccaaccgctcaactagggtgtgatggagaatcccaaggtgtcccttccctcccaaagccactcagggaatcatctgtacccttgtggcctgcattttaacaaacatatacacaaacacattttttaaatttgctagaaatcttccctcccattttcaagtgtggttaatcaattgaccaaaacccagttttctttctttctttctttctttttttgagctctgtcacccaggctggagtgcagtggcgcaatctcagctcactgcagcctccgcctcccgggttcaggcgattttcttgcctcagcctcccaagtagctgggactacaggcagaaaccccatctctactaaaaatacaaaaattagccaggcgtggtggcacgtacctgtaatcccagctacttggaaggctgacaggagaatcgcttgaacctgggaggcggaggttgcagtgagcagagatcgtgctgctgctaaaaaacacaaaaattagctgggcgtggtgacgggtgcctgtaatcccagatactcaggaggctgaggcaggagaatcgcttgaacccggaaagtggaggttgcattgagctgagattgagccattgcactccagcctgggcaacaagagcaaaactccatctcaaaaaaa

SEQ ID NO: 457309 - DNA, 1843 bp, Homo sapiens
  misc_feature (3)..(3): n is a, c, g, or t
  misc_feature (1361)..(1361): n is a, c, g, or t
cgnctaggtacgaggcctgggtggttccgcttccggttctgacggacgcttcggccgtaacgatgatcggagacatcctgctgttcgggacgttgctgatgaatgccggggcggtgctgaactttaagctgaaaaagaaggacacgcagggctttggggaggagtccaggagcccagcacaggtgacaacatccgggaattcttgctgagcctcagatactttcgaatcttcatcgccctgtggaacatcttcatgatgttctgcatgattgtgctgttcggctcttgaatcccagcgatgaaaccaggaactcactttcccgggatgccgagtctccattcctccattcctgatgacttcaagaatgtttttgaccagaaaaccgacaaccttcccagaaagtccaagctcgtggtgggtggaaaagtgttcgccgaggtgtgcatggtttcccagccacgtccctgttttcaaagatagtttcactttggtctctgaattgaaatgctgtctactgaaagggtttcaggagcgtttatgtaaggggctgtgatgaaattgcattccccatagataaaagaaaaatcatttctatccagagatctgagcagaaggattggcttgttagtttaacacagccgtatttttggacattcagtgttacttgctgagtctgacagcctctgggcccggccaggggccctgttaacaaactgctttcacatcccaacagggtctgcttggccactcagtgcagctgcgattaaccctaaaggctttaaggaacgggccacctgtaacagagacaccagccttcctgtatagacactaaattgttagcaagagtgttgagctagttcctggtgaagtgtttccacagaagacatgtggagcagttgtggggatattaagggaaactttcctctgccttgacccctttgttaaataaaatgactttgggagccattcattgtacagttgcaggaatgagagtgattttatgatgtggtacattgggaccatgttctaaaaccttgggtttctgagtctgctttttgagtaggtgattttgaggttgaaaaaccaggggccttcatctaggaaatacagcattttccagaagcttctttgaaagggaatcctggttttgttgccaaaatgaaacgcccggggttggcgctgaatcccacaactgtgtgatttgcttgttgagttttttgttgtctggtttttttgtttgtttgtttataccaataagaatgagccgagtgtggtggtacaggcctgtaatcccagttactagggaggctgaggcaggagaatcacttgaacctgggaagcagaggttgtgatgaaccgngattgcaccattgcactccagcctgggccacaagagtgaaactccatctcaaaaaaaaaaaaaaaaaaagttgtattagaatctggccacacccctttgtgtgtgtattacttagaattgctttagcaacctccatactataacttcaaagtggagtagtggcacagagaccatatggcctgcagaatggaaaatgtcacctgtttggcctcttaccagaaaaatttgccaaccgctcaactagggtgtgatggagaatcccaaggtgtcccttccctcccaaagccactcagggaatcatctgtacccttgtggcctgcattttaacaaacatatacacaaacacattttttaaatttgctagaaatcttccctcccattttcaagtgtggttaatcaattgaccaaaacccagttttctttctttctttctttctttttttgagcctgggcaacaagagcaaaactccatctcaaaaaaa

SEQ ID NO: 457310 - DNA, 967 bp, Homo sapiens
  misc_feature (3)..(3): n is a, c, g, or t
cgnctaggtacgaggcctgggtggttccgcttccggttctgacggacgcttcggccgtaacgatgatcggagacatcctgctgttcgggacgttgctgatgaatgccggggcggtgctgaactttaagctgaaaaagaaggacacgcagggctttggggaggagtccaggagcccagcacaggtgacaacatccgggaattcttgctgagcctcagatactttcgaatcttcatcgccctgtggaacatcttcatgatgttctgcatgattgtgctgttcggctcttgaatcccagcgatgaaaccaggaactcactttcccgggatgccgagtctccattcctccattcctgatgacttcaagaatgtttttgaccagaaaaccgacaaccttcccagaaagtccaagctcgtggtgggtggaaaagtgttcgccgaggtgtgcatggtttcccagccacgtccctgttttcaaagatagtttcactttggtctctgaattgaaatgctgtctactgaaagggtttcaggagcgtttatgtaaggggctgtgatgaaattgcattccccatagataaaagaaaaatcatttctatccagagatctgagcagaaggattggcttgttagtttaacacagccgtatttttggacattcagtgttacttgctgagtctgacagcctctgggcccggccaggggccctgttaacaaactgctttcacatcccaacagggtctgcttggccactcagtgcagctgcgattaaccctaaaggctttaaggaacgggccacctgtaacagagacaccagccttcctgtatagacactaaattgttagcaagagtgttgagctagttcctggtgaagtgtttccacagaagacatgtggagcagttgtggggatattaagggaaactttcctctgccttgacccctttgttaaataaaatgactttgggagcca

SEQ ID NO: 457311 - DNA, 992 bp, Homo sapiens
  misc_feature (3)..(3): n is a, c, g, or t
cgnctaggtacgaggcctgggtggttccgcttccggttctgacggacgcttcggccgtaacgatgatcggagacatcctgctgttcgggacgttgctgatgaatgccggggcggtgctgaactttaagctgaaaaagaaggacacgcagggctttggggaggagtccaggagcccagcacaggtgacaacatccgggaattcttgctgagcctcagatactttcgaatcttcatcgccctgtggaacatcttcatgatgttctgcatgattgtgctgttcggctcttgaatcccagcgatgaaaccaggaactcactttcccgggatgccgagtctccattcctccattcctgatgacttcaagaatgtttttgaccagaaaaccgacaaccttcccagaaagtccaagctcgtggtgggtggaaaagtgttcgccgaggtgtgcatggtttcccagccacgtccctgttttcaaagatagtttcactttggtctctgaattgaaatgctgtctactgaaagggtttcaggagcgtttatgtaaggggctgtgatgaaattgcattccccatagataaaagaaaaatcatttctatccagagatctgagcagaaggattggcttgttagtttaacacagccgtatttttggacattcagtgttacttgctgagtctgacagcctctgggcccggccaggggccctgttaacaaactgctttcacatcccaacagggtctgcttggccactcagtgcagctgcgattaaccctaaaggctttaaggaacgggccacctgtaacagagacaccagccttcctgtatagacactaaattgttagcaagagtgttgagctagttcctggtgaagtgtttccacagaagacatgtggagcagttgtggggatattaagggaaactttcctctgccttgacccctttgttaaataaaatgactttgggagccaaccgtggacatagtggtaccgagcc

SEQ ID NO: 457312 - DNA, 1293 bp, Homo sapiens
  misc_feature (3)..(3): n is a, c, g, or t
cgnctaggtacgaggcctgggtggttccgcttccggttctgacggacgcttcggccgtaacgatgatcggagacatcctgctgttcgggacgttgctgatgaatgccggggcggtgctgaactttaagctgaaaaagaaggacacgcagggctttggggaggagtccaggagcccagcacaggctgttcggctcttgaatcccagcgatgaaaccaggaactcactttcccgggatgccgagtctccattcctccattcctgatgacttcaagaatgtttttgaccagaaaaccgacaaccttcccagaaagtccaagctcgtggtgggtggaaaagtgttcgccgaggtgtgcatggtttcccagccacgtccctgttttcaaagatagtttcactttggtctctgaattgaaatgctgtctactgaaagggtttcaggagcgtttatgtaaggggctgtgatgaaattgcattccccatagataaaagaaaaatcatttctatccagagatctgagcagaaggattggcttgttagtttaacacagccgtatttttggacattcagtgttacttgctgagtctgacagcctctgggcccggccaggggccctgttaacaaactgctttcacatcccaacagggtctgcttggccactcagtgcagctgcgattaaccctaaaggctttaaggaacgggccacctgtaacagagacaccagccttcctgtatagacactaaattgttagcaagagtgttgagctagttcctggtgaagtgtttccacagaagacatgtggagcagttgtggggatattaagggaaactttcctctgccttgacccctttgttaaataaaatgactttgggagccattcattgtacagttgcaggaatgagagtgattttatgatgtggtacattgggaccatgttctaaaaccttgggtttctgagtctgctttttgagtaggtgattttgaggttgaaaaaccaggggccttcatctaggaaatacagcattttccagaagcttctttgaaagggaatcctggttttgttgccaaaatgaaacgcccggggttggcgctgaatcccacaactgtgtgatttgcttgttgagttttttgttgtctggtttttttgtttgtttgtttataccaataagaatgagcctgaatgttggtggtttttgaaatcctgacttggaggtaaacctggaggaaggaaaaaaagtaaatatgcaggcttttaggactgagtagccttgaaaataaacctcatttctaaaaa

SEQ ID NO: 457313 - DNA, 1219 bp, Homo sapiens
gattgcctgagactgggtaatttataaacaaaagaggttgcagtgagcagagatcgtgctgctgctaaaaaacacaaaaattagctgggcgtggtgacgggtgcctgtgctgttcggctcttgaatcccagcgatgaaaccaggaactcactttcccgggatgccgagtctccattcctccattcctgatgacttcaagaatgtttttgaccagaaaaccgacaaccttcccagaaagtccaagctcgtggtgggtggaaaagtgttcgccgaggtgtgcatggtttcccagccacgtccctgttttcaaagatagtttcactttggtctctgaattgaaatgctgtctactgaaagggtttcaggagcgtttatgtaaggggctgtgatgaaattgcattccccatagataaaagaaaaatcatttctatccagagatctgagcagaaggattggcttgttagtttaacacagccgtatttttggacattcagtgttacttgctgagtctgacagcctctgggcccggccaggggccctgttaacaaactgctttcacatcccaacagggtctgcttggccactcagtgcagctgcgattaaccctaaaggctttaaggaacgggccacctgtaacagagacaccagccttcctgtatagacactaaattgttagcaagagtgttgagctagttcctggtgaagtgtttccacagaagacatgtggagcagttgtggggatattaagggaaactttcctctgccttgacccctttgttaaataaaatgactttgggagccattcattgtacagttgcaggaatgagagtgattttatgatgtggtacattgggaccatgttctaaaaccttgggtttctgagtctgctttttgagtaggtgattttgaggttgaaaaaccaggggccttcatctaggaaatacagcattttccagaagcttctttgaaagggaatcctggttttgttgccaaaatgaaacgcccggggttggcgctgaatcccacaactgtgtgatttgcttgttgagttttttgttgtctggtttttttgtttgtttgtttataccaataagaatgagcctgaatgttggtggtttttgaaatcctgacttggaggtaaacctggaggaaggaaaaaaagtaaatatgcaggcttttaggactgagtagccttgaaaataaacctcatttctaaaaa

SEQ ID NO: 457314 - DNA, 1330 bp, Homo sapiens
  misc_feature (3)..(3): n is a, c, g, or t
cgnctaggtacgaggcctgggtggttccgcttccggttctgacggacgcttcggccgtaacgatgatcggagacatcctgctgttcgggacgttgctgatgaatgccggggcggtgctgaactttaagctgaaaaagaaggacacgcagggctttggggaggagtccaggagcccagcacaggtgacaacatccgggaattcttgctgagcctcagatactttcgaatcttcatcgccctgtggaacatcttcatgatgttctgcatgattgtgctgttcggctcttgaatcccagcgatgaaaccaggaactcactttcccgggatgccgagtctccattcctccattcctgatgacttcaagaatgtttttgaccagaaaaccgacaaccttcccagaaagtccaagctcgtggtgggtggaaaagtgttcgccgaggtgtgcatggtttcccagccacgtccctgttttcaaagatagtttcactttggtctctgaattgaaatgctgtctactgaaagggtttcaggagcgtttatgtaaggggctgtgatgaaattgcattccccatagataaaagacagccgtatttttggacattcagtgttacttgctgagtctgacagcctctgggcccggccaggggccctgttaacaaactgctttcacatcccaacagggtctgcttggccactcagtgcagctgcgattaaccctaaaggctttaaggaacgggccacctgtaacagagacaccagccttcctgtatagacactaaattgttagcaagagtgttgagctagttcctggtgaagtgtttccacagaagacatgtggagcagttgtggggatattaagggaaactttcctctgccttgacccctttgttaaataaaatgactttgggagccattcattgtacagttgcaggaatgagagtgattttatgatgtggtacattgggaccatgttctaaaaccttgggtttctgagtctgctttttgagtaggtgattttgaggttgaaaaaccaggggccttcatctaggaaatacagcattttccagaagcttctttgaaagggaatcctggttttgttgccaaaatgaaacgcccggggttggcgctgaatcccacaactgtgtgatttgcttgttgagttttttgttgtctggtttttttgtttgtttgtttataccaataagaatgagcctgaatgttggtggtttttgaaatcctgacttggaggtaaacctggaggaaggaaaaaaagtaaatatgcaggcttttaggactgagtagccttgaaaataaacctcatttctaaaaa

SEQ ID NO: 457315 - DNA, 1078 bp, Homo sapiens
  misc_feature (3)..(3): n is a, c, g, or t
cgnctaggtacgaggcctgggtggttccgcttccggttctgacggacgcttcggccgtaacgatgatcggagacatcctgctgttcgggacgttgctgatgaatgccggggcggtgctgaactttaagctgaaaaagaaggacacgcagggctttggggaggagtccaggagcccagcacaggtgacaacatccgggaattcttgctgagcctcagatactttcgaatcttcatcgccctgtggaacatcttcatgatgttctgcatgattgtgctgttcggctcttgaatcccagcgatgaaaccaggaactcactttcccgggatgccgagtctccattcctccattcctgatgacttcaagaatgtttttgaccagaaaaccgacaaccttcccagaaagtccaagctcgtggtgggtggaaaagggtctgcttggccactcagtgcagctgcgattaaccctaaaggctttaaggaacgggccacctgtaacagagacaccagccttcctgtatagacactaaattgttagcaagagtgttgagctagttcctggtgaagtgtttccacagaagacatgtggagcagttgtggggatattaagggaaactttcctctgccttgacccctttgttaaataaaatgactttgggagccattcattgtacagttgcaggaatgagagtgattttatgatgtggtacattgggaccatgttctaaaaccttgggtttctgagtctgctttttgagtaggtgattttgaggttgaaaaaccaggggccttcatctaggaaatacagcattttccagaagcttctttgaaagggaatcctggttttgttgccaaaatgaaacgcccggggttggcgctgaatcccacaactgtgtgatttgcttgttgagttttttgttgtctggtttttttgtttgtttgtttataccaataagaatgagcctgaatgttggtggtttttgaaatcctgacttggaggtaaacctggaggaaggaaaaaaagtaaatatgcaggcttttaggactgagtagccttgaaaataaacctcatttctaaaaa

SEQ ID NO: 457316 - DNA, 1054 bp, Homo sapiens
  misc_feature (3)..(3): n is a, c, g, or t
cgnctaggtacgaggcctgggtggttccgcttccggttctgacggacgcttcggccgtaacgatgatcggagacatcctgctgttcgggacgttgctgatgaatgccggggcggtgctgaactttaagctgaaaaagaaggacacgcagggctttggggaggagtccaggagcccagcacaggtgacaacatccgggaattcttgctgagcctcagatactttcgaatcttcatcgccctgtggaacatcttcatgatgttctgcatgattgtgctgttcggctcttgaatcccagcgatgaaaccaggaactcactttcccgggatgccgagtctccattcctccattcctgatgacttcaagaatgtttttgaccagaaaaccgacaaccttcccagaaagtccaagctcgtggtgggtggaaaagtgttcgccgaggtgtgcatggtttcccagccacgtccctgtaacagagacaccagccttcctgtatagacactaaattgttagcaagagtgttgagctagttcctggtgaagtgtttccacagaagacatgtggagcagttgtggggatattaagggaaactttcctctgccttgacccctttgttaaataaaatgactttgggagccattcattgtacagttgcaggaatgagagtgattttatgatgtggtacattgggaccatgttctaaaaccttgggtttctgagtctgctttttgagtaggtgattttgaggttgaaaaaccaggggccttcatctaggaaatacagcattttccagaagcttctttgaaagggaatcctggttttgttgccaaaatgaaacgcccggggttggcgctgaatcccacaactgtgtgatttgcttgttgagttttttgttgtctggtttttttgtttgtttgtttataccaataagaatgagcctgaatgttggtggtttttgaaatcctgacttggaggtaaacctggaggaaggaaaaaaagtaaatatgcaggcttttaggactgagtagccttgaaaataaacctcatttctaaaaa

SEQ ID NO: 457317 - DNA, 987 bp, Homo sapiens
  misc_feature (3)..(3): n is a, c, g, or t
cgnctaggtacgaggcctgggtggttccgcttccggttctgacggacgcttcggccgtaacgatgatcggagacatcctgctgttcgggacgttgctgatgaatgccggggcggtgctgaactttaagctgaaaaagaaggacacgcagggctttggggaggagtccaggagcccagcacaggctgttcggctcttgaatcccagcgatgaaaccaggaactcactttcccgggatgccgagtctccattcctccattcctgatgacttcaagaatgtttttgaccagaaaaccgacaaccttcccagaaagtccaagctcgtggtgggtggaaaagggtctgcttggccactcagtgcagctgcgattaaccctaaaggctttaaggaacgggccacctgtaacagagacaccagccttcctgtatagacactaaattgttagcaagagtgttgagctagttcctggtgaagtgtttccacagaagacatgtggagcagttgtggggatattaagggaaactttcctctgccttgacccctttgttaaataaaatgactttgggagccattcattgtacagttgcaggaatgagagtgattttatgatgtggtacattgggaccatgttctaaaaccttgggtttctgagtctgctttttgagtaggtgattttgaggttgaaaaaccaggggccttcatctaggaaatacagcattttccagaagcttctttgaaagggaatcctggttttgttgccaaaatgaaacgcccggggttggcgctgaatcccacaactgtgtgatttgcttgttgagttttttgttgtctggtttttttgtttgtttgtttataccaataagaatgagcctgaatgttggtggtttttgaaatcctgacttggaggtaaacctggaggaaggaaaaaaagtaaatatgcaggcttttaggactgagtagccttgaaaataaacctcatttctaaaaa

SEQ ID NO: 457318 - DNA, 918 bp, Homo sapiens
tgtaattctccctctgcaggacgttgctgatgaatgccggggcggtgctgaactttaagctgaaaaagaaggacacgcagggctttggggaggagtccaggagcccagcacaggctgttcggctcttgaatcccagcgatgaaaccaggaactcactttcccgggatgccgagtctccattcctccattcctgatgacttcaagaatgtttttgaccagaaaaccgacaaccttcccagaaagtccaagctcgtggtgggtggaaaagggtctgcttggccactcagtgcagctgcgattaaccctaaaggctttaaggaacgggccacctgtaacagagacaccagccttcctgtatagacactaaattgttagcaagagtgttgagctagttcctggtgaagtgtttccacagaagacatgtggagcagttgtggggatattaagggaaactttcctctgccttgacccctttgttaaataaaatgactttgggagccattcattgtacagttgcaggaatgagagtgattttatgatgtggtacattgggaccatgttctaaaaccttgggtttctgagtctgctttttgagtaggtgattttgaggttgaaaaaccaggggccttcatctaggaaatacagcattttccagaagcttctttgaaagggaatcctggttttgttgccaaaatgaaacgcccggggttggcgctgaatcccacaactgtgtgatttgcttgttgagttttttgttgtctggtttttttgtttgtttgtttataccaataagaatgagcctgaatgttggtggtttttgaaatcctgacttggaggtaaacctggaggaaggaaaaaaagtaaatatgcaggcttttaggactgagtagccttgaaaataaacctcatttctaaaaa

SEQ ID NO: 457319 - DNA, 1414 bp, Homo sapiens
  misc_feature (3)..(3): n is a, c, g, or t
cgnctaggtacgaggcctgggtggttccgcttccggttctgacggacgcttcggccgtaacgatgatcggagacatcctgctgttcgggacgttgctgatgaatgccggggcggtgctgaactttaagctgaaaaagaaggacacgcagggctttggggaggagtccaggagcccagcacaggtgacaacatccgggaattcttgctgagcctcagatactttcgaatcttcatcgccctgtggaacatcttcatgatgttctgcatgattgtgctgttcggctcttgaatcccagcgatgaaaccaggaactcactttcccgggatgccgagtctccattcctccattcctgatgacttcaagaatgtttttgaccagaaaaccgacaaccttcccagaaagtccaagctcgtggtgggtggaaaaggggcttgcttctgacatgtctgatgagcgcattcctgctgttgctcctggctattacaaggtgtcgctgtggaagactattcctgtacagctgtgtgaacctgcctcgtcacggcttcctctgcagtgctcttgaatatcccggttcctgcttaggccacagcagtgagtccagggagaagcatccttctactccctcactgtccaggttggctgaagatgctctgcacttgacctcctgacactaacttccttgccttttcccatggcaagagcaagtcatggactctgaactacttcctctcccttttttctatttattttattttattttatatttgtgatggagtctcgctctgtcacccaggctggagtgtggtggtgtgatcttggctcactgcaacctctgcctcccaggttcatgcaattctcctgcctctacctcccaagtagctgggaatacaggtgcccaccaccatgcccggctaatttttgtattcttagtagaggtggggtttcaccatgttggccaggctggtctcttaactccttacctcaaatgatccacccacctcggcctcccaaagtgctgggattatagatgtgagccactgcacccagcccttcctctccctttctctttggggttcccttcacaaacaggtgaggcagctttttcaagggcattccaagcacaaaagaccttgttgtacctaaatactataagggacctgtcattgaggacgaaccatcacagcaagaggaattatctcgtgccgcatcttcgcataactgacaggatccctggcaaggatgtctcaatgcagaaagttggctaagtgaactgcagtatctaccctggacctaaaagaacttgctaatgttttcaagactacaattcagaggctgtctgatttaatctttgcatttacaaaaacacccttttacgtacattaaatgtggaataaaactaaaaaaaaagtgatg

SEQ ID NO: 457320 - DNA, 876 bp, Homo sapiens
  misc_feature (3)..(3): n is a, c, g, or t
cgnctaggtacgaggcctgggtggttccgcttccggttctgacggacgcttcggccgtaacgatgatcggagacatcctgctgttcgggacgttgctgatgaatgccggggcggtgctgaactttaagctgaaaaagaaggacacgcagggctttggggaggagtccaggagcccagcacaggctgttcggctcttgaatcccagcgatgaaaccaggaactcactttcccgggatgccgagtctccattcctccattcctgatgacttcaagaatgtttttgaccagaaaaccgacaaccttcccagaaagtccaagctcgtggtgggtggaaaagtgttcgccgaggtgtgcatggtttcccagccacgtccctgttttcaaagatagtttcactttggtctctgaattgaaatgctgtctactgaaagggtttcaggagcgtttatgtaaggggctgtgatgaaattgcattccccatagataaaagaaaaatcatttctatccagagatctgagcagaaggattggcttgttagtttaacacagccgtatttttggacattcagtgttacttgctgagtctgacagcctctgggcccggccaggggccctgttaacaaactgctttcacatcccaacagggtctgcttggccactcagtgcagctgcgattaaccctaaaggctttaaggaacgggccacctgtaacagagacaccagccttcctgtatagacactaaattgttagcaagagtgttgagctagttcctggtgaagtgtttccacagaagacatgtggagcagttgtggggatattaagggaaactttcctctgccttgacccctttgttaaataaaatgactttgggagcca

SEQ ID NO: 457321 - DNA, 1285 bp, Homo sapiens
  misc_feature (3)..(3): n is a, c, g, or t
cgnctaggtacgaggcctgggtggttccgcttccggttctgacggacgcttcggccgtaacgatgatcggagacatcctgctgttcgggacgttgctgatgaatgccggggcggtgctgaactttaagctgaaaaagaaggacacgcagggctttggggaggagtccaggagcccagcacaggctgttcggctcttgaatcccagcgatgaaaccaggaactcactttcccgggatgccgagtctccattcctccattcctgatgacttcaagaatgtttttgaccagaaaaccgacaaccttcccagaaagtccaagctcgtggtgggtggaaaagtgttgctcctggctattacaaggtgtcgctgtggaagactattcctgtacagctgtgtgaacctgcctcgtcacggcttcctctgcagtgctcttgaatatcccggttcctgcttaggccacagcagtgagtccagggagaagcatccttctactccctcactgtccaggttggctgaagatgctctgcacttgacctcctgacactaacttccttgccttttcccatggcaagagcaagtcatggactctgaactacttcctctcccttttttctatttattttattttattttatatttgtgatggagtctcgctctgtcacccaggctggagtgtggtggtgtgatcttggctcactgcaacctctgcctcccaggttcatgcaattctcctgcctctacctcccaagtagctgggaatacaggtgcccaccaccatgcccggctaatttttgtattcttagtagaggtggggtttcaccatgttggccaggctggtctcttaactccttacctcaaatgatccacccacctcggcctcccaaagtgctgggattatagatgtgagccactgcacccagcccttcctctccctttctctttggggttcccttcacaaacaggtgaggcagctttttcaagggcattccaagcacaaaagaccttgttgtacctaaatactataagggacctgtcattgaggacgaaccatcacagcaagaggaattatctcgtgccgcatcttcgcataactgacaggatccctggcaaggatgtctcaatgcagaaagttggctaagtgaactgcagtatctaccctggacctaaaagaacttgctaatgttttcaagactacaattcagaggctgtctgatttaatctttgcatttacaaaaacacccttttacgtacattaaatgtggaataaaactaaaaaaaaagtgatg

SEQ ID NO: 457322 - DNA, 661 bp, Homo sapiens
  misc_feature (3)..(3): n is a, c, g, or t
cgnctaggtacgaggcctgggtggttccgcttccggttctgacggacgcttcggccgtaacgatgatcggagacatcctgctgttcgggacgttgctgatgaatgccggggcggtgctgaactttaagctgaaaaagaaggacacgcagggctttggggaggagtccaggagcccagcacaggtgacaacatccgggaattcttgctgagcctcagatactttcgaatcttcatcgccctgtggaacatcttcatgatgttctgcatgattgtgctgttcggctcttgaatcccagcgatgaaaccaggaactcactttcccgggatgccgagtctccattcctccattcctgatgacttcaagaatgtttttgaccagaaaaccgacaaccttcccagaaagtccaagctcgtggtgggtggaaaagggtctgcttggccactcagtgcagctgcgattaaccctaaaggctttaaggaacgggccacctgtaacagagacaccagccttcctgtatagacactaaattgttagcaagagtgttgagctagttcctggtgaagtgtttccacagaagacatgtggagcagttgtggggatattaagggaaactttcctctgccttgacccctttgttaaataaaatgactttgggagcca

SEQ ID NO: 457323 - DNA, 878 bp, Homo sapiens
  misc_feature (3)..(3): n is a, c, g, or t
cgnctaggtacgaggcctgggtggttccgcttccggttctgacggacgcttcggccgtaacgatgatcggagacatcctgctgttcgggacgttgctgatgaatgccggggcggtgctgaactttaagctgaaaaagaaggacacgcagggctttggggaggagtccaggagcccagcacaggtgacaacatccgggaattcttgctgagcctcagatactttcgaatcttcatcgccctgtggaacatcttcatgatgttctgcatgattgtgctgagaaaactcaagcagattgcctttccatctagcactggggccataactctgatactactgttaacgaattgtgagatttgctgtaaatggatttaggaaaagacacgacgggagaatctggtgttcttggcctctgtgggtccatccctgtatgcttcccccagaaagagagaggacaaaaagttgtctgtcctgagtgattgagactccgaatgtggggttgctgtccagtctgcgtgccaccccagtggctgtttgcgaagatgcttccaggacataggagatctggggaggatggcatttcaccctcatcacaaggaccgtgatgtattcccaggaagactgttgccaaggtatcctacctggcagagaggatctgagagcatgtatgagacttgcctaggaacaaagaaggcttgtgaggagatcaaggaacttacatgaaattgtaggaacggccaggggcagtggctcaggcctgtaatcccagtactttgggaggccaaggtgggagaattgcttgagcccaggagttcaagaccagcctgggcagcatggtgaaaccctgtctttaccaaaaataaaaaaattagccgagtgt

SEQ ID NO: 457324 - DNA, 1426 bp, Homo sapiens
atcattcttttttgtttgtttgagacagtctggacgacagagctagactgtctccaaaagaaaaagttgtactgggaccgggcacagtggcccacctcagcctcctgaagttttgggattacaggcgtgagctgctgcaactggcctctttctcttgatagttagacgaaagacccctctcaggctccctgagactcctcagaacagcagaacagcagcagtgcgatgttggataatgagatctgctctcttctgaagtggttagatttgaaaagccagcgaagctgtcattagcaaggcattttcttttcatttcaaccatttcattatatcctttaccaaatttgagtttatgaaatatttgacaggcctcctgatgttttcctatgttgatgaaagacggatgctgtttgtgtaaaaggaaaaggcatgctataaaaagaaaaagaaggataaaaagggccgggcagggaggctcatgcctgtaatcccagaagttcgagaccagcctggccaacatggtgaaaccccatctctactaaaaatacaaaaattagccaggcgtggtggcacgtacctgtaatcccagctacttggaaggctgacaggagaatcgcttgaacctgggaggcggaggttgcagtgagcagagatcgtgccattgcactccagcctgtgcagcaagagtgaagctctgtctcagaaaaaaaaaaaaaaaaggaacaaacagaaacagaggtttatctgcactccagcctgggcgacagagcaagactccgtctcaaaaaaaaaaaaaaaaatgacatcttactagtggatcctgtttcctgttcattggtgtctagtttacattattatcttggcagttggtggtaaacctaggcaaaagagtgtggactgtgccaagggaactgtggaaatgttaggggaaataaagctttacatctaattagagtacattgtgtgcatgagaaagaaggtggaaaaggtggttgcagcagaaagcaagttggaggtgtagctcagacctgggttctgtgtcttggcccttctgcacctccacgtcctctccctttctctttggggttcccttcacaaacaggtgaggcagctttttcaagggcattccaagcacaaaagaccttgttgtacctaaatactataagggacctgtcattgaggacgaaccatcacagcaagaggaattatctcgtgccgcatcttcgcataactgacaggatccctggcaaggatgtctcaatgcagaaagttggctaagtgaactgcagtatctaccctggacctaaaagaacttgctaatgttttcaagactacaattcagaggctgtctgatttaatctttgcatttacaaaaacacccttttacgtacattaaatgtggaataaaactaaaaaaaaagtgatg

SEQ ID NO: 457325 - DNA, 1378 bp, Homo sapiens
aacaaggctacaggctgggagtcactgccgaagtgataagctgtgggtggtgaatgcagagaaggccacaatgtacagcacctaccctgggagtgttcacttggggttcatgttggaacccattttgcttcctccaccattgcacattgaaggagaatgtatttttgcacgcgcttctcattgcccttcatgtacatctgctctagggcaggagtcagcaaactacagcccagagggcatgtctggcccacggcttgtttttgtaaataaagttttattggagccgggtgcggtggctcacaactgtaatccccacactttgggaagctgagccaggcgatcccttattagcctgaccgctgtggcaaaatcctttctctactaaaaatacaaaaactagccgggtgtcgtgctgcacgcttatagtccaagctactcaggaggctgaggcaggagaattgcttgaacccaggaggaaaccccatctctactaaaaatacaaaaattagccaggcgtggtggcacgtacctgtaatcccagctacttggaaggctgacaggagaatcgcttgaacctgggaggcggaggttgcagtgagcagagatcgtgccattgcactccagcctgtgcagcaagagtgaagctctgtctcagaaaaaaaaaaaaaaaaggaacaaacagaaacagaggtttatctgcactccagcctgggcgacagagcaagactccgtctcaaaaaaaaaaaaaaaaatgacatcttactagtggatcctgtttcctgttcattggtgtctagtttacattattatcttggcagttggtggtaaacctaggcaaaagagtgtggactgtgccaagggaactgtggaaatgttaggggaaataaagctttacatctaattagagtacattgtgtgcatgagaaagaaggtggaaaaggtggttgcagcagaaagcaagttggaggtgtagctcagacctgggttctgtgtcttggcccttctgcacctccacgtcctctccctttctctttggggttcccttcacaaacaggtgaggcagctttttcaagggcattccaagcacaaaagaccttgttgtacctaaatactataagggacctgtcattgaggacgaaccatcacagcaagaggaattatctcgtgccgcatcttcgcataactgacaggatccctggcaaggatgtctcaatgcagaaagttggctaagtgaactgcagtatctaccctggacctaaaagaacttgctaatgttttcaagactacaattcagaggctgtctgatttaatctttgcatttacaaaaacacccttttacgtacattaaatgtggaataaaactaaaaaaaaagtgatg

SEQ ID NO: 457326 - DNA, 826 bp, Homo sapiens
  misc_feature (3)..(3): n is a, c, g, or t
cgnctaggtacgaggcctgggtggttccgcttccggttctgacggacgcttcggccgtaacgatgatcggagacatcctgctgttcgggacgttgctgatgaatgccggggcggtgctgaactttaagctgtgacaacatccgggaattcttgctgagcctcagatactttcgaatcttcatcgccctgtggaacatcttcatgatgttctgcatgattgtgctgagaaaactcaagcagattgcctttccatctagcactggggccataactctgatactactgttaacgaattgtgagatttgctgtaaatggatttaggaaaagacacgacgggagaatctggtgttcttggcctctgtgggtccatccctgtatgcttcccccagaaagagagaggacaaaaagttgtctgtcctgagtgattgagactccgaatgtggggttgctgtccagtctgcgtgccaccccagtggctgtttgcgaagatgcttccaggacataggagatctggggaggatggcatttcaccctcatcacaaggaccgtgatgtattcccaggaagactgttgccaaggtatcctacctggcagagaggatctgagagcatgtatgagacttgcctaggaacaaagaaggcttgtgaggagatcaaggaacttacatgaaattgtaggaacggccaggggcagtggctcaggcctgtaatcccagtactttgggaggccaaggtgggagaattgcttgagcccaggagttcaagaccagcctgggcagcatggtgaaaccctgtctttaccaaaaataaaaaaattagccgagtgt

SEQ ID NO: 457327 - DNA, 570 bp, Homo sapiens
  misc_feature (3)..(3): n is a, c, g, or t
cgnctaggtacgaggcctgggtggttccgcttccggttctgacggacgcttcggccgtaacgatgatcggagacatcctgctgttcgggacgttgctgatgaatgccggggcggtgctgaactttaagctgaaaaagaaggacacgcagggctttggggaggagtccaggagcccagcacaggctgttcggctcttgaatcccagcgatgaaaccaggaactcactttcccgggatgccgagtctccattcctccattcctgatgacttcaagaatgtttttgaccagaaaaccgacaaccttcccagaaagtccaagctcgtggtgggtggaaaagggtctgcttggccactcagtgcagctgcgattaaccctaaaggctttaaggaacgggccacctgtaacagagacaccagccttcctgtatagacactaaattgttagcaagagtgttgagctagttcctggtgaagtgtttccacagaagacatgtggagcagttgtggggatattaagggaaactttcctctgccttgacccctttgttaaataaaatgactttgggagcca

SEQ ID NO: 457328 - DNA, 824 bp, Homo sapiens
cgccattgtaaagacataccatgattaatttaaccagtccccagttgatgggcacttggtttgtgttcagattttgtgtattagaaaacaaggctacaggctgggagtcactgccgaagtgataagctgtgggtggtgaatgcagagaaggccacaatgtacagcacctaccctgggagtgttcacttggggttcatgttggaacccattttgcttcctccaccattgcacattgaaggagaatgtatttttgcacgcgcttctcattgcccttcatgtacatctgctctagggcaggagtcagcaaactacagcccagagggcatgtctggcccacggcttgtttttgtaaataaagttttattggagccgggtgcggtggctcacaactgtaatccccacactttgggaagctgagccaggcgatcccttattagcctgaccgctgtggcaaaatcctttctctactaaaaatacaaaaactagccgggtgtcgtgctgcacgcttatagtccaagctactcaggaggctgaggcaggagaattgcttgaacccaggaggtggaggttgcagtgagccgagatttttccactgcactccagcctggacgacagagctagactgtctccaaaagaaaaagttgtactgggaccgggcacagtggctcacgcctgtaatcctagcactttgggaggccaaggtgggcggatcacctgaggttgggagttcgagaccagcctggccaacatggagaaatgctgtctctactaaaaatgcaaaattagccgagtgtggtggtacaggcctgtaatcccagttacta

SEQ ID NO: 457329 - DNA, 342 bp, Homo sapiens
ctgcattttaacaaacatatacacaaacacattttttaaatttgctagaaatcttccctcccattttcaagtgtggttaatcaattgaccaaaacccagttttctttctttctttctttctttttttgagctctgtcacccaggctggagtgcagtggcgcaatctcagctcactgcagcctccgcctcccgggttcaggcgattttcttgcctcagcctcccaagtagctgggactacaggcacccaccaccacgcctggataatgttggtatttttagtagagatggggtttctccatgttggccaggctggtctcgaactcctgacctcaggtgatccg

SEQ ID NO: 457330 - DNA, 424 bp, Homo sapiens
tgtttcctgttcattggtgtctagtttacattattatcttggcagttggtggtaaacctaggcaaaagagtgtggactgtgccaagggaactgtggaaatgttaggggaaataaagctttacatctaattagagtacattgtgtgcatgagaaagaaggtggaaaaggtggttgcagcagaaagcaagttggaggtgtagctcagacctgggttctgtgtcttggcccttctgcacctccacgtcctcatctgtgatatgggtacagtgaaggagacagtcttgatatgggcctataacatgcctgatgctgggcagccactcagtagttgtcactgtttttattaatgttgttgcttttattaaaagactttctcagctgggttttgcaagccttcagtgagatggtggtatattagtcagct

SEQ ID NO: 457331 - DNA, 1323 bp, Homo sapiens
  misc_feature (3)..(3): n is a, c, g, or t
cgnctaggtacgaggcctgggtggttccgcttccggttctgacggacgcttcggccgtaacgatgatcggagacatcctgctgttcgggacgttgctgatgaatgccggggcggtgctgaactttaagctgaaaaagaaggacacgcagggctttggggaggagtccaggagcccagcacaggctgttcggctcttgaatcccagcgatgaaaccaggaactcactttcccgggatgccgagtctccattcctccattcctgatgacttcaagaatgtttttgaccagaaaaccgacaaccttcccagaaagtccaagctcgtggtgggtggaaaaggggcttgcttctgacatgtctgatgagcgcattcctgctgttgctcctggctattacaaggtgtcgctgtggaagactattcctgtacagctgtgtgaacctgcctcgtcacggcttcctctgcagtgctcttgaatatcccggttcctgcttaggccacagcagtgagtccagggagaagcatccttctactccctcactgtccaggttggctgaagatgctctgcacttgacctcctgacactaacttccttgccttttcccatggcaagagcaagtcatggactctgaactacttcctctcccttttttctatttattttattttattttatatttgtgatggagtctcgctctgtcacccaggctggagtgtggtggtgtgatcttggctcactgcaacctctgcctcccaggttcatgcaattctcctgcctctacctcccaagtagctgggaatacaggtgcccaccaccatgcccggctaatttttgtattcttagtagaggtggggtttcaccatgttggccaggctggtctcttaactccttacctcaaatgatccacccacctcggcctcccaaagtgctgggattatagatgtgagccactgcacccagcccttcctctccctttctctttggggttcccttcacaaacaggtgaggcagctttttcaagggcattccaagcacaaaagaccttgttgtacctaaatactataagggacctgtcattgaggacgaaccatcacagcaagaggaattatctcgtgccgcatcttcgcataactgacaggatccctggcaaggatgtctcaatgcagaaagttggctaagtgaactgcagtatctaccctggacctaaaagaacttgctaatgttttcaagactacaattcagaggctgtctgatttaatctttgcatttacaaaaacacccttttacgtacattaaatgtggaataaaactaaaaaaaaagtgatg

SEQ ID NO: 457332 - DNA, 1349 bp, Homo sapiens
  misc_feature (3)..(3): n is a, c, g, or t
cgnctaggtacgaggcctgggtggtggatgatcggagacatcctgctgttcgggacgttgctgatgaatgccggggcggtgctgaactttaagctgaaaaagaaggacacgcagggctttggggaggagtccaggagcccagcacaggtgacaacatccgggaattcttgctgagcctcagatactttcgaatcttcatcgccctgtggaacatcttcatgatgttctgcatgattgtgctgttcggctcttgaatcccagcgatgaaaccaggaactcactttcccgggatgccgagtctccattcctccattcctgatgacttcaagaatgtttttgaccagaaaaccgacaaccttcccagaaagtccaagctcgtggtgggtggaaaagtgttcgccgaggtgtgcatggtttcccagccacgtccctgttttcaaagatagtttcactttggtctctgaattgaaatgctgtctactgaaagggtttcaggagcgtttatgtaaggggctgtgatgaaattgcattccccatagataaaagaaaaatcatttctatccagagatctgagcagaaggattggcttgttagtttaacacagccgtatttttggacattcagtgttacttgctgagtctgacagcctctgggcccggccaggggccctgttaacaaactgctttcacatcccaacagggtctgcttggccactcagtgcagctgcgattaaccctaaaggctttaaggaacgggccacctgtaacagagacaccagccttcctgtatagacactaaattgttagcaagagtgttgagctagttcctggtgaagtgtttccacagaagacatgtggagcagttgtggggatattaagggaaactttcctctgccttgacccctttgttaaataaaatgactttgggagccattcattgtacagttgcaggaatgagagtgattttatgatgtggtacattgggaccatgttctaaaaccttgggtttctgagtctgctttttgagtaggtgattttgaggttgaaaaaccaggggccttcatctaggaaatacagcattttccagaagcttctttgaaagggaatcctggttttgttgccaaaatgaaacgcccggggttggcgctgaatcccacaactgtgtgatttgcttgttgagttttttgttgtctggtttttttgtttgtttgtttataccaataagaatgagcctgaatgttggtggtttttgaaatcctgacttggaggtaaacctggaggaaggaaaaaaagtaaatatgcaggcttttaggactgagtagccttgaaaataaacctcatttctaaaaa

SEQ ID NO: 457333 - DNA, 1384 bp, Homo sapiens
  misc_feature (3)..(3): n is a, c, g, or t
cgnctaggtacgaggcctgggtggttccgcttccggttctgacggacgcttcggccgtaacgatgatcggagacatcctgctgttcgggacgttgctgatgaatgccggggcggtgctgaactttaagctgaaaaagaaggacacgcagggctttggggaggagtccaggagcccagcacaggtgacaacatccgggaattcttgctgagcctcagatactttcgaatcttcatcgccctgtggaacatcttcatgatgttctgcatgattgtgctgttcggctcttgaatcccagcgatgaaaccaggaactcactttcccgggatgccgagtctccattcctccattcctgatgacttcaagaatgtttttgaccagaaaaccgacaaccttcccagaaagtccaagctcgtggtgggtggaaaagtgttcgccgaggtgtgcatggtttcccagccacgtccctgttttcaaagatagtttcactttggtctctgaattgaaatgctgtctactgaaagggtttcaggagcgtttatgtaaggggctgtgatgaaattgcattccccatagataaaagaaaaatcatttctatccagagatctgagcagaaggattggcttgttagtttaacacagccgtatttttggacattcagtgttacttgctgagtctgacagcctctgggcccggccaggggccctgttaacaaactgctttcacatcccaacagggtctgcttggccactcagtgcagctgcgattaaccctaaaggctttaaggaacgggccacctgtaacagagacaccagccttcctgtatagacactaaattgttagcaagagtgttgagctagttcctggtgaagtgtttccacagaagacatgtggagcagttgtggggatattaagggaaactttcctctgccttgacccctttgttaaataaaatgactttgggagccattcattgtacagttgcaggaatgagagtgattttatgatgtggtacattgggaccatgttctaaaaccttgggtttctgagtctgctttttgagtaggtgattttgaggttgaaaaaccaggggccttcatctaggaaatacagcattttccagaagcttctttgaaagggaatcctggttttgttgccaaaatgaaacgcccggggttggcgctgaatcccacaactgtgtgatttgcttgttgagttttttgttgtctggtttttttgtttgtttgtttataccaataagaatgagcctgaatgttggtggtttttgaaatcctgacttggaggtaaacctggaggaaggaaaaaaagtaaatatgcaggcttttaggactgagtagccttgaaaataaacctcatttctaaaaa

SEQ ID NO: 457334 - DNA, 308 bp, Homo sapiens
gaagaggaagaggaggagaaaagaaaggaaaagaaaagaaaccatcaggtgaattatgaagtgggtggagaccaaactctaaatagtgcttccaggtgcctcgaatgaggagagaagagaataaagttagtctccctgtgtccctggatcccagggactcagctgcctcagggcctttgcatatactgttctctcttcctggaatgcctttcccccagttatctctggctcacctgcccttcttcttcaagcctttgctcacatgtcatgttccctgatcgccctttaaaaactttttttttttgaga

SEQ ID NO: 457335 - DNA, 372 bp, Homo sapiens
gtgagaccactgcttggagggatgccagggctggagagacatctgggatccatctgcttggagatgctgataaaggcagggactcagtgacggagaggccatggagacacactgaaggcatgagtgcagaggtgccaggtgagggaaggttggagaggcacaccagcacacacaaggtcatgagtgccagggggtctggcagatgggacacagggagctgcagacaggtgactgcattccatcaccctgtgaccctagagcaggggcttctggtaagtggagagatggaagccagatttcgcaaaattaggaatggaaaagtttgcctataatgggaagctataggtaagaccttcactggaggggagggta

SEQ ID NO: 457336 - DNA, 822 bp, Homo sapiens
gcggccgcgagcccggagcctgcccgcgcgcccccggaacccgcgcccccggccgaggccaccggggccccggcgccgtcccgcccctgcgcccccgagccggcggcctcgcccgcggggccggaggagcctggagagcccgcggggctgggggagctcggggagcctgcgggaccgggggagcccgaagggccaggggatcccgcggcggcgccagcggaggcggaggagcaggcggtggaggcgaggcaggaagaggagcaggacttggatggtgagaaggggccatcatcggaagggcctgaggaggaggacggagaaggcttctccttcaaatacagccccgggaagctgaggggaaaccagtacaagaagatgatgaccaaagaggagctggaggaggagcagagagttcagaaggaacagctggctgccatcttcaagctcatgaaagacaacaaggagacgtttggcgagatgtccgacggcgacgtgcaggagcagctccggctctacgacatgtagactgcgcccacgggatgcacagcggccatgcctgatgctgtccccacccttgccccatgcccttgttctttccagacttctgtaggcctaattttcccttataaacatagatgcaggcgtacattctataggtacttgccgagttcttgcagtgtgtatattactttgcaggaatcaaaattgttttattcagaagacaaagtccctgacccctctggtttctgcttgctggtgaggttccagctgttattgggctctgaggccctctcctgatccaaatctttttttgtttgtttg

SEQ ID NO: 457337 - DNA, 600 bp, Homo sapiens
gcgtgtgtcagacccaaccagctccgatgttctaagtgggttttattttcattttcttcttgttctgaaaagcaaccgcagtcacacaagagagaggagagtcccaactccgccggctgcacacaggctccctctctccccagtgggctaggagcaccttcttcctctttgtcctttcttctcgacagagttcagaaggaacagctggctgccatcttcaagctcatgaaagacaacaaggagacgtttggcgagatgtccgacggcgacgtgcaggagcagctccggctctacgacatgtagactgcgcccacgggatgcacagcggccatgcctgatgctgtccccacccttgccccatgcccttgttctttccagacttctgtaggcctaattttcccttataaacatagatgcaggcgtacattctataggtacttgccgagttcttgcagtgtgtatattactttgcaggaatcaaaattgttttattcagaagacaaagtccctgacccctctggtttctgcttgctggtgaggttccagctgttattgggctctgaggccctctcctgatccaaatctttttttgtttgtttg

SEQ ID NO: 457338 - DNA, 2327 bp, Homo sapiens
  misc_feature (1749)..(1749): n is a, c, g, or t
gcggccgcgagcccggagcctgcccgcgcgcccccggaacccgcgcccccggccgaggccaccggggccccggcgccgtcccgcccctgcgcccccgagccggcggcctcgcccgcggggccggaggagcctggagagcccgcggggctgggggagctcggggagcctgcgggaccgggggagcccgaagggccaggggatcccgcggcggcgccagcggaggcggaggagcaggcggtggaggcgaggcaggaagaggagcaggacttggatggtgagaaggggccatcatcggaagggcctgaggaggaggacggagaaggcttctccttcaaatacagccccgggaagctgaggggaaaccagtacaagaagatgatgaccaaagaggagctggaggaggagcagagaactgaagaataacgaagttatccttagcgtcctcctaaaggcttttccttttggcatcttaaaagcttgagagataaaacggaaaccccagagaggagtctgggcaggctcccagggtgcatgctgcctccataaatctgctgagctctagaccctcaatcaggacttgtcccttggctagcaggatcctgggaacacctttggccctgccctgtgtagagatgttcatgtctgttcctgtgggtcactttgttaagctgaagagttttaagaggtagagctcagaccctggactgggatttttcttaccactcaaacttgctatccacacaccctgcacaccttagataaaaagaacattttaaaagcagagttcactttcactccagtctcccctcttttgccctcactgaagccaaaccacagaagactttgaggaatgagagacaaatgaggtagagctcacctgtgctcaccagctccgtcagggtggtcagccgacccctttccctgggaaccccacttctctctgtggctggcttggttgtcgggggtgagatgccatattgattacagggcagcaaagaaccagtaccaggaatttacttgaccattccccttatttttcatctagaggaatctcggattcagccctttcattgctaagacaccttttcactgaggttcttaccagctcagccaaatctccactctgctatagcagaagcaataatgtttgctttaaaaagatttcttgacctatgccttttcttagaaagtttgatagattagttagaacttcagatcatcagatcagtctcaaatgggtttcttggaattttatatttgacaatatttatactataccaaactcatttgcagttcttaggtttgttggttaaaacatttttttaaagcagtaagtttatagaaaatgttttcatttaatggaaggctggggaatgtccagcatcaacccctatggcatgcattcccaggggccttctcatctgggcctggaacctttggttcagggcttaggggagaacaggccacatggcaacagccacacagtcattgccttcaacacagagccacgtgtccccaaacagcaatagtcatgcccttgtccaggctgggatctaattgacacaataggtcgttgactccctcctagtagagctatctaggtttgtctggaaagtttccgaccctggcttataggcaccacacctcatgtactcctcatggcttggatctctgtattcagcctttgttcagtccaataaactttgagtagatgatctcaaaaaaaaaaaaaaaaaaaaaaaaaaaaanaaaacacaaagaaaaaaaaaaaaaaaaaaaaaaccaacgaaacaaaaaagataaacaaaacaaacacaaacaaaacgaaacacacaacacacacagaacacagaaacaaagaaagagaaacaaaacagagggggaagacaaaaaaaaaatacggggagaaagaccaaacacgaagaacagcaacaaaagaaagaagaagaacaaaaaaagaagggagacaaaaaacgacagagaagccacgacacggatacaaactaaagagaaacaaagaaggcgacagataaaacaacaccaaatgacgggaacacacgagaacaaacacgacgaaaaaagacgacacgacaaaataacgaagccatgacgggggcacaaaaagacaagacgacaaagacgacaacagagaagaaagaaaaaatagaagagaaaaggtaaagaagacgagaacgagagcagggacagaagacaacagccagacagcatgcacagaacagaagacagagacagagacagaaaccgacagagaagagaaaagggaagacagagcgaggagaacagagaacaaggccgctgggtcacca

SEQ ID NO: 457339 - DNA, 1539 bp, Homo sapiens
gtcctttgttctcaagcttaaagatgccaaaaggaaaagcctttaggaggacggagaaggcttctccttcaaatacagccccgggaagctgaggggaaaccagtacaagaagatgatgaccaaagaggagctggaggaggagcagaggattgagctgacctctgacctcacttccctgtagcaagttccttaggtcctgagccacaaatattcttgcaaatccttttgaactgaagaataacgaagttatccttagcgtcctcctaaaggcttttccttttggcatcttaaaagcttgagagataaaacggaaaccccagagaggagtctgggcaggctcccagggtgcatgctgcctccataaatctgctgagctctagaccctcaatcaggacttgtcccttggctagcaggatcctgggaacacctttggccctgccctgtgtagagatgttcatgtctgttcctgtgggtcactttgttaagctgaagagttttaagaggtagagctcagaccctggactgggatttttcttaccactcaaacttgctatccacacaccctgcacaccttagataaaaagaacattttaaaagcagagttcactttcactccagtctcccctcttttgccctcactgaagccaaaccacagaagactttgaggaatgagagacaaatgaggtagagctcacctgtgctcaccagctccgtcagggtggtcagccgacccctttccctgggaaccccacttctctctgtggctggcttggttgtcgggggtgagatgccatattgattacagggcagcaaagaaccagtaccaggaatttacttgaccattccccttatttttcatctagaggaatctcggattcagccctttcattgctaagacaccttttcactgaggttcttaccagctcagccaaatctccactctgctatagcagaagcaataatgtttgctttaaaaagatttcttgacctatgccttttcttagaaagtttgatagattagttagaacttcagatcatcagatcagtctcaaatgggtttcttggaattttatatttgacaatatttatactataccaaactcatttgcagttcttaggtttgttggttaaaacatttttttaaagcagtaagtttatagaaaatgttttcatttaatggaaggctggggaatgtccagcatcaacccctatggcatgcattcccaggggccttctcatctgggcctggaacctttggttcagggcttaggggagaacaggccacatggcaacagccacacagtcattgccttcaacacagagccacgtgtccccaaacagcaatagtcatgcccttgtccaggctgggatctaattgacacaataggtcgttgactccctcctagtagagctatctaggtttgtctggaaagtttccgaccctggcttataggcaccacacctcatgtactcctcatggcttggatctctgtattcagcctttgttcagtccaataaactttgagtagatgatctcaa

SEQ ID NO: 457340 - DNA, 1414 bp, Homo sapiens
  misc_feature (44)..(44): n is a, c, g, or t
  misc_feature (46)..(46): n is a, c, g, or t
acgataagaatacgaacaacagaaaggtgggatctatttccctncngggaagagcatggaggaaatcaagaggtgctgctgctggtgctgggctgtgctgtccaactgaagaataacgaagttatccttagcgtcctcctaaaggcttttccttttggcatcttaaaagcttgagagataaaacggaaaccccagagaggagtctgggcaggctcccagggtgcatgctgcctccataaatctgctgagctctagaccctcaatcaggacttgtcccttggctagcaggatcctgggaacacctttggccctgccctgtgtagagatgttcatgtctgttcctgtgggtcactttgttaagctgaagagttttaagaggtagagctcagaccctggactgggatttttcttaccactcaaacttgctatccacacaccctgcacaccttagataaaaagaacattttaaaagcagagttcactttcactccagtctcccctcttttgccctcactgaagccaaaccacagaagactttgaggaatgagagacaaatgaggtagagctcacctgtgctcaccagctccgtcagggtggtcagccgacccctttccctgggaaccccacttctctctgtggctggcttggttgtcgggggtgagatgccatattgattacagggcagcaaagaaccagtaccaggaatttacttgaccattccccttatttttcatctagaggaatctcggattcagccctttcattgctaagacaccttttcactgaggttcttaccagctcagccaaatctccactctgctatagcagaagcaataatgtttgctttaaaaagatttcttgacctatgccttttcttagaaagtttgatagattagttagaacttcagatcatcagatcagtctcaaatgggtttcttggaattttatatttgacaatatttatactataccaaactcatttgcagttcttaggtttgttggttaaaacatttttttaaagcagtaagtttatagaaaatgttttcatttaatggaaggctggggaatgtccagcatcaacccctatggcatgcattcccaggggccttctcatctgggcctggaacctttggttcagggcttaggggagaacaggccacatggcaacagccacacagtcattgccttcaacacagagccacgtgtccccaaacagcaatagtcatgcccttgtccaggctgggatctaattgacacaataggtcgttgactccctcctagtagagctatctaggtttgtctggaaagtttccgaccctggcttataggcaccacacctcatgtactcctcatggcttggatctctgtattcagcctttgttcagtccaataaactttgagtagatgatctcaa

SEQ ID NO: 457341 - DNA, 1557 bp, Homo sapiens
gtgggctgccaggttctgtgcgggatcaaggggagctctgcaagctctggccggcttggcggcacagactgtcttgctgcaagcgatgagaagcaaatcagcagtggtttgagaaaccagagtctagcgcagcttctgcaattccaaacattctccttcctcgtccccatttccccctttccttgcccatggtgcaggatggaatgagtaaaataaattatctttttctccccatttctctttacaaactgaagaataacgaagttatccttagcgtcctcctaaaggcttttccttttggcatcttaaaagcttgagagataaaacggaaaccccagagaggagtctgggcaggctcccagggtgcatgctgcctccataaatctgctgagctctagaccctcaatcaggacttgtcccttggctagcaggatcctgggaacacctttggccctgccctgtgtagagatgttcatgtctgttcctgtgggtcactttgttaagctgaagagttttaagaggtagagctcagaccctggactgggatttttcttaccactcaaacttgctatccacacaccctgcacaccttagataaaaagaacattttaaaagcagagttcactttcactccagtctcccctcttttgccctcactgaagccaaaccacagaagactttgaggaatgagagacaaatgaggtagagctcacctgtgctcaccagctccgtcagggtggtcagccgacccctttccctgggaaccccacttctctctgtggctggcttggttgtcgggggtgagatgccatattgattacagggcagcaaagaaccagtaccaggaatttacttgaccattccccttatttttcatctagaggaatctcggattcagccctttcattgctaagacaccttttcactgaggttcttaccagctcagccaaatctccactctgctatagcagaagcaataatgtttgctttaaaaagatttcttgacctatgccttttcttagaaagtttgatagattagttagaacttcagatcatcagatcagtctcaaatgggtttcttggaattttatatttgacaatatttatactataccaaactcatttgcagttcttaggtttgttggttaaaacatttttttaaagcagtaagtttatagaaaatgttttcatttaatggaaggctggggaatgtccagcatcaacccctatggcatgcattcccaggggccttctcatctgggcctggaacctttggttcagggcttaggggagaacaggccacatggcaacagccacacagtcattgccttcaacacagagccacgtgtccccaaacagcaatagtcatgcccttgtccaggctgggatctaattgacacaataggtcgttgactccctcctagtagagctatctaggtttgtctggaaagtttccgaccctggcttataggcaccacacctcatgtactcctcatggcttggatctctgtattcagcctttgttcagtccaataaactttgagtagatgatctcaa

SEQ ID NO: 457342 - DNA, 1711 bp, Homo sapiens
  misc_feature (1385)..(1385): n is a, c, g, or t
gcggccgcgagcccggagcctgcccgcgcgcccccggaacccgcgcccccggccgaggccaccggggccccggcgccgtcccgcccctgcgcccccgagccggcggcctcgcccgcggggccggaggagcctggagagcccgcggggctgggggagctcggggagcctgcgggaccgggggagcccgaagggccaggggatcccgcggcggcgccagcggaggcggaggagcaggcggtggaggcgaggcaggaagaggagcaggacttggatggtgagaaggggccatcatcggaagggcctgaggaggaggacggagaaggcttctccttcaaatacagccccgggaagctgaggggaaaccagtacaagaagatgatgaccaaagaggagctggaggaggagcagagaactgaagaataacgaagttatccttagcgtcctcctaaaggcttttccttttggcatcttaaaagcttgagagataaaacggaaaccccagagaggagtctgggcaggctcccagggtgcatgctgcctccataaatctgctgagctctagaccctcaatcaggacttgtcccttggctagcaggatcctgggaacacctttggccctgccctgtgtagagatgttcatgtctgttcctgtgggtcactttgttaagctgaagagttttaagaggtagagctcagaccctggactgggatttttcttaccactcaaacttgctatccacacaccctgcacaccttagataaaaagaacattttaaaagcagagttcactttcactccagtctcccctcttttgccctcactgaagccaaaccacagaagactttgaggaatgagagacaaatgaggtagagctcacctgtgctcaccagctccgtcagggtggtcagccgacccctttccctgggaaccccacttctctctgtggctggcttggttgtcgggggtgagatgccatattgattacagggcagcaaagaaccagtaccaggaatttatttttcatctagaggaatctcggattcagccctttcattgctaagacaccttttcactgaggttcttaccagctcagccaaatctccactctgctatagcagaagcaataatgtttgctttaaaaagatttcttgacctatgccttttcttagaaagtttgatagattagttagaacttcagatcatcagatcagtctcaaatgggtttcttggaattttatatttgacaatatttatactataccaaactcatttgcagttcttaggtttactcctcatggcttggatctctgtattcagcctttgttcagtccaataaactttgagtagatgatctcaaaaaaaaaaaaaaaaaaaaaaaaaaaaanaaaaaaaaaaaagggggggggggcaaagaattccccgggggggccccaggattagagcgccgtacccagtcctgttctgtgaccaaggggggccccaaattgggggaggcgaaattaaataggcaggggccagggccgcgtggattaaacacacggcggagcagcggacaacacggtccgcggggactcctggggaaggagcaccatacctcggggggggccatagggcgacaacccccgaaggatttaaggcgagagaactctacctctaggggcaaggggcaccacctgcacagtcgggatgaagtcgtccgcagttgtgaatt

SEQ ID NO: 457343 - DNA, 895 bp, Homo sapiens
gcggccgcgagcccggagcctgcccgcgcgcccccggaacccgcgcccccggccgaggccaccggggccccggcgccgtcccgcccctgcgcccccgagccggcggcctcgcccgcggggccggaggagcctggagagcccgcggggctgggggagctcggggagcctgcgggaccgggggagcccgaagggccaggggatcccgcggcggcgccagcggaggcggaggagcaggcggtggaggcgaggcaggaagaggagcaggacttggatggtgagaaggggccatcatcggaagggcctgaggaggaggacggagaaggcttctccttcaaatacagccccgggaagctgaggggaaaccagtacaagaagatgatgaccaaagaggagctggaggaggagcagaggattgagctgacctctgacctcacttccctgtagcaagttccttaggtcctgagccacaaatattcttgcaaatccttttggtaaggacactgatttcttagactagtggtgctccccttctactgcgtgctaacgtgcccccaaacaactgacgcggcctcaacctcccctcctccatcgccttcataaccgattaatacatttcccacctgagcccttctcattcttctcaagcacgaggaatctctggcagaagaggccccgtctgggggcagaggttcctggaggggagttaagtccctgagttcctggagggggcctaatgggccggcaggttggggtgctagcgccccctcgcaaggctgggggaactgtcaccctgggacctcaggcttcggaaatgtggatgtcgtcaccctgcagccttgggtctcaccctgagaagatgaggcagcttctgcacagtacaaccagatactctgag

SEQ ID NO: 457344 - DNA, 384 bp, Homo sapiens
ccccgagtcctcaggtgctgaggatgctgccgcttggcatgaccaggtttgctgcatttatatttcaggattgagctgacctctgacctcacttccctgtagcaagttccttaggtcctgagccacaaatattcttgcaaatccttttggtaaggacactgatttcttagactagtggtgctccccttctactgcgtgctaacgtgcccccaaacaactgacgcggcctcaacctcccctcctccatcgccttcataaccgattaatacatttcccacctgagcccttctcattcttctcaagcacgaggaatctctggcagaagaggccccgtctgggggcagaggttcctggaggggagttaagtccctgagttcctggagg

SEQ ID NO: 457345 - DNA, 507 bp, Homo sapiens
gcggccgcgagcccggagcctgcccgcgcgcccccggaacccgcgcccccggccgaggccaccggggccccggcgccgtcccgcccctgcgcccccgagccggcggcctcgcccgcggggccggaggagcctggagagcccgcggggctgggggagctcggggagcctgcgggaccgggggagcccgaagggccaggggatcccgcggcggcgccagcggaggcggaggagcaggcggtggaggcgaggcaggtacgcaccggggccctcgcggccccctccccacccccggggctccggctgccgctgccgttccccgccgagccagggagcggggccgcggcctccagcccaggctgcccccaggaagcgcagaacccgcggcccgcaggaaatgcaggtcccgccatgctaagccgcagccccgcaaactcgccgccctcccccagaaagtgtggcgaggggcgagcccgaaggagtttgtttggaggtgttttgctctcccct

SEQ ID NO: 457346 - DNA, 1802 bp, Homo sapiens
gcggccgcgagcccggagcctgcccgcgcgcccccggaacccgcgcccccggccgaggccaccggggccccggcgccgtcccgcccctgcgcccccgagccggcggcctcgcccgcggggccggaggagcctggagagcccgcggggctgggggagctcggggagcctgcgggaccgggggagcccgaagggccaggggatcccgcggcggcgccagcggaggcggaggagcaggcggtggaggcgaggcaggaagaggagcaggacttggatggtgagaaggggccatcatcggaagggcctgaggaggaggacggagaaggcttctccttcaaatacagccccgggaagctgaggggaaaccagtacaagaagatgatgaccaaagaggagctggaggaggagcagaggattgagctgacctctgacctcacttccctgtagcaagttccttaggtcctgagccacaaatattcttgcaaatccttttgaactgaagaataacgaagttatccttagcgtcctcctaaaggcttttccttttggcatcttaaaagcttgagagataaaacggaaaccccagagaggagtctgggcaggctcccagggtgcatgctgcctccataaatctgctgagctctagaccctcaatcaggacttgtcccttggctagcaggatcctgggaacacctttggccctgccctgtgtagagatgttcatgtctgttcctgtgggtcactttgttaagctgaagagttttaagaggtagagctcagaccctggactgggatttttcttaccactcaaacttgctatccacacaccctgcacaccttagataaaaagaacattttaaaagcagagttcactttcactccagtctcccctcttttgccctcactgaagccaaaccacagaagactttgaggaatgagagacaaatgaggtagagctcacctgtgctcaccagctccgtcagggtggtcagccgacccctttccctgggaaccccacttctctctgtggctggcttggttgtcgggggtgagatgccatattgattacagggcagcaaagaaccagtaccaggaatttacttgaccattccccttatttttcatctagaggaatctcggattcagccctttcattgctaagacaccttttcactgaggttcttaccagctcagccaaatctccactctgctatagcagaagcaataatgtttgctttaaaaagatttcttgacctatgccttttcttagaaagtttgatagattagttagaacttcagatcatcagatcagtctcaaatgggtttcttggaattttatatttgacaatatttatactataccaaactcatttgcagttcttaggtttgttggttaaaacatttttttaaagcagtaagtttatagaaaatgttttcatttaatggaaggctggggaatgtccagcatcaacccctatggcatgcattcccaggggccttctcatctgggcctggaacctttggttcagggcttaggggagaacaggccacatggcaacagccacacagtcattgccttcaacacagagccacgtgtccccaaacagcaatagtcatgcccttgtccaggctgggatctaattgacacaataggtcgttgactccctcctagtagagctatctaggtttgtctggaaagtttccgaccctggcttataggcaccacacctcatgtactcctcatggcttggatctctgtattcagcctttgttcagtccaataaactttgagtagatgatctcaa

SEQ ID NO: 457347 - DNA, 1721 bp, Homo sapiens
gcggccgcgagcccggagcctgcccgcgcgcccccggaacccgcgcccccggccgaggccaccggggccccggcgccgtcccgcccctgcgcccccgagccggcggcctcgcccgcggggccggaggagcctggagagcccgcggggctgggggagctcggggagcctgcgggaccgggggagcccgaagggccaggggatcccgcggcggcgccagcggaggcggaggagcaggcggtggaggcgaggcaggaagaggagcaggacttggatggtgagaaggggccatcatcggaagggcctgaggaggaggacggagaaggcttctccttcaaatacagccccgggaagctgaggggaaaccagtacaagaagatgatgaccaaagaggagctggaggaggagcagagaactgaagaataacgaagttatccttagcgtcctcctaaaggcttttccttttggcatcttaaaagcttgagagataaaacggaaaccccagagaggagtctgggcaggctcccagggtgcatgctgcctccataaatctgctgagctctagaccctcaatcaggacttgtcccttggctagcaggatcctgggaacacctttggccctgccctgtgtagagatgttcatgtctgttcctgtgggtcactttgttaagctgaagagttttaagaggtagagctcagaccctggactgggatttttcttaccactcaaacttgctatccacacaccctgcacaccttagataaaaagaacattttaaaagcagagttcactttcactccagtctcccctcttttgccctcactgaagccaaaccacagaagactttgaggaatgagagacaaatgaggtagagctcacctgtgctcaccagctccgtcagggtggtcagccgacccctttccctgggaaccccacttctctctgtggctggcttggttgtcgggggtgagatgccatattgattacagggcagcaaagaaccagtaccaggaatttacttgaccattccccttatttttcatctagaggaatctcggattcagccctttcattgctaagacaccttttcactgaggttcttaccagctcagccaaatctccactctgctatagcagaagcaataatgtttgctttaaaaagatttcttgacctatgccttttcttagaaagtttgatagattagttagaacttcagatcatcagatcagtctcaaatgggtttcttggaattttatatttgacaatatttatactataccaaactcatttgcagttcttaggtttgttggttaaaacatttttttaaagcagtaagtttatagaaaatgttttcatttaatggaaggctggggaatgtccagcatcaacccctatggcatgcattcccaggggccttctcatctgggcctggaacctttggttcagggcttaggggagaacaggccacatggcaacagccacacagtcattgccttcaacacagagccacgtgtccccaaacagcaatagtcatgcccttgtccaggctgggatctaattgacacaataggtcgttgactccctcctagtagagctatctaggtttgtctggaaagtttccgaccctggcttataggcaccacacctcatgtactcctcatggcttggatctctgtattcagcctttgttcagtccaataaactttgagtagatgatctcaa

SEQ ID NO: 457348 - DNA, 1667 bp, Homo sapiens
gcggccgcgagcccggagcctgcccgcgcgcccccggaacccgcgcccccggccgaggccaccggggccccggcgccgtcccgcccctgcgcccccgagccggcggcctcgcccgcggggccggaggagcctggagagcccgcggggctgggggagctcggggagcctgcgggaccgggggagcccgaagggccaggggatcccgcggcggcgccagcggaggcggaggagcaggcggtggaggcgaggcaggaagaggagcaggacttggatggtgagaaggggccatcatcggaagggcctgaggaggaggacggagaaggcttctccttcaaatacagccccgggaagctgaggggaaaccagtacaagaagatgatgaccaaagaggagctggaggaggagcagagaactgaagaataacgaagttatccttagcgtcctcctaaaggcttttccttttggcatcttaaaagcttgagagataaaacggaaaccccagagaggagtctgggcaggctcccagggtgcatgctgcctccataaatctgctgagctctagaccctcaatcaggacttgtcccttggctagcaggatcctgggaacacctttggccctgccctgtgtagagatgttcatgtctgttcctgtgggtcactttgttaagctgaagagttttaagaggtagagctcagaccctggactgggatttttcttaccactcaaacttgctatccacacaccctgcacaccttagataaaaagaacattttaaaagcagagttcactttcactccagtctcccctcttttgccctcactgaagccaaaccacagaagactttgaggaatgagagacaaatgaggtagagctcacctgtgctcaccagctccgtcagggtggtcagccgacccctttccctgggaaccccacttctctctgtggctggcttggttgtcgggggtgagatgccatattgattacagggcagcaaagaaccagtaccaggaatttacttgaccattccccttatttttcatctagaggaatctcggattcagccctttcattgctaagacaccttttcactgaggttcttaccagctcagccaaatctccactctgctatagcagaagcaataatgtttgctttaaaaagatttcttgacctatgccttttcttagaaagtttgatagattagttagaacttcagatcatcagatcagtctcaaatgggtttcttggaattttatatttgacaatatttatactataccaaactcatttgcagttcttaggtttgttggttaaaacatttttttaaagcagtaagtttatagcatgcattcccaggggccttctcatctgggcctggaacctttggttcagggcttaggggagaacaggccacatggcaacagccacacagtcattgccttcaacacagagccacgtgtccccaaacagcaatagtcatgcccttgtccaggctgggatctaattgacacaataggtcgttgactccctcctagtagagctatctaggtttgtctggaaagtttccgaccctggcttataggcaccacacctcatgtactcctcatggcttggatctctgtattcagcctttgttcagtccaataaactttgagtagatgatctcaa

SEQ ID NO: 457349 - DNA, 1069 bp, Homo sapiens
gcggccgcgagcccggagcctgcccgcgcgcccccggaacccgcgcccccggccgaggccaccggggccccggcgccgtcccgcccctgcgcccccgagccggcggcctcgcccgcggggccggaggagcctggagagcccgcggggctgggggagctcggggagcctgcgggaccgggggagcccgaagggccaggggatcccgcggcggcgccagcggaggcggaggagcaggcggtggaggcgaggcaggaagaggagcaggacttggatggtgagaaggggccatcatcggaagggcctgaggaggaggacggagaaggcttctccttcaaatacagccccgggaagctgaggggaaaccagtacaagaagatgatgaccaaagaggagctggaggaggagcagagaactgaagaataacgaagttatccttagcgtcctcctaaaggcttttccttttggcatcttaaaagcttgagagataaaacggaaaccccagagaggagtctgggcaggctcccagggtgcatgctgcctccataaatctgctgagctctagaccctcaatcaggacttgtcccttggctagcaggatcctgggaacacctttggccctgccctgtgtagagatgttcatgtctgttcctgtgggtcactttgttaagctgaagagttttaagaggtagagctcagaccctggactgggatttttcttaccactcaaacttgctatccacacaccctgcacctacctgcgaacctatgatcataggttcgcaggggtgaggtcagcatcttctgtgtctttacagtctaggatcctaatccatgttctccacgacctgaggcttcttggctgtgctgagtttgctgtacccatgttgagaggagcaactaggtcattcttccatcagcaagtacttatgatgagttctcttgtgagttaagtcaaaacccgtatttctaaagttatggatcttctgttccccaaaatgaatggcttgatttacgtggtattactatgtttcactgtcctgcgaacctatgagggacctctagaacgcct

SEQ ID NO: 457350 - DNA, 2477 bp, Homo sapiens
ccgcgcgattccgagggggttaacggcggagccccggccgggcgcggaccggagcgcgtgaggctccggcgcgcaacccggagcagcccgctggggcgcacagggtcgcgcgggcgcggggatggaggacggcgtggccggtccccagctcggggccgcggcggaggcggcggaggcggccgaggcgcgagcgcggcccggggtgacgctgcggcccttcgcgcccctctcgggggcggccgaggcggacgagggcggcggcgactggagcttcattgactgcgagatggaggaggtggacctgcaggacctgcccagcgccaccatcgcctgtcacctggacccgcgcgtgttcgtggacggcctgtgccgggccaaatttgagtccctctttaggacgtatgacaaggacatcacctttcagtattttaagagcttcaaacgagtcagaataaacttcagcaaccccttctccgcagcagatgccaggctccagctgcataagactgagtttctgggaaaggaaatgaagttatattttgctcagaccttacacataggaagctcacacctggctccgccaaatccagacaagcagtttctgatctcccctcccgcctctccgccagtgggatggaaacaagtggaagatgcgaccccagtcataaactatgatctcttatatgccatctccaagctggggccaggggaaaagtatgaattgcacgcagcgactgacaccactcccagcgtggtggtccatgtatgtgagagtgatcaagagaaggaggaagaagaggaaatggaaagaatgaggagacctaagccaaaaattatccagaccaggaggccggagtacacgccgatccacctcagctgaactggcacgcgacgaggacgcattccaaatcatactcacgggaggaatcttttactgtggaggtggctggtcacgacttcttcggaggtggcagccgagatcggggtggcagaaatcccagttcatgttgctcagaagagaatcaaggccgtgtccccttgttctaatgctgcacaccagttactgttcatggcacccgggaatgacttgggccaatcactgagtttgtggtgatcgcacaaggacatttgggactgtcttgagaaaacagataatgatagtgttttgtacttgttcttttctggtaggttctgtctgtgccaagggcaggttgatcagtgagctcaggagagagcttcctgtttctaagtggcctgcaggggccactctctactggtaggaagaggtaccacaggaagccgcctagtgcagagaggttgtgaaaacagcagcaatgcaatgtggaaattgtagcgtttcctttcttccctcatgttctcatgtttgtgcatgtatattactgatttacaagactaacctttgttcgtatataaagttacaccgttgttgttttacatcttttgggaagccaggaaagcgtttggaaaacgtatcacctttcccagattctcggattctcgactctttgcaacagcacttgcttgcggaactcttcctggaatgcattcactcagcatccccaaccgtgcaacgtgtaacttgtgcttttgcaaaagaagttgatctgaaattcctctgtagaatttagcttatacaattcagagaatagcagtttcactgccaacttttagtgggtgagaaattttagtttaggtgtttgggatcggacctcagtttctgttgtttcttttatgtggtggtttctatacatgaatcatagccaaaaacttttttggaaactgttggttgagatagttggttcttttaccccacgaagacatcaagatacacttgtaaataaagctgatagcatatattcatacctgttgtacacttgggtgaaaagtatggcagtgggagactaagatgtattaacctacctgtgaatcatatgttgtaggaaaagctgttcccatgtctaacaggacttgaattcaaagcatgtcaagtggatagtagatctgtggcgatatgagagggatgcagtgcctttccccattcattcctgatggaattgttatactaggttaacatttgtaatttttttctagttgtaatgtgtatgtctggtaaataggtattatattttggccttacaataccgtaacaatgtttgtcattttgaaatacttaatgccaagtaacaatgcatgctttggaaatttggaagatggttttattctttgagaagcaaatatgtttgcattaaatgctttgattgttcatatcaagaaattgattgaacgttctcaaaccctgtttacggtacttggtaagagggagccggtttgggagagaccattgcatcgctgtccaagtgtttcttgttaagtgcttttaaactggagaggctaacctcaaaatattttttttaactgcattctataataaatgggcacagtatgctccttacaga

SEQ ID NO: 457351 - DNA, 2272 bp, Homo sapiens
ccccctgcgctctcgccatcgccccgcatttactcgctggaggaggggtcacctcattcctagggaggaggaaacagacattgagcggcgacgtgactcagtgttcataaataggacgacgtccctgcattcccaatctgcactattggaagaaaagccaatgtttgggccaaatttgagtccctctttaggacgtatgacaaggacatcacctttcagtattttaagagcttcaaacgagtcagaataaacttcagcaaccccttctccgcagcagatgccaggctccagctgcataagactgagtttctgggaaaggaaatgaagttatattttgctcagaccttacacataggaagctcacacctggctccgccaaatccagacaagcagtttctgatctcccctcccgcctctccgccagtgggatggaaacaagtggaagatgcgaccccagtcataaactatgatctcttatatgccatctccaagctggggccaggggaaaagtatgaattgcacgcagcgactgacaccactcccagcgtggtggtccatgtatgtgagagtgatcaagagaaggaggaagaagaggaaatggaaagaatgaggagacctaagccaaaaattatccagaccaggaggccggagtacacgccgatccacctcagctgaactggcacgcgacgaggacgcattccaaatcatactcacgggaggaatcttttactgtggaggtggctggtcacgacttcttcggaggtggcagccgagatcggggtggcagaaatcccagttcatgttgctcagaagagaatcaaggccgtgtccccttgttctaatgctgcacaccagttactgttcatggcacccgggaatgacttgggccaatcactgagtttgtggtgatcgcacaaggacatttgggactgtcttgagaaaacagataatgatagtgttttgtacttgttcttttctggtaggttctgtctgtgccaagggcaggttgatcagtgagctcaggagagagcttcctgtttctaagtggcctgcaggggccactctctactggtaggaagaggtaccacaggaagccgcctagtgcagagaggttgtgaaaacagcagcaatgcaatgtggaaattgtagcgtttcctttcttccctcatgttctcatgtttgtgcatgtatattactgatttacaagactaacctttgttcgtatataaagttacaccgttgttgttttacatcttttgggaagccaggaaagcgtttggaaaacgtatcacctttcccagattctcggattctcgactctttgcaacagcacttgcttgcggaactcttcctggaatgcattcactcagcatccccaaccgtgcaacgtgtaacttgtgcttttgcaaaagaagttgatctgaaattcctctgtagaatttagcttatacaattcagagaatagcagtttcactgccaacttttagtgggtgagaaattttagtttaggtgtttgggatcggacctcagtttctgttgtttcttttatgtggtggtttctatacatgaatcatagccaaaaacttttttggaaactgttggttgagatagttggttcttttaccccacgaagacatcaagatacacttgtaaataaagctgatagcatatattcatacctgttgtacacttgggtgaaaagtatggcagtgggagactaagatgtattaacctacctgtgaatcatatgttgtaggaaaagctgttcccatgtctaacaggacttgaattcaaagcatgtcaagtggatagtagatctgtggcgatatgagagggatgcagtgcctttccccattcattcctgatggaattgttatactaggttaacatttgtaatttttttctagttgtaatgtgtatgtctggtaaataggtattatattttggccttacaataccgtaacaatgtttgtcattttgaaatacttaatgccaagtaacaatgcatgctttggaaatttggaagatggttttattctttgagaagcaaatatgtttgcattaaatgctttgattgttcatatcaagaaattgattgaacgttctcaaaccctgtttacggtacttggtaagagggagccggtttgggagagaccattgcatcgctgtccaagtgtttcttgttaagtgcttttaaactggagaggctaacctcaaaatattttttttaactgcattctataataaatgggcacagtatgctccttacaga

SEQ ID NO: 457352 - DNA, 2204 bp, Homo sapiens
  misc_feature (1466)..(1466): n is a, c, g, or t
ggtgcagcggggtaggcgtggctatgcaaacaccctaaggtttgcgcagcaggtttccatgaatttgctcaagggttggagctcatgacccactctagactgagcagaccagagtggttccctgctcatgtggtgctgggggtactcagcagagaaacaggagtctgcagaagatgcctgcaaatcagcccaggactgccaggtctggcttgaaaggaaaataggggataaccagactgggcgcagatgctaagaaaccctctggttggcagggttcccagccccagggcacccacggcagggagaggggtagctggggttgggcttgccttttctcctgcccactaccattttgaccctcctctggggaacttaggacaggtgacccaccttcaaggcagctcccagagttccatttgatgtccttaggggctgacagattgtcagggaagaagagaggagcttctagaatgcagccagctcctcagtaaagcaagtccccctcaggctctgagcacccccccaacccgcccccaccacacacacacatacacacataccttgctgggatgggagaggaccctgtccaaaggcctcccccagtgggaggaagctcatctgacaccacgccagagagccaaagtgtcttttcttcctcaaagtgaggacagcgaacttgctgggcccttcaagtataaataaagcatttgggatccccgccccacccctgacctttttgccctgggaggcacaggctgagctttgaccttgggtgcctaggccttcctgtgtgagtacactcctttctgcacgggataagattttatgcaaataattacttagtactcctctgaccttttctgtttgtaaaacaatgcatattcattgtgaaaacttggggagggcaatctggaagtgcagagaaaacctacaccgcgcagcttgagatgtaagagctctatggacagccctctcatcactggtcagcatttctaaaaccaaactaggatcgtaggttattgttccttattcttatttcttaaagtctcctgggaagtggcttttttttttttttctggcatctgatccagagtcccggagagggaggtgcagagctgctgctgggtggggaaccctaggggcaggtggagccctggctccctgtccctgagaagctgtgtcctctcagaactgtggcctaggctttggactttcagagcttgcctctgtggtatgaggagcggggagagactgattccaagagccctcctgacctcaatgacagtgacttaaatttccatatatactaaagtcacctctgctgattttctgtccatctaggtcaagcgtaattatttgcagtccctgtgcctgtgactcccatagccctgggagggggctgtcatcctatctgtgccacaaccagagttcatatgtccttttgccctccccattacagaccatcntacaattggtcctggaatcacacctgtcctgacgcctggacattgacctgcccatctcccggaactggcgttaggtgctgttgcctcactgcagttcttccctggcaacaactgacctgtgcttattttctctcctcagaccttacacataggaagctcacacctggctccgccaaatccagacaagcagtttctgatctcccctcccgcctctccgccagtgggatggaaacaagtggaagatgcgaccccagtcataaactatgatctcttatatgccatctccaagctggggccaggtgagcagggccctcgggtgggagggaggcagggggagacacagctgctgccctgcaccagggagcagtaccaccactacccccgtagctctcctgagcccatgccggcatgttttgtgagcttctctgtattcttctgcgccaccgtcccttgtgctgggagcatgcctgcctcttggcaccacctgcagtgttagagagactgcggctgatcgtggggaccctgcatcacgcccctccaccccccgcagtgtcccaggaatccattcctgtgtccactgagcacagcctgcgtgggaggcctgagccccggccccaggttctgtcgctccggatagggatgagtgattggactttggaaagggaaaatcgatgccccctttaagaaatgttatttttaatcaaaataaattctccctttcctgtgattctcacctgg

SEQ ID NO: 457353 - DNA, 2435 bp, Homo sapiens
aggacttgactcaggaatttgctgtccaaacaggatgctgtggaagctgcactttttttttccccagggagtgggggctggcccttactgctttataagcaccagctcaagaaggaacctacagcctcttggaaaggaatctcactaggggcttgactgcgtgggtctgtagcgctttcactgtaagaaagcaagatgcattttagaaactttaactacagttttagctccctgattgcctgtgtggcaaacagtgatatcttcagcgaaagtgaaaccagggccaaatttgagtccctctttaggacgtatgacaaggacatcacctttcagtattttaagagcttcaaacgagtcagaataaacttcagcaaccccttctccgcagcagatgccaggctccagctgcataagactgagtttctgggaaaggaaatgaagttatattttgctcagaccttacacataggaagctcacacctggctccgccaaatccagacaagcagtttctgatctcccctcccgcctctccgccagtgggatggaaacaagtggaagatgcgaccccagtcataaactatgatctcttatatgccatctccaagctggggccaggggaaaagtatgaattgcacgcagcgactgacaccactcccagcgtggtggtccatgtatgtgagagtgatcaagagaaggaggaagaagaggaaatggaaagaatgaggagacctaagccaaaaattatccagaccaggaggccggagtacacgccgatccacctcagctgaactggcacgcgacgaggacgcattccaaatcatactcacgggaggaatcttttactgtggaggtggctggtcacgacttcttcggaggtggcagccgagatcggggtggcagaaatcccagttcatgttgctcagaagagaatcaaggccgtgtccccttgttctaatgctgcacaccagttactgttcatggcacccgggaatgacttgggccaatcactgagtttgtggtgatcgcacaaggacatttgggactgtcttgagaaaacagataatgatagtgttttgtacttgttcttttctggtaggttctgtctgtgccaagggcaggttgatcagtgagctcaggagagagcttcctgtttctaagtggcctgcaggggccactctctactggtaggaagaggtaccacaggaagccgcctagtgcagagaggttgtgaaaacagcagcaatgcaatgtggaaattgtagcgtttcctttcttccctcatgttctcatgtttgtgcatgtatattactgatttacaagactaacctttgttcgtatataaagttacaccgttgttgttttacatcttttgggaagccaggaaagcgtttggaaaacgtatcacctttcccagattctcggattctcgactctttgcaacagcacttgcttgcggaactcttcctggaatgcattcactcagcatccccaaccgtgcaacgtgtaacttgtgcttttgcaaaagaagttgatctgaaattcctctgtagaatttagcttatacaattcagagaatagcagtttcactgccaacttttagtgggtgagaaattttagtttaggtgtttgggatcggacctcagtttctgttgtttcttttatgtggtggtttctatacatgaatcatagccaaaaacttttttggaaactgttggttgagatagttggttcttttaccccacgaagacatcaagatacacttgtaaataaagctgatagcatatattcatacctgttgtacacttgggtgaaaagtatggcagtgggagactaagatgtattaacctacctgtgaatcatatgttgtaggaaaagctgttcccatgtctaacaggacttgaattcaaagcatgtcaagtggatagtagatctgtggcgatatgagagggatgcagtgcctttccccattcattcctgatggaattgttatactaggttaacatttgtaatttttttctagttgtaatgtgtatgtctggtaaataggtattatattttggccttacaataccgtaacaatgtttgtcattttgaaatacttaatgccaagtaacaatgcatgctttggaaatttggaagatggttttattctttgagaagcaaatatgtttgcattaaatgctttgattgttcatatcaagaaattgattgaacgttctcaaaccctgtttacggtacttggtaagagggagccggtttgggagagaccattgcatcgctgtccaagtgtttcttgttaagtgcttttaaactggagaggctaacctcaaaatattttttttaactgcattctataataaatgggcacagtatgctccttacagaaaagttgtcattttatttctagaataaatctgtgaaccttctaaattct

SEQ ID NO: 457354 - DNA, 2674 bp, Homo sapiens
ccgcgcgattccgagggggttaacggcggagccccggccgggcgcggaccggagcgcgtgaggctccggcgcgcaacccggagcagcccgctggggcgcacagggtcgcgcgggcgcggggatggaggacggcgtggccggtccccagctcggggccgcggcggaggcggcggaggcggccgaggcgcgagcgcggcccggggtgacgctgcggcccttcgcgcccctctcgggggcggccgaggcggacgagggcggcggcgactggagcttcattgactgcgagatggaggaggtggacctgcaggacctgcccagcgccaccatcgcctgtcacctggacccgcgcgtgttcgtggacggcctgtgccggttaaagaagtgctgtggtggccgcctacgtaattggattcattgtggagctctacttgaagttgcactcatctgaactcattcttgaacatataagccactgcccagaacaaacagggctcttcttacagaaagactcctgcgctgtgaatcagtcacagattgtattaaacttcccaacactactcaatttgtcaggccaaatttgagtccctctttaggacgtatgacaaggacatcacctttcagtattttaagagcttcaaacgagtcagaataaacttcagcaaccccttctccgcagcagatgccaggctccagctgcataagactgagtttctgggaaaggaaatgaagttatattttgctcagaccttacacataggaagctcacacctggctccgccaaatccagacaagcagtttctgatctcccctcccgcctctccgccagtgggatggaaacaagtggaagatgcgaccccagtcataaactatgatctcttatatgccatctccaagctggggccaggggaaaagtatgaattgcacgcagcgactgacaccactcccagcgtggtggtccatgtatgtgagagtgatcaagagaaggaggaagaagaggaaatggaaagaatgaggagacctaagccaaaaattatccagaccaggaggccggagtacacgccgatccacctcagctgaactggcacgcgacgaggacgcattccaaatcatactcacgggaggaatcttttactgtggaggtggctggtcacgacttcttcggaggtggcagccgagatcggggtggcagaaatcccagttcatgttgctcagaagagaatcaaggccgtgtccccttgttctaatgctgcacaccagttactgttcatggcacccgggaatgacttgggccaatcactgagtttgtggtgatcgcacaaggacatttgggactgtcttgagaaaacagataatgatagtgttttgtacttgttcttttctggtaggttctgtctgtgccaagggcaggttgatcagtgagctcaggagagagcttcctgtttctaagtggcctgcaggggccactctctactggtaggaagaggtaccacaggaagccgcctagtgcagagaggttgtgaaaacagcagcaatgcaatgtggaaattgtagcgtttcctttcttccctcatgttctcatgtttgtgcatgtatattactgatttacaagactaacctttgttcgtatataaagttacaccgttgttgttttacatcttttgggaagccaggaaagcgtttggaaaacgtatcacctttcccagattctcggattctcgactctttgcaacagcacttgcttgcggaactcttcctggaatgcattcactcagcatccccaaccgtgcaacgtgtaacttgtgcttttgcaaaagaagttgatctgaaattcctctgtagaatttagcttatacaattcagagaatagcagtttcactgccaacttttagtgggtgagaaattttagtttaggtgtttgggatcggacctcagtttctgttgtttcttttatgtggtggtttctatacatgaatcatagccaaaaacttttttggaaactgttggttgagatagttggttcttttaccccacgaagacatcaagatacacttgtaaataaagctgatagcatatattcatacctgttgtacacttgggtgaaaagtatggcagtgggagactaagatgtattaacctacctgtgaatcatatgttgtaggaaaagctgttcccatgtctaacaggacttgaattcaaagcatgtcaagtggatagtagatctgtggcgatatgagagggatgcagtgcctttccccattcattcctgatggaattgttatactaggttaacatttgtaatttttttctagttgtaatgtgtatgtctggtaaataggtattatattttggccttacaataccgtaacaatgtttgtcattttgaaatacttaatgccaagtaacaatgcatgctttggaaatttggaagatggttttattctttgagaagcaaatatgtttgcattaaatgctttgattgttcatatcaagaaattgattgaacgttctcaaaccctgtttacggtacttggtaagagggagccggtttgggagagaccattgcatcgctgtccaagtgtttcttgttaagtgcttttaaactggagaggctaacctcaaaatattttttttaactgcattctataataaatgggcacagtatgctccttacaga

SEQ ID NO: 457355 - DNA, 3535 bp, Homo sapiens
  misc_feature (1466)..(1466): n is a, c, g, or t
ggtgcagcggggtaggcgtggctatgcaaacaccctaaggtttgcgcagcaggtttccatgaatttgctcaagggttggagctcatgacccactctagactgagcagaccagagtggttccctgctcatgtggtgctgggggtactcagcagagaaacaggagtctgcagaagatgcctgcaaatcagcccaggactgccaggtctggcttgaaaggaaaataggggataaccagactgggcgcagatgctaagaaaccctctggttggcagggttcccagccccagggcacccacggcagggagaggggtagctggggttgggcttgccttttctcctgcccactaccattttgaccctcctctggggaacttaggacaggtgacccaccttcaaggcagctcccagagttccatttgatgtccttaggggctgacagattgtcagggaagaagagaggagcttctagaatgcagccagctcctcagtaaagcaagtccccctcaggctctgagcacccccccaacccgcccccaccacacacacacatacacacataccttgctgggatgggagaggaccctgtccaaaggcctcccccagtgggaggaagctcatctgacaccacgccagagagccaaagtgtcttttcttcctcaaagtgaggacagcgaacttgctgggcccttcaagtataaataaagcatttgggatccccgccccacccctgacctttttgccctgggaggcacaggctgagctttgaccttgggtgcctaggccttcctgtgtgagtacactcctttctgcacgggataagattttatgcaaataattacttagtactcctctgaccttttctgtttgtaaaacaatgcatattcattgtgaaaacttggggagggcaatctggaagtgcagagaaaacctacaccgcgcagcttgagatgtaagagctctatggacagccctctcatcactggtcagcatttctaaaaccaaactaggatcgtaggttattgttccttattcttatttcttaaagtctcctgggaagtggcttttttttttttttctggcatctgatccagagtcccggagagggaggtgcagagctgctgctgggtggggaaccctaggggcaggtggagccctggctccctgtccctgagaagctgtgtcctctcagaactgtggcctaggctttggactttcagagcttgcctctgtggtatgaggagcggggagagactgattccaagagccctcctgacctcaatgacagtgacttaaatttccatatatactaaagtcacctctgctgattttctgtccatctaggtcaagcgtaattatttgcagtccctgtgcctgtgactcccatagccctgggagggggctgtcatcctatctgtgccacaaccagagttcatatgtccttttgccctccccattacagaccatcntacaattggtcctggaatcacacctgtcctgacgcctggacattgacctgcccatctcccggaactggcgttaggtgctgttgcctcactgcagttcttccctggcaacaactgacctgtgcttattttctctcctcagaccttacacataggaagctcacacctggctccgccaaatccagacaagcagtttctgatctcccctcccgcctctccgccagtgggatggaaacaagtggaagatgcgaccccagtcataaactatgatctcttatatgccatctccaagctggggccaggggaaaagtatgaattgcacgcagcgactgacaccactcccagcgtggtggtccatgtatgtgagagtgatcaagagaaggaggaagaagaggaaatggaaagaatgaggagacctaagccaaaaattatccagaccaggaggccggagtacacgccgatccacctcagctgaactggcacgcgacgaggacgcattccaaatcatactcacgggaggaatcttttactgtggaggtggctggtcacgacttcttcggaggtggcagccgagatcggggtggcagaaatcccagttcatgttgctcagaagagaatcaaggccgtgtccccttgttctaatgctgcacaccagttactgttcatggcacccgggaatgacttgggccaatcactgagtttgtggtgatcgcacaaggacatttgggactgtcttgagaaaacagataatgatagtgttttgtacttgttcttttctggtaggttctgtctgtgccaagggcaggttgatcagtgagctcaggagagagcttcctgtttctaagtggcctgcaggggccactctctactggtaggaagaggtaccacaggaagccgcctagtgcagagaggttgtgaaaacagcagcaatgcaatgtggaaattgtagcgtttcctttcttccctcatgttctcatgtttgtgcatgtatattactgatttacaagactaacctttgttcgtatataaagttacaccgttgttgttttacatcttttgggaagccaggaaagcgtttggaaaacgtatcacctttcccagattctcggattctcgactctttgcaacagcacttgcttgcggaactcttcctggaatgcattcactcagcatccccaaccgtgcaacgtgtaacttgtgcttttgcaaaagaagttgatctgaaattcctctgtagaatttagcttatacaattcagagaatagcagtttcactgccaacttttagtgggtgagaaattttagtttaggtgtttgggatcggacctcagtttctgttgtttcttttatgtggtggtttctatacatgaatcatagccaaaaacttttttggaaactgttggttgagatagttggttcttttaccccacgaagacatcaagatacacttgtaaataaagctgatagcatatattcatacctgttgtacacttgggtgaaaagtatggcagtgggagactaagatgtattaacctacctgtgaatcatatgttgtaggaaaagctgttcccatgtctaacaggacttgaattcaaagcatgtcaagtggatagtagatctgtggcgatatgagagggatgcagtgcctttccccattcattcctgatggaattgttatactaggttaacatttgtaatttttttctagttgtaatgtgtatgtctggtaaataggtattatattttggccttacaataccgtaacaatgtttgtcattttgaaatacttaatgccaagtaacaatgcatgctttggaaatttggaagatggttttattctttgagaagcaaatatgtttgcattaaatgctttgattgttcatatcaagaaattgattgaacgttctcaaaccctgtttacggtacttggtaagagggagccggtttgggagagaccattgcatcgctgtccaagtgtttcttgttaagtgcttttaaactggagaggctaacctcaaaatattttttttaactgcattctataataaatgggcacagtatgctccttacaga

SEQ ID NO: 457356 - DNA, 2332 bp, Homo sapiens
aggacttgactcaggaatttgctgtccaaacaggatgctgtggaagctgcactttttttttccccagggagtgggggctggcccttactgctttataagcaccagctcaagaaggaacctacagcctcttggaaaggaatctcactaggggcttgactgcgtgggtctgtagcgctttcactgtaagaaagcaagatgcattttagaaactttaactacagttttagctccctgattgcctgtgtggcaaacagtgatatcttcagcgaaagtgaaaccagggccaaatttgagtccctctttaggacgtatgacaaggacatcacctttcagtattttaagagcttcaaacgagtcagaataaacttcagcaaccccttctccgcagcagatgccaggctccagctgcataagactgagtttctgggaaaggaaatgaagttatattttgctcagaccttacacataggaagctcacacctggctccgccaaatccagacaagcagtttctgatctcccctcccgcctctccgccagtgggatggaaacaagtggaagatgcgaccccagtcataaactatgatctcttatatgccatctccaagctggggccaggggaaaagtatgaattgcacgcagcgactgacaccactcccagcgtggtggtccatgtatgtgagagtgatcaagagaaggaggaagaagaggaaatggaaagaatgaggagacctaagccaaaaattatccagaccaggaggccggagtacacgccgatccacctcagctgaactggcacgcgacgaggacgcattccaaatcatactcacgggaggaatcttttactgtggaggtggctggtcacgacttcttcggaggtggcagccgagatcggggtggcagaaatcccagttcatgttgctcagaagagaatcaaggccgtgtccccttgttctaatgctgcacaccagttactgttcatggcacccgggaatgacttgggccaatcactgagtttgtggtgatcgcacaaggacatttgggactgtcttgagtgccaagggcaggttgatcagtgagctcaggagagagcttcctgtttctaagtggcctgcaggggccactctctactggtaggaagaggtaccacaggaagccgcctagtgcagagaggttgtgaaaacagcagcaatgcaatgtggaaattgtagcgtttcctttcttccctcatgttctcatgtttgtgcatgtatattactgatttacaagactaacctttgttcgtatataaagttacaccgttgttgttttacatcttttgggaagccaggaaagcgtttggaaaacgtatcacctttcccagattctcggattctcgactctttgcaacagcacttgcttgcggaactcttcctggaatgcattcactcagcatccccaaccgtgcaacgtgtaacttgtgcttttgcaaaagaagttgatctgaaattcctctgtagaatttagcttatacaattcagagaatagcagtttcactgccaacttttagtgggtgagaaattttagtttaggtgtttgggatcggacctcagtttctgttgtttcttttatgtggtggtttctatacatgaatcatagccaaaaacttttttggaaactgttggttgagatagttggttcttttaccccacgaagacatcaagatacacttgtaaataaagctgatagcatatattcatacctgttgtacacttgggtgaaaagtatggcagtgggagactaagatgtattaacctacctgtgaatcatatgttgtaggaaaagctgttcccatgtctaacaggacttgaattcaaagcatgtcaagtggatagtagatctgtggcgatatgagagggatgcagtgcctttccccattcattcctgatggaattgttatactaggttaacatttgtaatttttttctagttgtaatgtgtatgtctggtaaataggtattatattttggccttacaataccgtaacaatgtttgtcattttgaaatacttaatgccaagtaacaatgcatgctttggaaatttggaagatggttttattctttgagaagcaaatatgtttgcattaaatgctttgattgttcatatcaagaaattgattgaacgttctcaaaccctgtttacggtacttggtaagagggagccggtttgggagagaccattgcatcgctgtccaagtgtttcttgttaagtgcttttaaactggagaggctaacctcaaaatattttttttaactgcattctataataaatgggcacagtatgctccttacaga

SEQ ID NO: 457357 - DNA, 1884 bp, Homo sapiens
caatcgaatggtcacgagcagctggcccagcagagccctgaatgctcttttatgtttgccttttgactcccaaggacttgtctgagtgaccctgcgattattttccctccttaggggaaaagtatgaattgcacgcagcgactgacaccactcccagcgtggtggtccatgtatgtgagagtgatcaagagaaggaggaagaagaggaaatggaaagaatgaggagacctaagccaaaaattatccagaccaggaggccggagtacacgccgatccacctcagctgaactggcacgcgacgaggacgcattccaaatcatactcacgggaggaatcttttactgtggaggtggctggtcacgacttcttcggaggtggcagccgagatcggggtggcagaaatcccagttcatgttgctcagaagagaatcaaggccgtgtccccttgttctaatgctgcacaccagttactgttcatggcacccgggaatgacttgggccaatcactgagtttgtggtgatcgcacaaggacatttgggactgtcttgagaaaacagataatgatagtgttttgtacttgttcttttctggtaggttctgtctgtgccaagggcaggttgatcagtgagctcaggagagagcttcctgtttctaagtggcctgcaggggccactctctactggtaggaagaggtaccacaggaagccgcctagtgcagagaggttgtgaaaacagcagcaatgcaatgtggaaattgtagcgtttcctttcttccctcatgttctcatgtttgtgcatgtatattactgatttacaagactaacctttgttcgtatataaagttacaccgttgttgttttacatcttttgggaagccaggaaagcgtttggaaaacgtatcacctttcccagattctcggattctcgactctttgcaacagcacttgcttgcggaactcttcctggaatgcattcactcagcatccccaaccgtgcaacgtgtaacttgtgcttttgcaaaagaagttgatctgaaattcctctgtagaatttagcttatacaattcagagaatagcagtttcactgccaacttttagtgggtgagaaattttagtttaggtgtttgggatcggacctcagtttctgttgtttcttttatgtggtggtttctatacatgaatcatagccaaaaacttttttggaaactgttggttgagatagttggttcttttaccccacgaagacatcaagatacacttgtaaataaagctgatagcatatattcatacctgttgtacacttgggtgaaaagtatggcagtgggagactaagatgtattaacctacctgtgaatcatatgttgtaggaaaagctgttcccatgtctaacaggacttgaattcaaagcatgtcaagtggatagtagatctgtggcgatatgagagggatgcagtgcctttccccattcattcctgatggaattgttatactaggttaacatttgtaatttttttctagttgtaatgtgtatgtctggtaaataggtattatattttggccttacaataccgtaacaatgtttgtcattttgaaatacttaatgccaagtaacaatgcatgctttggaaatttggaagatggttttattctttgagaagcaaatatgtttgcattaaatgctttgattgttcatatcaagaaattgattgaacgttctcaaaccctgtttacggtacttggtaagagggagccggtttgggagagaccattgcatcgctgtccaagtgtttcttgttaagtgcttttaaactggagaggctaacctcaaaatattttttttaactgcattctataataaatgggcacagtatgctccttacaga

SEQ ID NO: 457358 - DNA, 1442 bp, Homo sapiens
ccggtgtccttgtgcgatcaccacaaactcagtgattggcccaagttcattcccgggtgccatgaacagtaactggtgtgcagcattagacatttgggactgtcttgagaaaacagataatgatagtgttttgtacttgttcttttctggtaggttctgtctgtgccaagggcaggttgatcagtgagctcaggagagagcttcctgtttctaagtggcctgcaggggccactctctactggtaggaagaggtaccacaggaagccgcctagtgcagagaggttgtgaaaacagcagcaatgcaatgtggaaattgtagcgtttcctttcttccctcatgttctcatgtttgtgcatgtatattactgatttacaagactaacctttgttcgtatataaagttacaccgttgttgttttacatcttttgggaagccaggaaagcgtttggaaaacgtatcacctttcccagattctcggattctcgactctttgcaacagcacttgcttgcggaactcttcctggaatgcattcactcagcatccccaaccgtgcaacgtgtaacttgtgcttttgcaaaagaagttgatctgaaattcctctgtagaatttagcttatacaattcagagaatagcagtttcactgccaacttttagtgggtgagaaattttagtttaggtgtttgggatcggacctcagtttctgttgtttcttttatgtggtggtttctatacatgaatcatagccaaaaacttttttggaaactgttggttgagatagttggttcttttaccccacgaagacatcaagatacacttgtaaataaagctgatagcatatattcatacctgttgtacacttgggtgaaaagtatggcagtgggagactaagatgtattaacctacctgtgaatcatatgttgtaggaaaagctgttcccatgtctaacaggacttgaattcaaagcatgtcaagtggatagtagatctgtggcgatatgagagggatgcagtgcctttccccattcattcctgatggaattgttatactaggttaacatttgtaatttttttctagttgtaatgtgtatgtctggtaaataggtattatattttggccttacaataccgtaacaatgtttgtcattttgaaatacttaatgccaagtaacaatgcatgctttggaaatttggaagatggttttattctttgagaagcaaatatgtttgcattaaatgctttgattgttcatatcaagaaattgattgaacgttctcaaaccctgtttacggtacttggtaagagggagccggtttgggagagaccattgcatcgctgtccaagtgtttcttgttaagtgcttttaaactggagaggctaacctcaaaatattttttttaactgcattctataataaatgggcacagtatgctccttacaga

SEQ ID NO: 457359 - DNA, 1527 bp, Homo sapiens
tgtggaggtggctggtcacgacttcttcggaggtggcagccgagatcggggtgggatggaaacaagtggaagatgcgaccccagtcataaactatgatctcttatatgccatctccaagctggggccaggggaaaagtatgaattgcacgcagcgactgacaccactcccagcgtggtggtccatgtatgtgagagtgatcaagagaaggaggaagaagaggaaatggaaagaatgaggagacctaagccaaaaattatccagaccaggaggccggagtacacgccgatccacctcagctgaactggcacgcgacgaggacgcattccaaatcatactcacgggaggaatcgcctagtgcagagaggttgtgaaaacagcagcaatgcaatgtggaaattgtagcgtttcctttcttccctcatgttctcatgtttgtgcatgtatattactgatttacaagactaacctttgttcgtatataaagttacaccgttgttgttttacatcttttgggaagccaggaaagcgtttggaaaacgtatcacctttcccagattctcggattctcgactctttgcaacagcacttgcttgcggaactcttcctggaatgcattcactcagcatccccaaccgtgcaacgtgtaacttgtgcttttgcaaaagaagttgatctgaaattcctctgtagaatttagcttatacaattcagagaatagcagtttcactgccaacttttagtgggtgagaaattttagtttaggtgtttgggatcggacctcagtttctgttgtttcttttatgtggtggtttctatacatgaatcatagccaaaaacttttttggaaactgttggttgagatagttggttcttttaccccacgaagacatcaagatacacttgtaaataaagctgatagcatatattcatacctgttgtacacttgggtgaaaagtatggcagtgggagactaagatgtattaacctacctgtgaatcatatgttgtaggaaaagctgttcccatgtctaacaggacttgaattcaaagcatgtcaagtggatagtagatctgtggcgatatgagagggatgcagtgcctttccccattcattcctgatggaattgttatactaggttaacatttgtaatttttttctagttgtaatgtgtatgtctggtaaataggtattatattttggccttacaataccgtaacaatgtttgtcattttgaaatacttaatgccaagtaacaatgcatgctttggaaatttggaagatggttttattctttgagaagcaaatatgtttgcattaaatgctttgattgttcatatcaagaaattgattgaacgttctcaaaccctgtttacggtacttggtaagagggagccggtttgggagagaccattgcatcgctgtccaagtgtttcttgttaagtgcttttaaactggagaggctaacctcaaaatattttttttaactgcattctataataaatgggcacagtatgctccttacaga

SEQ ID NO: 457360 - DNA, 721 bp, Homo sapiens
  misc_feature (35)..(35): n is a, c, g, or t
  misc_feature (97)..(97): n is a, c, g, or t
  misc_feature (101)..(101): n is a, c, g, or t
  misc_feature (104)..(104): n is a, c, g, or t
  misc_feature (107)..(107): n is a, c, g, or t
  misc_feature (119)..(119): n is a, c, g, or t
  misc_feature (158)..(158): n is a, c, g, or t
  misc_feature (162)..(162): n is a, c, g, or t
  misc_feature (204)..(204): n is a, c, g, or t
  misc_feature (226)..(226): n is a, c, g, or t
ttagatacactggggaaaagaaaagcggtagagcnaaatatgctagacctggttggtacacggggggggaaaaagttagggcgagggggagcacttnagtnggntantaactcgacctntttaaccaagaggtgggttggaaaaaggcggtggcccgngggngaacgaggacgggtaagtgcagtagcagggtcgaaggggagngtagagcgtggggctgtattanctagatggtgtgtgcatgcctttccccattcattcctgatggaattgttatactaggttaacatttgtaatttttttctagttgtaatgtgtatgtctggtaaataggtattatattttggccttacaataccgtaacaatgtttgtcattttgaaatacttaatgccaagtaacaatgcatgctttggaaatttggaagatggttttattctttgagaagcaaatatgtttgcattaaatgctttgattgttcatatcaagaaattgattgaacgttctcaaaccctgtttacggtacttggtaagagggagccggtttgggagagaccattgcatcgctgtccaagtgtttcttgttaagtgcttttaaactggagaggctaacctcaaaatattttttttaactgcattctataataaatgggcacagtatgctccttacagaaaagttgtcattttatttctagaataaatctgtgaaccttctaaattct

SEQ ID NO: 457361 - DNA, 549 bp, Homo sapiens
ccgctcccaacgcatgtgccgctcccaacgcatgtgccgctcccaacgcatgtgccgctcccaacgcatgtgcctttccccattcattcctgatggaattgttatactaggttaacatttgtaatttttttctagttgtaatgtgtatgtctggtaaataggtattatattttggccttacaataccgtaacaatgtttgtcattttgaaatacttaatgccaagtaacaatgcatgctttggaaatttggaagatggttttattctttgagaagcaaatatgtttgcattaaatgctttgattgttcatatcaagaaattgattgaacgttctcaaaccctgtttacggtacttggtaagagggagccggtttgggagagaccattgcatcgctgtccaagtgtttcttgttaagtgcttttaaactggagaggctaacctcaaaatattttttttaactgcattctataataaatgggcacagtatgctccttacagaaaagttgtcattttatttctagaataaatctgtgaaccttctaaattct

SEQ ID NO: 457362 - DNA, 1226 bp, Homo sapiens
aggacttgactcaggaatttgctgtccaaacaggatgctgtggaagctgcactttttttttccccagggagtgggggctggcccttactgctttataagcaccagctcaagaaggaacctacagcctcttggaaaggaatctcactaggggcttgactgcgtgggtctgtagcgctttcactgtaagaaagcaagatgcattttagaaactttaactacagttttagctccctgattgcctgtgtggcaaacagtgatatcttcagcgaaagtgaaaccagggccaaatttgagtccctctttaggacgtatgacaaggacatcacctttcagtattttaagagcttcaaacgagtcagaataaacttcagcaaccccttctccgcagcagatgccaggctccagctgcataagactgagtttctgggaaaggaaatgaagttatattttgctcagaccttacacataggaagctcacacctggctccgccaaatccagacaagcagtttctgatctcccctcccgcctctccgccagtgggatggaaacaagtggaagatgcgaccccagtcataaactatgatctcttatatgccatctccaagctggggccagatgattggctagagggtgcggcacaaaggaacttgtcagggtgatggagacattctgtatctggattgagcaatgcaagaacctgggtaaagacacagtcatggtaacagctgtatacatctgttgaaaactcatcaaacttatcatatttagaaagggtacattttgcttcatgtaaagtatgcctcaataaagtgtacttgattttaaaatcaggataaaggaaaaaaacattgatcttggataatgggcaggggttggggagaaggtcttaattatcatcatatccttttaaaaacgtttttcaagtgtgtgatgctctgatgacattcttaagacacagcaaggcaaagcagtatcccaaatgagagagtgagcattccaataaatattttctgtaagacactgatatgtctatgactatttgctaaatttaaaaatcaacttggaccatatttactcccttaaagtctaatagacgactaatttcttctatgttcagaacaaatatgttgctactttaagaacagcatacataggtgtggtcggccctctgtgtctaaggcttctgcatctgtggattcaaccaacaatggactgaaaatattcc

SEQ ID NO: 457363 - DNA, 297 bp, Homo sapiens
tcactaggggcttgactgcgtgggtctgtagcgctttcactgtaagaaagcaagatgcattttagaaactttaactacagttttagctccctgattgcctgtgtggcaaacagtgatatcttcagcgaaagtgaaaccagggtaaggcttctaatataacgtgattttctttagttttcaaagcattatgctaactgggactattaactgaatacttgggagaatgtggctctcttgtgggtttgggggttttgaaagaaatccaaagtctttcgagccttgaaaatcaaaagctgt

SEQ ID NO: 457364 - DNA, 469 bp, Homo sapiens
aaaatccacacaatttagacactttggagggtgaggggcaggtatgagtaatcaataatggtggtggggaggaagaatttatttcaaatctgcagttattgtgcagaataaaatgtggacaacgtgggcgtcacagaatgaaaccggtctttgagagatgccccattaggagagcagctgtcaaaaaaagcagtgctttcagcgcttggctgtgggtccacaaatgctgtcaatgaactatagttgaaggctgctgccaatacaacaccactgtgaaacagaatggtgtatgtaagtgtcatttatttataatttatatgttcacttactttctgaaaggaattacaatggccgtgtgcttaggtaagcttccaggcatgctttctagagcagcaattgtcaggaactcagggtcttactgattgatcttactctaaaaccttttcctctccatataaactaagcgcta

SEQ ID NO: 457365 - DNA, 2386 bp, Homo sapiens
aggacttgactcaggaatttgctgtccaaacaggatgctgtggaagctgcactttttttttccccagggagtgggggctggcccttactgctttataagcaccagctcaagaaggaacctacagcctcttggaaaggaatctcactaggggcttgactgcgtgggtctgtagcgctttcactgtaagaaagcaagatgcattttagaaactttaactacagttttagctccctgattgcctgtgtggcaaacagtgatatcttcagcgaaagtgaaaccagggccaaatttgagtccctctttaggacgtatgacaaggacatcacctttcagtattttaagagcttcaaacgagtcagaataaacttcagcaaccccttctccgcagcagatgccaggctccagctgcataagactgagtttctgggaaaggaaatgaagttatattttgctcagaccttacacataggaagctcacacctggctccgccaaatccagacaagcagtttctgatctcccctcccgcctctccgccagtgggatggaaacaagtggaagatgcgaccccagtcataaactatgatctcttatatgccatctccaagctggggccaggggaaaagtatgaattgcacgcagcgactgacaccactcccagcgtggtggtccatgtatgtgagagtgatcaagagaaggaggaagaagaggaaatggaaagaatgaggagacctaagccaaaaattatccagaccaggaggccggagtacacgccgatccacctcagctgaactggcacgcgacgaggacgcattccaaatcatactcacgggaggaatcttttactgtggaggtggctggtcacgacttcttcggaggtggcagccgagatcggggtggcagaaatcccagttcatgttgctcagaagagaatcaaggccgtgtccccttgttctaatgctgcacaccagttactgttcatggcacccgggaatgacttgggccaatcactgagtttgtggtgatcgcacaaggacatttgggactgtcttgagaaaacagataatgatagtgttttgtacttgttcttttctggtaggttctgtctgtgccaagggcaggttgatcagtgagctcaggagagagcttcctgtttctaagtggcctgcaggggccactctctactggtaggaagaggtaccacaggaagccgcctagtgcagagaggttgtgaaaacagcagcaatgcaatgtggaaattgtagcgtttcctttcttccctcatgttctcatgtttgtgcatgtatattactgatttacaagactaacctttgttcgtatataaagttacaccgttgttgttttacatcttttgggaagccaggaaagcgtttggaaaacgtatcacctttcccagattctcggattctcgactctttgcaacagcacttgcttgcggaactcttcctggaatgcattcactcagcatccccaaccgtgcaacgtgtaacttgtgcttttgcaaaagaagttgatctgaaattcctctgtagaatttagcttatacaattcagagaatagcagtttcactgccaacttttagtgggtgagaaattttagtttaggtgtttgggatcggacctcagtttctgttgtttcttttatgtggtggtttctatacatgaatcatagccaaaaacttttttggaaactgttggttgagatagttggttcttttaccccacgaagacatcaagatacacttgtaaataaagctgatagcatatattcatacctgttgtacacttgggtgaaaagtatggcagtgggagactaagatgtattaacctacctgtgaatcatatgttgtaggaaaagctgttcccatgtctaacaggacttgaattcaaagcatgtcaagtggatagtagatctgtggcgatatgagagggatgcagtgcctttccccattcattcctgatggaattgttatactaggttaacatttgtaatttttttctagttgtaatgtgtatgtctggtaaataggtattatattttggccttacaataccgtaacaatgtttgtcattttgaaatacttaatgccaagtaacaatgcatgctttggaaatttggaagatggttttattctttgagaagcaaatatgtttgcattaaatgctttgattgttcatatcaagaaattgattgaacgttctcaaaccctgtttacggtacttggtaagagggagccggtttgggagagaccattgcatcgctgtccaagtgtttcttgttaagtgcttttaaactggagaggctaacctcaaaatattttttttaactgcattctataataaatgggcacagtatgctccttacaga

SEQ ID NO: 457366 - DNA, 2161 bp, Homo sapiens
gaactatagttgaaggctgctgccaatacaacaccactgtgaaacagaatggtgtatgccaaatttgagtccctctttaggacgtatgacaaggacatcacctttcagtattttaagagcttcaaacgagtcagaataaacttcagcaaccccttctccgcagcagatgccaggctccagctgcataagactgagtttctgggaaaggaaatgaagttatattttgctcagaccttacacataggaagctcacacctggctccgccaaatccagacaagcagtttctgatctcccctcccgcctctccgccagtgggatggaaacaagtggaagatgcgaccccagtcataaactatgatctcttatatgccatctccaagctggggccaggggaaaagtatgaattgcacgcagcgactgacaccactcccagcgtggtggtccatgtatgtgagagtgatcaagagaaggaggaagaagaggaaatggaaagaatgaggagacctaagccaaaaattatccagaccaggaggccggagtacacgccgatccacctcagctgaactggcacgcgacgaggacgcattccaaatcatactcacgggaggaatcttttactgtggaggtggctggtcacgacttcttcggaggtggcagccgagatcggggtggcagaaatcccagttcatgttgctcagaagagaatcaaggccgtgtccccttgttctaatgctgcacaccagttactgttcatggcacccgggaatgacttgggccaatcactgagtttgtggtgatcgcacaaggacatttgggactgtcttgagaaaacagataatgatagtgttttgtacttgttcttttctggtaggttctgtctgtgccaagggcaggttgatcagtgagctcaggagagagcttcctgtttctaagtggcctgcaggggccactctctactggtaggaagaggtaccacaggaagccgcctagtgcagagaggttgtgaaaacagcagcaatgcaatgtggaaattgtagcgtttcctttcttccctcatgttctcatgtttgtgcatgtatattactgatttacaagactaacctttgttcgtatataaagttacaccgttgttgttttacatcttttgggaagccaggaaagcgtttggaaaacgtatcacctttcccagattctcggattctcgactctttgcaacagcacttgcttgcggaactcttcctggaatgcattcactcagcatccccaaccgtgcaacgtgtaacttgtgcttttgcaaaagaagttgatctgaaattcctctgtagaatttagcttatacaattcagagaatagcagtttcactgccaacttttagtgggtgagaaattttagtttaggtgtttgggatcggacctcagtttctgttgtttcttttatgtggtggtttctatacatgaatcatagccaaaaacttttttggaaactgttggttgagatagttggttcttttaccccacgaagacatcaagatacacttgtaaataaagctgatagcatatattcatacctgttgtacacttgggtgaaaagtatggcagtgggagactaagatgtattaacctacctgtgaatcatatgttgtaggaaaagctgttcccatgtctaacaggacttgaattcaaagcatgtcaagtggatagtagatctgtggcgatatgagagggatgcagtgcctttccccattcattcctgatggaattgttatactaggttaacatttgtaatttttttctagttgtaatgtgtatgtctggtaaataggtattatattttggccttacaataccgtaacaatgtttgtcattttgaaatacttaatgccaagtaacaatgcatgctttggaaatttggaagatggttttattctttgagaagcaaatatgtttgcattaaatgctttgattgttcatatcaagaaattgattgaacgttctcaaaccctgtttacggtacttggtaagagggagccggtttgggagagaccattgcatcgctgtccaagtgtttcttgttaagtgcttttaaactggagaggctaacctcaaaatattttttttaactgcattctataataaatgggcacagtatgctccttacaga

SEQ ID NO: 457367 - DNA, 1194 bp, Homo sapiens
ccgcgcgattccgagggggttaacggcggagccccggccgggcgcggaccggagcgcgtgaggctccggcgcgcaacccggagcagcccgctggggcgcacagggtcgcgcgggcgcggggatggaggacggcgtggccggtccccagctcggggccgcggcggaggcggcggaggcggccgaggcgcgagcgcggcccggggtgacgctgcggcccttcgcgcccctctcgggggcggccgaggcggacgagggcggcggcgactggagcttcattgactgcgagatggaggaggtggacctgcaggacctgcccagcgccaccatcgcctgtcacctggacccgcgcgtgttcgtggacggcctgtgccgggccaaatttgagtccctctttaggacgtatgacaaggacatcacctttcagtattttaagagcttcaaacgagtcagaataaacttcagcaaccccttctccgcagcagatgccaggctccagctgcataagactgagtttctgggaaaggaaatgaagttatattttgctcagaccttacacataggaagctcacacctggctccgccaaatccagacaagcagtttctgatctcccctcccgcctctccgccagtgggatggaaacaagtggaagatgcgaccccagtcataaactatgatctcttatatgccatctccaagctggggccaggggaaaagtatgaattgcacgcagcgactgacaccactcccagcgtggtggtccatgtatgtgagagtgatcaagagaaggaggaagaagaggaaatggaaagaatgaggagacctaagccaaaaattatccagaccaggaggccggagtacacgccgatccacctcagctgaactggcacgcgacgaggacgcattccaaatcatactcacgggaggaatcttttactgtggaggtggctggtcacgacttcttcggaggtggcagccgagatcggggtggcagaaatcccagttcatgttgctcagaagagaatcaaggccgtgtccccttgttctattgtgccccagtctgtctgccggatgttgggcatcccgggtcgggggtccgcagcttgggtgcttggacgtagtgtgtggccgccgggggttttggcctcgggtcggcgaaccggaggggggcttggggggcccccgtgggggggctc

SEQ ID NO: 457368 - DNA, 2131 bp, Homo sapiens
tgagcagtagatgagatcatcgagtgaaaggcacttccatcagcacctggctcacagtcagtgttcaatgcaggatttttgaaaaccataaaatgttggtggttcctgtcctgtcctctagggtttgggtgaggaagtgccaggctccagctgcataagactgagtttctgggaaaggaaatgaagttatattttgctcagaccttacacataggaagctcacacctggctccgccaaatccagacaagcagtttctgatctcccctcccgcctctccgccagtgggatggaaacaagtggaagatgcgaccccagtcataaactatgatctcttatatgccatctccaagctggggccaggggaaaagtatgaattgcacgcagcgactgacaccactcccagcgtggtggtccatgtatgtgagagtgatcaagagaaggaggaagaagaggaaatggaaagaatgaggagacctaagccaaaaattatccagaccaggaggccggagtacacgccgatccacctcagctgaactggcacgcgacgaggacgcattccaaatcatactcacgggaggaatcttttactgtggaggtggctggtcacgacttcttcggaggtggcagccgagatcggggtggcagaaatcccagttcatgttgctcagaagagaatcaaggccgtgtccccttgttctaatgctgcacaccagttactgttcatggcacccgggaatgacttgggccaatcactgagtttgtggtgatcgcacaaggacatttgggactgtcttgagaaaacagataatgatagtgttttgtacttgttcttttctggtaggttctgtctgtgccaagggcaggttgatcagtgagctcaggagagagcttcctgtttctaagtggcctgcaggggccactctctactggtaggaagaggtaccacaggaagccgcctagtgcagagaggttgtgaaaacagcagcaatgcaatgtggaaattgtagcgtttcctttcttccctcatgttctcatgtttgtgcatgtatattactgatttacaagactaacctttgttcgtatataaagttacaccgttgttgttttacatcttttgggaagccaggaaagcgtttggaaaacgtatcacctttcccagattctcggattctcgactctttgcaacagcacttgcttgcggaactcttcctggaatgcattcactcagcatccccaaccgtgcaacgtgtaacttgtgcttttgcaaaagaagttgatctgaaattcctctgtagaatttagcttatacaattcagagaatagcagtttcactgccaacttttagtgggtgagaaattttagtttaggtgtttgggatcggacctcagtttctgttgtttcttttatgtggtggtttctatacatgaatcatagccaaaaacttttttggaaactgttggttgagatagttggttcttttaccccacgaagacatcaagatacacttgtaaataaagctgatagcatatattcatacctgttgtacacttgggtgaaaagtatggcagtgggagactaagatgtattaacctacctgtgaatcatatgttgtaggaaaagctgttcccatgtctaacaggacttgaattcaaagcatgtcaagtggatagtagatctgtggcgatatgagagggatgcagtgcctttccccattcattcctgatggaattgttatactaggttaacatttgtaatttttttctagttgtaatgtgtatgtctggtaaataggtattatattttggccttacaataccgtaacaatgtttgtcattttgaaatacttaatgccaagtaacaatgcatgctttggaaatttggaagatggttttattctttgagaagcaaatatgtttgcattaaatgctttgattgttcatatcaagaaattgattgaacgttctcaaaccctgtttacggtacttggtaagagggagccggtttgggagagaccattgcatcgctgtccaagtgtttcttgttaagtgcttttaaactggagaggctaacctcaaaatattttttttaactgcattctataataaatgggcacagtatgctccttacaga

SEQ ID NO: 457369 - DNA, 2333 bp, Homo sapiens
aggacttgactcaggaatttgctgtccaaacaggatgctgtggaagctgcactttttttttccccagggagtgggggctggcccttactgctttataagcaccagctcaagaaggaacctacagcctcttggaaaggaatctcactaggggcttgactgcgtgggtctgtagcgctttcactgtaagaaagcaagatgcattttagaaactttaactacagttttagctccctgattgcctgtgtggcaaacagtgatatcttcagcgaaagtgaaaccagggccaaatttgagtccctctttaggacgtatgacaaggacatcacctttcagtattttaagagcttcaaacgagtcagaataaacttcagcaaccccttctccgcagcagatgccaggctccagctgcataagactgagtttctgggaaaggaaatgaagttatattttgctcagaccttacacataggaagctcacacctggctccgccaaatccagacaagcagtttctgatctcccctcccgcctctccgccagtgggatggaaacaagtggaagatgcgaccccagtcataaactatgatctcttatatgccatctccaagctggggccaggggaaaagtatgaattgcacgcagcgactgacaccactcccagcgtggtggtccatgtatgtgagagtgatcaagagaaggaggaagaagaggaaatggaaagaatgaggagacctaagccaaaaattatccagaccaggaggccggagtacacgccgatccacctcagctgaactggcacgcgacgaggacgcattccaaatcatactcacgggaggaatcttttactgtggaggtggctggtcacgacttcttcggaggtggcagccgagatcggggtggcagaaatcccagttcatgttgctcagaagagaatcaaggccgtgtccccttgttctaatgctgcacaccagttactgttcatggcacccgggaatgacttgggccaatcactgagtttgtggtgatcgcacaaggacatttgggactgtcttgagaaaacagataatgatagtgttttgtacttgttcttttctggtaggttctgtctgtgccaagggcaggttgatcagtgagctcaggagagagcttcctgtttctaagtggcctgcaggggccactctctactggtaggaagaggtaccacaggaagccgcctagtgcagagaggttgtgaaaacagcagcaatgcaatgtggaaattgtagcgtttcctttcttccctcatgttctcatgtttgtgcatgtatattactgatttacaagactaacctttgttcgtatataaagttacaccgttgttgttttacatcttttgggaagccaggaaagcgtttggttgcttgcggaactcttcctggaatgcattcactcagcatccccaaccgtgcaacgtgtaacttgtgcttttgcaaaagaagttgatctgaaattcctctgtagaatttagcttatacaattcagagaatagcagtttcactgccaacttttagtgggtgagaaattttagtttaggtgtttgggatcggacctcagtttctgttgtttcttttatgtggtggtttctatacatgaatcatagccaaaaacttttttggaaactgttggttgagatagttggttcttttaccccacgaagacatcaagatacacttgtaaataaagctgatagcatatattcatacctgttgtacacttgggtgaaaagtatggcagtgggagactaagatgtattaacctacctgtgaatcatatgttgtaggaaaagctgttcccatgtctaacaggacttgaattcaaagcatgtcaagtggatagtagatctgtggcgatatgagagggatgcagtgcctttccccattcattcctgatggaattgttatactaggttaacatttgtaatttttttctagttgtaatgtgtatgtctggtaaataggtattatattttggccttacaataccgtaacaatgtttgtcattttgaaatacttaatgccaagtaacaatgcatgctttggaaatttggaagatggttttattctttgagaagcaaatatgtttgcattaaatgctttgattgttcatatcaagaaattgattgaacgttctcaaaccctgtttacggtacttggtaagagggagccggtttgggagagaccattgcatcgctgtccaagtgtttcttgttaagtgcttttaaactggagaggctaacctcaaaatattttttttaactgcattctataataaatgggcacagtatgctccttacaga

SEQ ID NO: 457370 - DNA, 2210 bp, Homo sapiens
aggacttgactcaggaatttgctgtccaaacaggatgctgtggaagctgcactttttttttccccagggagtgggggctggcccttactgctttataagcaccagctcaagaaggaacctacagcctcttggaaaggaatctcactaggggcttgactgcgtgggtctgtagcgctttcactgtaagaaagcaagatgcattttagaaactttaactacagttttagctccctgattgcctgtgtggcaaacagtgatatcttcagcgaaagtgaaaccagggccaaatttgagtccctctttaggacgtatgacaaggacatcacctttcagtattttaagagcttcaaacgagtcagaataaacttcagcaaccccttctccgcagcagatgccaggctccagctgcataagactgagtttctgggaaaggaaatgaagttatattttgctcagaccttacacataggaagctcacacctggctccgccaaatccagacaagcagtttctgatctcccctcccgcctctccgccagtgggatggaaacaagtggaagatgcgaccccagtcataaactatgatctcttatatgccatctccaagctggggccaggggaaaagtatgaattgcacgcagcgactgacaccactcccagcgtggtggtccatgtatgtgagagtgatcaagagaaggaggaagaagaggaaatggaaagaatgaggagacctaagccaaaaattatccagaccaggaggccggagtacacgccgatccacctcagctgaactggcacgcgacgaggacgcattccaaatcatactcacgggaggaatcttttactgtggaggtggctggtcacgacttcttcggaggtggcagccgagatcggggtggcagaaatcccagttcatgttgctcagaagagaatcaaggccgtgtccccttgttctaatgctgcacaccagttactgttcatggcacccgggaatgacttgggccaatcactgagtttgtggtgatcgcacaaggacatttgggactgtcttgagaaaacagataatgatagtgttttgtacttgttcttttctggtaggttctgtctgtgccaagggcaggttgatcagtgagctcaggagagagcttcctgtttctaagtggcctgcaggggccactctctactggtaggaagaggtaccacaggaagccgcctagtgcagagaggttgtgaaaacagcagcaatgcaatgtggaaattgtagcgtttcctttcttccctcatgttctcatgtttgtgcatgtatattactgatttacaagactaacctttgttcgtatataaagttacaccgttgttgttttacatcttttgggaagccaggaaagcgtttggaaaacgtatcacctttcccagattctcggattctcgactctttgcaacagcacttgcttgcggaactcttcctggaatgcattcactcagcatccccaaccgtgcaacgtgtaacttgtgcttttgcaaaagaagttgatctgaaattcctctgtagaatttagcttatacaattcagagaatagcagtttcactgccaacttttagtgggtgagaaattttagtttaggtgtttgggatcggacctcagtttctgttgtttcttttatgtggtggtttctatacatgaatcatagccaaaaacttttttggaaactgttggttgagatagttggttcttttaccccacgaagacatcaagatacacttgtaaataaagctgatagcatatattcatacctgttgtacacttgggtgaaaagtatggcagtgggagactaagatgtattaacctacctgtgaatcatatgttgtaggaaaagctgttcccatgtctaacaggacttgaattcaaagcatgtcaagtggatagtagatctgtggcgatatgagagggatgcagtgcctttccccattcattcctgatggaattgttatactaggttaacatttgtaatttttttctagttgtaatgtgtatgtctggtaaataggtattatattttggccttacaataccgtaacaatgtttgtcattttgaaatacttaatgccaagtaacaatgcatgctttggaaatttggaagatggttttattctttgagaagcaaatatgtttgcattaaatgctttgattgttcatatcaagaaattgat

SEQ ID NO: 457371 - DNA, 1610 bp, Homo sapiens
  misc_feature (1524)..(1524): n is a, c, g, or t
  misc_feature (1527)..(1528): n is a, c, g, or t
  misc_feature (1533)..(1533): n is a, c, g, or t
  misc_feature (1540)..(1540): n is a, c, g, or t
  misc_feature (1543)..(1543): n is a, c, g, or t
aggacttgactcaggaatttgctgtccaaacaggatgctgtggaagctgcactttttttttccccagggagtgggggctggcccttactgctttataagcaccagctcaagaaggaacctacagcctcttggaaaggaatctcactaggggcttgactgcgtgggtctgtagcgctttcactgtaagaaagcaagatgcattttagaaactttaactacagttttagctccctgattgcctgtgtggcaaacagtgatatcttcagcgaaagtgaaaccagggccaaatttgagtccctctttaggacgtatgacaaggacatcacctttcagtattttaagagcttcaaacgagtcagaataaacttcagcaaccccttctccgcagcagatgccaggctccagctgcataagactgagtttctgggaaaggaaatgaagttatattttgctcagaccttacacataggaagctcacacctggctccgccaaatccagacaagcagtttctgatctcccctcccgcctctccgccagtgggatggaaacaagtggaagatgcgaccccagtcataaactatgatctcttatatgccatctccaagctggggccaggggaaaagtatgaattgcacgcagcgactgacaccactcccagcgtggtggtccatgtatgtgagagtgatcaagagaaggaggaagaagaggaaatggaaagaatgaggagacctaagccaaaaattatccagaccaggaggccggagtacacgccgatccacctcagctgaactggcacgcgacgaggacgcattccaaatcatactcacgggaggaatcttttactgtggaggtggctggtcacgacttcttcggaggtggcagccgagatcggggtggcagaaatcccagttcatgttgctcagaagagaatcaaggccgtgtccccttgttctaatgctgcacaccagttactgttcatggcacccgggaatgacttgggccaatcactgagtttgtggtgatcgcacaaggacatttgggactgtcttgagaaaacagataatgatagtgttttgtacttgttcttttctggtaggttctgtctgtgccaagggcaggttgatcagtgagctcaggagagagcttcctgtttctaagtggcctgcaggggccactctctactggtaggaagaggtaccacaggaagccgcctagtgcagagaggttgtgaaaacagcagcaatgcaatgtggaaattgtagcgtttcctttcttccctcatgttctcatgtttgtgcatgtatattactgatttacaagactaacctttgttcgtatataaagttacaccgttgttgttttacatcttttgggaagccaggaaagcgtttggaaaacgtatcacctttcccagattctcggattctcgactctttgcaacagcacttgcttgcggaactcttcctggaatgcattcactcagcatccccaaccgtgcaacgtgtaacttgtgcttttgcagnganntagtngagtcanganacccccccggtgtgtattccacgcgataaaacaattaagaggttgcacggtgaaaaccccccagggg

SEQ ID NO: 457372 - DNA, 796 bp, Homo sapiens
  misc_feature (7)..(7): n is a, c, g, or t
  misc_feature (30)..(30): n is a, c, g, or t
tgagaanaagaaattagggctagtacgagnctgggtgtgaatcggccgagggagaggtggtgggaatggctgcttcattcctcgaggatgcccgggccccacctgggcttgtctttctgtttagagggaagtgtaacatatctgccatgaggaacataaattcatgtaaagccattttctcttaaacaaaacaaaactttctaagtacagtcattctctaggatttgggaagctccttgcacttggaacagggctcaggtgggtggagcagtaaggcactacccagagagcttgctgctgcggccctgtcctgcggcctcaaagttcttctttactatatataacgtgcggtcatacctttcttcgttgtggtggggatggaagagcagagggagcatggcccaggggtgttgaggccagcggtgagagccgtgttagccaagacatggaactgtgttctcaagggttatgtggggcgtgggctctccatagtgtgtatgaaaagcttgttgactctagcggctcagagaggactttgctgggtttctttctgtgaatatctccgtgctgaccatgctggaattggatgattctgcaattcgggacctactgcaggggtccgtttagtaacgtcttgtctgtgatctttgttcttgacctctagaccccaagatgtgaacagtgcacgtgttaatgtcatctttgctcatgtgttataagccccaagttgctgtatattttcacaagtatgtctacacactggtcatgattttgataataaataacgataaatcga

SEQ ID NO: 457373 - DNA, 913 bp, Homo sapiens
ctctttctgtcttgatttttctgtgtgtctctctgcgtcttgtctatttgttttctctctttcttctctgtggccctcccctttgtctcttcctttctgttttctcctgtagttcctcctcttctctcccctgattgctcatgagtccccttgatcaggctgtaatacgtgctgtgtgtctcagtggaggttcctgctggggaggagtccgttgtcttgtgcgtgggggcccgaacataggccctgcagcccagctgcttgggggcattccactctgctggccaccagctgtgactgcaggtgaagtgaaactgctgctgtcctccgagacacccattgaggggaagaacatgtcctttgtgaatgatcttacagtcactcaggatgggaggaagatttatttcaccgattctagcagcaaatggcaaagacgagactacctgcttctggtgatggagggcacagatgacgggcgcctgctggagtatgatactgtgaccagggaagtaaaagttttattggaccagctgcggttcccgaatggagtccagctgtctcctgcagaagactttgtcctggtggcagaaacaaccatggccaggatacgaagagtctacgtttctggcctgatgaagggcggggctgatctgtttgtggagaacatgcctggatttccagacaacatccggcccagcagctctggggggtactgggtgggcatgtcgaccatccgccctaaccctgggttttccatgctggatttcttatctgagagaccctggattaaaaggatgatttttaagctctttagttcaagagaccggggatgaagttggtgccgcggtaacagcttcgttctagaactcaggacagggtggcatcggagaaggccggatgatccgaagggtagtgg

SEQ ID NO: 457374 - DNA, 2207 bp, Homo sapiens
  misc_feature (7)..(7): n is a, c, g, or t
  misc_feature (30)..(30): n is a, c, g, or t
tgagaanaagaaattagggctagtacgagnctgggtgtgaatcggccgagggaggtggtttctgcgggtgaggctggcgcccgtaccatgagcgaggcggacgggctgcgacagcgccggcccctgcggccgcaggtcgtcacagacgatgatggccaggccccggaggctaaggacggcagctcctttagcggcagagttttccgagtgaccttcttgatgctggctgtttctctcaccgttcccctgcttggagccatgatgctgctggaatctcctatagatccacagcctctcagcttcaaagaacccccgctcttgcttggtgttctgcatccaaatacgaagctgcgacaggcagaaaggctgtttgaaaatcaacttgttggaccggagtccatagcacatattggggatgtgatgtttactgggacagcagatggccgggtcgtaaaacttgaaaatggtgaaatagagaccattgcccggtttggttcgggcccttgcaaaacccgagatgatgagcctgtgtgtgggagacccctgggtatccgtgcagggcccaatgggactctctttgtggccgatgcatacaagggactatttgaagtaaatccctggaaacgtgaagtgaaactgctgctgtcctccgagacacccattgaggggaagaacatgtcctttgtgaatgatcttacagtcactcaggatgggaggaagatttatttcaccgattctagcagcaaatggcaaagacgagactacctgcttctggtgatggagggcacagatgacgggcgcctgctggagtatgatactgtgaccagggaagtaaaagttttattggaccagctgcggttcccgaatggagtccagctgtctcctgcagaagactttgtcctggtggcagaaacaaccatggccaggatacgaagagtctacgtttctggcctgatgaagggcggggctgatctgtttgtggagaacatgcctggatttccagacaacatccggcccagcagctctggggggtactgggtgggcatgtcgaccatccgccctaaccctgggttttccatgctggatttcttatctgagagaccctggattaaaaggatgatttttaagctctttagtcaagagacggtgatgaagtttgtgccgcggtacagcctcgtcctagaactcagcgacagcggtgccttccggagaagcctgcatgatcccgatgggctggtggccacctacatcagcgaggtgcacgaacacgatgggcacctgtacctgggctctttcaggtcccccttcctctgcagactcagcctccaggctgtttagccctcccagatagctgcccctgccacgcaggccaggagtcttcacactcaggcaccaggcctggtccaggaggagctgtggacacagtcgtggttcaagtgtccacatgcacctgttagtccctgagaggtggtgggaatggctgcttcattcctcgaggatgcccgggccccacctgggcttgtctttctgtttagagggaagtgtaacatatctgccatgaggaacataaattcatgtaaagccattttctcttaaacaaaacaaaactttctaagtacagtcattctctaggatttgggaagctccttgcacttggaacagggctcaggtgggtggagcagtaaggcactacccagagagcttgctgctgcggccctgtcctgcggcctcaaagttcttctttactatatataacgtgcggtcatacctttcttcgttgtggtggggatggaagagcagagggagcatggcccaggggtgttgaggccagcggtgagagccgtgttagccaagacatggaactgtgttctcaagggttatgtggggcgtgggctctccatagtgtgtatgaaaagcttgttgactctagcggctcagagaggactttgctgggtttctttctgtgaatatctccgtgctgaccatgctggaattggatgattctgcaattcgggacctactgcaggggtccgtttagtaacgtcttgtctgtgatctttgttcttgacctctagaccccaagatgtgaacagtgcacgtgttaatgtcatctttgctcatgtgttataagccccaagttgctgtatattttcacaagtatgtctacacactggtcatgattttgataataaataacgataaatcga

SEQ ID NO: 457375 - DNA, 1962 bp, Homo sapiens
  misc_feature (7)..(7): n is a, c, g, or t
  misc_feature (30)..(30): n is a, c, g, or t
tgagaanaagaaattagggctagtacgagnctgggtgtgaatcggccgagggagcttcaaagaacccccgctcttgcttggtgttctgcatccaaatacgaagctgcgacaggcagaaaggctgtttgaaaatcaacttgttggaccggagtccatagcacatattggggatgtgatgtttactgggacagcagatggccgggtcgtaaaacttgaaaatggtgaaatagagaccattgcccggtttggttcgggcccttgcaaaacccgagatgatgagcctgtgtgtgggagacccctgggtatccgtgcagggcccaatgggactctctttgtggccgatgcatacaagggactatttgaagtaaatccctggaaacgtgaagtgaaactgctgctgtcctccgagacacccattgaggggaagaacatgtcctttgtgaatgatcttacagtcactcaggatgggaggaagatttatttcaccgattctagcagcaaatggcaaagacgagactacctgcttctggtgatggagggcacagatgacgggcgcctgctggagtatgatactgtgaccagggaagtaaaagttttattggaccagctgcggttcccgaatggagtccagctgtctcctgcagaagactttgtcctggtggcagaaacaaccatggccaggatacgaagagtctacgtttctggcctgatgaagggcggggctgatctgtttgtggagaacatgcctggatttccagacaacatccggcccagcagctctggggggtactgggtgggcatgtcgaccatccgccctaaccctgggttttccatgctggatttcttatctgagagaccctggattaaaaggatgatttttaagctctttagtcaagagacggtgatgaagtttgtgccgcggtacagcctcgtcctagaactcagcgacagcggtgccttccggagaagcctgcatgatcccgatgggctggtggccacctacatcagcgaggtgcacgaacacgatgggcacctgtacctgggctctttcaggtcccccttcctctgcagactcagcctccaggctgtttagccctcccagatagctgcccctgccacgcaggccaggagtcttcacactcaggcaccaggcctggtccaggaggagctgtggacacagtcgtggttcaagtgtccacatgcacctgttagtccctgagaggtggtgggaatggctgcttcattcctcgaggatgcccgggccccacctgggcttgtctttctgtttagagggaagtgtaacatatctgccatgaggaacataaattcatgtaaagccattttctcttaaacaaaacaaaactttctaagtacagtcattctctaggatttgggaagctccttgcacttggaacagggctcaggtgggtggagcagtaaggcactacccagagagcttgctgctgcggccctgtcctgcggcctcaaagttcttctttactatatataacgtgcggtcatacctttcttcgttgtggtggggatggaagagcagagggagcatggcccaggggtgttgaggccagcggtgagagccgtgttagccaagacatggaactgtgttctcaagggttatgtggggcgtgggctctccatagtgtgtatgaaaagcttgttgactctagcggctcagagaggactttgctgggtttctttctgtgaatatctccgtgctgaccatgctggaattggatgattctgcaattcgggacctactgcaggggtccgtttagtaacgtcttgtctgtgatctttgttcttgacctctagaccccaagatgtgaacagtgcacgtgttaatgtcatctttgctcatgtgttataagccccaagttgctgtatattttcacaagtatgtctacacactggtcatgattttgataataaataacgataaatcga

SEQ ID NO: 457376 - DNA, 2200 bp, Homo sapiens
  misc_feature (21)..(21): n is a, c, g, or t
  misc_feature (250)..(250): n is a, c, g, or t
gcatgaaggggcctctaaggntttggtccagacctcgccgggggtttatttaataccgacgcaaaacttcgtctgtgagcggtggatggcgagctacggcgtcagtaggttcgcgtagtggccgtcatgacgagcgacggctggaaggccgcctcgcgagtcgcacgacgatgatgcaccccgagctaggacgagccttacgcgagtttcgagtgactctgatgctgctgttctctcacggtccctgttnagcatgatgctgtggatctcttgatccaagctctcgttaagacttcaaagaacccccgctcttgcttggtgttctgcatccaaatacgaagctgcgacaggcagaaaggctgtttgaaaatcaacttgttggaccggagtccatagcacatattggggatgtgatgtttactgggacagcagatggccgggtcgtaaaacttgaaaatggtgaaatagagaccattgcccggtttggttcgggcccttgcaaaacccgagatgatgagcctgtgtgtgggagacccctgggtatccgtgcagggcccaatgggactctctttgtggccgatgcatacaagggactatttgaagtaaatccctggaaacgtgaagtgaaactgctgctgtcctccgagacacccattgaggggaagaacatgtcctttgtgaatgatcttacagtcactcaggatgggaggaagatttatttcaccgattctagcagcaaatggcaaagacgagactacctgcttctggtgatggagggcacagatgacgggcgcctgctggagtatgatactgtgaccagggaagtaaaagttttattggaccagctgcggttcccgaatggagtccagctgtctcctgcagaagactttgtcctggtggcagaaacaaccatggccaggatacgaagagtctacgtttctggcctgatgaagggcggggctgatctgtttgtggagaacatgcctggatttccagacaacatccggcccagcagctctggggggtactgggtgggcatgtcgaccatccgccctaaccctgggttttccatgctggatttcttatctgagagaccctggattaaaaggatgatttttaagctctttagtcaagagacggtgatgaagtttgtgccgcggtacagcctcgtcctagaactcagcgacagcggtgccttccggagaagcctgcatgatcccgatgggctggtggccacctacatcagcgaggtgcacgaacacgatgggcacctgtacctgggctctttcaggtcccccttcctctgcagactcagcctccaggctgtttagccctcccagatagctgcccctgccacgcaggccaggagtcttcacactcaggcaccaggcctggtccaggaggagctgtggacacagtcgtggttcaagtgtccacatgcacctgttagtccctgagaggtggtgggaatggctgcttcattcctcgaggatgcccgggccccacctgggcttgtctttctgtttagagggaagtgtaacatatctgccatgaggaacataaattcatgtaaagccattttctcttaaacaaaacaaaactttctaagtacagtcattctctaggatttgggaagctccttgcacttggaacagggctcaggtgggtggagcagtaaggcactacccagagagcttgctgctgcggccctgtcctgcggcctcaaagttcttctttactatatataacgtgcggtcatacctttcttcgttgtggtggggatggaagagcagagggagcatggcccaggggtgttgaggccagcggtgagagccgtgttagccaagacatggaactgtgttctcaagggttatgtggggcgtgggctctccatagtgtgtatgaaaagcttgttgactctagcggctcagagaggactttgctgggtttctttctgtgaatatctccgtgctgaccatgctggaattggatgattctgcaattcgggacctactgcaggggtccgtttagtaacgtcttgtctgtgatctttgttcttgacctctagaccccaagatgtgaacagtgcacgtgttaatgtcatctttgctcatgtgttataagccccaagttgctgtatattttcacaagtatgtctacacactggtcatgattttgataataaataacgataaatcga

SEQ ID NO: 457377 - DNA, 2984 bp, Homo sapiens
aaccactcgcgttctgggccccggagtccgagacaggcggggaccccggcagctcccggtgctatctctgagcgggttccgagccccacttccgggcggtcagaattagcctcagagcgccgagcaacgacgcgccggggacctcccgcccatgaggccggaaggggcggggagaacgctgcggaatggtccctgggcgcaacgtcatttccgcgtacgggggagggcgggcctggagcctgagccggcgccgctcagtgtgaggtggtttctgcgggtgaggctggcgcccgtaccatgagcgaggcggacgggctgcgacagcgccggcccctgcggccgcaggtcgtcacagacgatgatggccaggccccggaggctaaggacggcagctcctttagcggcagagttttccgagtgaccttcttgatgctggctgtttctctcaccgttcccctgcttggagccatgatgctgctggaatctcctatagatccacagcctctcagcttcaaagaacccccgctcttgcttggtgttctgcatccaaatacgaagctgcgacaggcagaaaggctgtttgaaaatcaacttgttggaccggagtccatagcacatattggggatgtgatgtttactgggacagcagatggccgggtcgtaaaacttgaaaatggtgaaatagagaccattgcccggtttggttcgggcccttgcaaaacccgagatgatgagcctgtgtgtgggagacccctgggtatccgtgcagggcccaatgggactctctttgtggccgatgcatacaagggactatttgaagtaaatccctggaaacgtgaagtgaaactgctgctgtcctccgagacacccattgaggggaagaacatgtcctttgtgaatgatcttacagtcactcaggatgggaggaagatttatttcaccgattctagcagcaaatggcaaagacgagactacctgcttctggtgatggagggcacagatgacgggcgcctgctggagtatgatactgtgaccagggaagtaaaagttttattggaccagctgcggttcccgaatggagtccagctgtctcctgcagaagactttgtcctggtggcagaaacaaccatggccaggatacgaagagtctacgtttctggcctgatgaagggcggggctgatctgtttgtggagaacatgcctggatttccagacaacatccggcccagcagctctggggggtactgggtgggcatgtcgaccatccgccctaaccctgggttttccatgctggatttcttatctgagagaccctggattaaaaggatgatttttaaggcgtccctcaggatctgcacgccccgctttgaggaaagcagtgggattttgctttttgttttggaagccatgttgtgtggtctgtggacctgcttgctttttttgaatgtgagctgctctcaaatctccatcatttgcaccttgcctatttgaaatgttttaaatctaaacagaagacttgtgtattccagggaagctgcgctggttgtgatctggtgagtggaggtcattctgagccttggctgcagtgctgtgaccacgtcggatgtgatatgtctctctcagttcagccgggccatccagagatgtgcttgcgttgctgtccttgtgctggggagcctctttggcctgatcttcacagggacaggggtggggtggggcctgctttggggcccctgggctgggagtgggagctggattagctgtcctgtggggcactgccctgtggggctgccctgtcatgggaaggagtcagaccgttcctggatggtgggggcggcacggttgatctgcgcacagtgttcttggccagctggtgaactttccctgcactgtgcttccctctagctctttagtcaagagacggtgatgaagtttgtgccgcggtacagcctcgtcctagaactcagcgacagcggtgccttccggagaagcctgcatgatcccgatgggctggtggccacctacatcagcgaggtgcacgaacacgatgggcacctgtacctgggctctttcaggtcccccttcctctgcagactcagcctccaggctgtttagccctcccagatagctgcccctgccacgcaggccaggagtcttcacactcaggcaccaggcctggtccaggaggagctgtggacacagtcgtggttcaagtgtccacatgcacctgttagtccctgagaggtggtgggaatggctgcttcattcctcgaggatgcccgggccccacctgggcttgtctttctgtttagagggaagtgtaacatatctgccatgaggaacataaattcatgtaaagccattttctcttaaacaaaacaaaactttctaagtacagtcattctctaggatttgggaagctccttgcacttggaacagggctcaggtgggtggagcagtaaggcactacccagagagcttgctgctgcggccctgtcctgcggcctcaaagttcttctttactatatataacgtgcggtcatacctttcttcgttgtggtggggatggaagagcagagggagcatggcccaggggtgttgaggccagcggtgagagccgtgttagccaagacatggaactgtgttctcaagggttatgtggggcgtgggctctccatagtgtgtatgaaaagcttgttgactctagcggctcagagaggactttgctgggtttctttctgtgaatatctccgtgctgaccatgctggaattggatgattctgcaattcgggacctactgcaggggtccgtttagtaacgtcttgtctgtgatctttgttcttgacctctagaccccaagatgtgaacagtgcacgtgttaatgtcatctttgctcatgtgttataagccccaagttgctgtatattttcacaagtatgtctacacactggtcatgattttgataataaataacgataaatcga

SEQ ID NO: 457378 - DNA, 2443 bp, Homo sapiens
aaccactcgcgttctgggccccggagtccgagacaggcggggaccccggcagctcccggtgctatctctgagcgggttccgagccccacttccgggcggtcagaattagcctcagagcgccgagcaacgacgcgccggggacctcccgcccatgaggccggaaggggcggggagaacgctgcggaatggtccctgggcgcaacgtcatttccgcgtacgggggagggcgggcctggagcctgagccggcgccgctcagtgtgaggtggtttctgcgggtgaggctggcgcccgtaccatgagcgaggcggacgggctgcgacagcgccggcccctgcggccgcaggtcgtcacagacgatgatggccaggccccggaggctaaggacggcagctcctttagcggcagagttttccgagtgaccttcttgatgctggctgtttctctcaccgttcccctgcttggagccatgatgctgctggaatctcctatagatccacagcctctcagcttcaaagaacccccgctcttgcttggtgttctgcatccaaatacgaagctgcgacaggcagaaaggctgtttgaaaatcaacttgttggaccggagtccatagcacatattggggatgtgatgtttactgggacagcagatggccgggtcgtaaaacttgaaaatggtgaaatagagaccattgcccggtttggttcgggcccttgcaaaacccgagatgatgagcctgtgtgtgggagacccctgggtatccgtgcagggcccaatgggactctctttgtggccgatgcatacaagggactatttgaagtaaatccctggaaacgtgaagtgaaactgctgctgtcctccgagacacccattgaggggaagaacatgtcctttgtgaatgatcttacagtcactcaggatgggaggaagatttatttcaccgattctagcagcaaatggcaaagacgagactacctgcttctggtgatggagggcacagatgacgggcgcctgctggagtatgatactgtgaccagggaagtaaaagttttattggaccagctgcggttcccgaatggagtccagctgtctcctgcagaagactttgtcctggtggcagaaacaaccatggccaggatacgaagagtctacgtttctggcctgatgaagggcggggctgatctgtttgtggagaacatgcctggatttccagacaacatccggcccagcagctctggggggtactgggtgggcatgtcgaccatccgccctaaccctgggttttccatgctggatttcttatctgagagaccctggattaaaaggatgatttttaagctctttagtcaagagacggtgatgaagtttgtgccgcggtacagcctcgtcctagaactcagcgacagcggtgccttccggagaagcctgcatgatcccgatgggctggtggccacctacatcagcgaggtgcacgaacacgatgggcacctgtacctgggctctttcaggtcccccttcctctgcagactcagcctccaggctgtttagccctcccagatagctgcccctgccacgcaggccaggagtcttcacactcaggcaccaggcctggtccaggaggagctgtggacacagtcgtggttcaagtgtccacatgcacctgttagtccctgagaggtggtgggaatggctgcttcattcctcgaggatgcccgggccccacctgggcttgtctttctgtttagagggaagtgtaacatatctgccatgaggaacataaattcatgtaaagccattttctcttaaacaaaacaaaactttctaagtacagtcattctctaggatttgggaagctccttgcacttggaacagggctcaggtgggtggagcagtaaggcactacccagagagcttgctgctgcggccctgtcctgcggcctcaaagttcttctttactatatataacgtgcggtcatacctttcttcgttgtggtggggatggaagagcagagggagcatggcccaggggtgttgaggccagcggtgagagccgtgttagccaagacatggaactgtgttctcaagggttatgtggggcgtgggctctccatagtgtgtatgaaaagcttgttgactctagcggctcagagaggactttgctgggtttctttctgtgaatatctccgtgctgaccatgctggaattggatgattctgcaattcgggacctactgcaggggtccgtttagtaacgtcttgtctgtgatctttgttcttgacctctagaccccaagatgtgaacagtgcacgtgttaatgtcatctttgctcatgtgttataagccccaagttgctgtatattttcacaagtatgtctacacactggtcatgattttgataataaataacgataaatcgacttctgctgattaaccttttaaaaaa

SEQ ID NO: 457379 - DNA, 2875 bp, Homo sapiens
  misc_feature (2701)..(2701): n is a, c, g, or t
aaccactcgcgttctgggccccggagtccgagacaggcggggaccccggcagctcccggtgctatctctgagcgggttccgagccccacttccgggcggtcagaattagcctcagagcgccgagcaacgacgcgccggggacctcccgcccatgaggccggaaggggcggggagaacgctgcggaatggtccctgggcgcaacgtcatttccgcgtacgggggagggcgggcctggagcctgagccggcgccgctcagtgtgaggtggtttctgcgggtgaggctggcgcccgtaccatgagcgaggcggacgggctgcgacagcgccggcccctgcggccgcaggtcgtcacagacgatgatggccaggccccggaggctaaggacggcagctcctttagcggcagagttttccgagtgaccttcttgatgctggctgtttctctcaccgttcccctgcttggagccatgatgctgctggaatctcctatagatccacagcctctcagcttcaaagaacccccgctcttgcttggtgttctgcatccaaatacgaagctgcgacaggcagaaaggctgtttgaaaatcaacttgttggaccggagtccatagcacatattggggatgtgatgtttactgggacagcagatggccgggtcgtaaaacttgaaaatggtgaaatagagaccattgcccggtttggttcgggcccttgcaaaacccgagatgatgagcctgtgtgtgggagacccctgggtatccgtgcagggcccaatgggactctctttgtggccgatgcatacaagggactatttgaagtaaatccctggaaacgtgaagtgaaactgctgctgtcctccgagacacccattgaggggaagaacatgtcctttgtgaatgatcttacagtcactcaggatgggaggaagatttatttcaccgattctagcagcaaatggcaaagacgagactacctgcttctggtgatggagggcacagatgacgggcgcctgctggagtatgatactgtgaccagggaagtaaaagttttattggaccagctgcggttcccgaatggagtccagctgtctcctgcagaagactttgtcctggtggcagaaacaaccatggccaggatacgaagagtctacgtttctggcctgatgaagggcggggctgatctgtttgtggagaacatgcctggatttccagacaacatccggcccagcagctctggggggtactgggtgggcatgtcgaccatccgccctaaccctgggttttccatgctggatttcttatctgagagaccctggattaaaaggatgatttttaagctctttagtcaagagacggtgatgaagtttgtgccgcggtacagcctcgtcctagaactcagcgacagcggtgccttccggagaagcctgcatgatcccgatgggctggtggccacctacatcagcgaggtgcacgaacacgatgggcacctgtacctgggctctttcaggtcccccttcctctgcagactcagcctccaggctgtttagccctcccagatagctgcccctgccacgcaggccaggagtcttcacactcaggcaccaggcctggtccaggaggagctgtggacacagtcgtggttcaagtgtccacatgcacctgttagtccctgagaggtggtgggaatggctgcttcattcctcgaggatgcccgggccccacctgggcttgtctttctgtttagagggaagtgtaacatatctgccatgaggaacataaattcatgtaaagccattttctcttaaacaaaacaaaactttctaagtacagtcattctctaggatttgggaagctccttgcacttggaacagggctcaggtgggtggagcagtaaggcactacccagagagcttgctgctgcggccctgtcctgcggcctcaaagttcttctttactatatataacgtgcggtcatacctttcttcgttgtggtggggatggaagagcagagggagcatggcccaggggtgttgaggccagcggtgagagccgtgttagccaagacatggaactgtgttctcaagggttatgtggggcgtgggctctccatagtgtgtatgaaaagcttgttgactctagcggctcagagaggactttgctgggtttctttctgtgaatatctccgtgctgaccatgctggaattggatgattctgcaattcgggacctactgcaggggtccgtttagtaacgtcttgtctgtgatctttgttcttgacctctagaccccaagatgtgaacagtgcacgtgttaatgtcatctttgctcatgtgttataagccccaagttgctgtatattttcacaagtatgtctacacactggtcatgattttgataataaataacgataaatcgaaaaaaaaaaaaaaaaaaaaaaaaaaacaaaaaaaaaggggggggggcaaaaattcccccggagggggggccgcaagacttgcggccgctacacccaggcttttccgtgtatcacaaggggggccccctataagggggagcgcgcattatattaaagcgtaggaccaggggcgccggcgtgtttacacaacgcttcggcgaagggggaaacacgcgggaacgctggggagacccctgggggagggggagcccacaattcgcggggggggagccattactgcgggnacaacccaccactacgacggaaattataaaccgcccgaggggagaataattaacactttcacacgcggctcaagtcgggggaacacacacggcggataatacatcgcggctagaactttccggcccacaggggtaagcttcagaactcttttcccgagccgccataacaaccgg

SEQ ID NO: 457380 - DNA, 2747 bp, Homo sapiens
aaccactcgcgttctgggccccggagtccgagacaggcggggaccccggcagctcccggtgctatctctgagcgggttccgagccccacttccgggcggtcagaattagcctcagagcgccgagcaacgacgcgccggggacctcccgcccatgaggccggaaggggcggggagaacgctgcggaatggtccctgggcgcaacgtcatttccgcgtacgggggagggcgggcctggagcctgagccggcgccgctcagtgtgaggtggtttctgcgggtgaggctggcgcccgtaccatgagcgaggcggacgggctgcgacagcgccggcccctgcggccgcaggtcgtcacagacgatgatggccaggccccggaggctaaggacggcagctcctttagcggcagagttttccgagtgaccttcttgatgctggctgtttctctcaccgttcccctgcttggagccatgatgctgctggaatctcctatagatccacagcctctcagcttcaaagaacccccgctcttgcttggtgttctgcatccaaatacgaagctgcgacaggcagaaaggctgtttgaaaatcaacttgttggaccggagtccatagcacatattggggatgtgatgtttactgggacagcagatggccgggtcgtaaaacttgaaaatggtgaaatagagaccattgcccggtttggttcgggcccttgcaaaacccgagatgatgagcctgtgtgtgggagacccctgggtatccgtgcagggcccaatgggactctctttgtggccgatgcatacaagggactatttgaagtaaatccctggaaacgtgaagtgaaactgctgctgtcctccgagacacccattgaggggaagaacatgtcctttgtgaatgatcttacagtcactcaggatgggaggaagatttatttcaccgattctagcagcaaatggcaaagacgagactacctgcttctggtgatggagggcacagatgacgggcgcctgctggagtatgatactgtgaccagggaagtaaaagttttattggaccagctgcggttcccgaatggagtccagctgtctcctgcagaagactttgtcctggtggcagaaacaaccatggccaggatacgaagagtctacgtttctggcctgatgaagggcggggctgatctgtttgtggagaacatgcctggatttccagacaacatccggcccagcagctctggggggtactgggtgggcatgtcgaccatccgccctaaccctgggttttccatgctggatttcttatctgagagaccctggattaaaaggatgatttttaagctctttagtcaagagacggtgatgaagtttgtgccgcggtacagcctcgtcctagaactcagcgacagcggtgccttccggagaagcctgcatgatcccgatgggctggtggccacctacatcagcgaggtgcacgaacacgatgggcacctgtacctgggctctttcaggtcccccttcctctgcagactcagcctccaggctgtttagccctcccagatagctgcccctgccacgcaggccaggagtcttcacactcaggcaccaggcctggtccaggaggagctgtggacacagtcgtggttcaagtgtccacatgcacctgttagtccctgagaggtggtgggaatggctgcttcattcctcgaggatgcccgggccccacctgggcttgtctttctgtttagagggaagtgtaacatatctgccatgaggaacataaattcatgtaaagccattttctcttaaacaaaacaaaactttctaagtacagtcattctctaggatttgggaagctccttgcacttggaacagggctcaggtgggtggagcagtaaggcactacccagagagcttgctgctgcggccctgtcctgcggcctcaaagttcttctttactatatataacgtgcggtcatacctttcttcgttgtggtggggatggaagagcagagggagcatggcccaggggtgttgaggccagcggtgagagccgtgttagccaagacatggaactgtgttctcaagggttatgtggggcgtgggctctccatagtgtgtatgaaaagcttgttgactctagcggctcagagaggactttgctgggtttctttctgtgaatatctccgtgctgaccatgctggaattggatgattctgcaattcgggacctactgcaggggtccgtttagtaacgtcttgtctgtgatctttgttcttgacctctagaccccaagatgtgaacagtgcacgtgttaatgtcatctttgctcatgtgttataagccccaagttgctgtatattttcacaagtatgtctacacactggtcatgattttgataataaataacgataaatcgaaacaaaaaaataaaaacacaaacaacaaaaaaaatgaaggcgggggcaggcataaaagaaaattcacccacgaggggggccacaacaattcgaaagcctacacagagaaatgtgagtgcataacaagacgggcccccatgacgaggcgaagaatatataacaacagaacagacggcccgaatacaaacagagagaagcagggacaacaagagaaaccagatgaagcaaaggaagagacacaccaaccaatcggtggggtaacataggggggaacagcagcaactgaaacaaaagcagactaagagcaacatataagacaagcaggaggat

SEQ ID NO: 457381 - DNA, 1882 bp, Homo sapiens
ctctttctgtcttgatttttctgtgtgtctctctgcgtcttgtctatttgttttctctctttcttctctgtggccctcccctttgtctcttcctttctgttttctcctgtagttcctcctcttctctcccctgattgctcatgagtccccttgatcaggctgtaatacgtgctgtgtgtctcagtggaggttcctgctggggaggagtccgttgtcttgtgcgtgggggcccgaacataggccctgcagcccagctgcttgggggcattccactctgctggccaccagctgtgactgcaggtgaagtgaaactgctgctgtcctccgagacacccattgaggggaagaacatgtcctttgtgaatgatcttacagtcactcaggatgggaggaagatttatttcaccgattctagcagcaaatggcaaagacgagactacctgcttctggtgatggagggcacagatgacgggcgcctgctggagtatgatactgtgaccagggaagtaaaagttttattggaccagctgcggttcccgaatggagtccagctgtctcctgcagaagactttgtcctggtggcagaaacaaccatggccaggatacgaagagtctacgtttctggcctgatgaagggcggggctgatctgtttgtggagaacatgcctggatttccagacaacatccggcccagcagctctggggggtactgggtgggcatgtcgaccatccgccctaaccctgggttttccatgctggatttcttatctgagagaccctggattaaaaggatgatttttaagctctttagtcaagagacggtgatgaagtttgtgccgcggtacagcctcgtcctagaactcagcgacagcggtgccttccggagaagcctgcatgatcccgatgggctggtggccacctacatcagcgaggtgcacgaacacgatgggcacctgtacctgggctctttcaggtcccccttcctctgcagactcagcctccaggctgtttagccctcccagatagctgcccctgccacgcaggccaggagtcttcacactcaggcaccaggcctggtccaggaggagctgtggacacagtcgtggttcaagtgtccacatgcacctgttagtccctgagaggtggtgggaatggctgcttcattcctcgaggatgcccgggccccacctgggcttgtctttctgtttagagggaagtgtaacatatctgccatgaggaacataaattcatgtaaagccattttctcttaaacaaaacaaaactttctaagtacagtcattctctaggatttgggaagctccttgcacttggaacagggctcaggtgggtggagcagtaaggcactacccagagagcttgctgctgcggccctgtcctgcggcctcaaagttcttctttactatatataacgtgcggtcatacctttcttcgttgtggtggggatggaagagcagagggagcatggcccaggggtgttgaggccagcggtgagagccgtgttagccaagacatggaactgtgttctcaagggttatgtggggcgtgggctctccatagtgtgtatgaaaagcttgttgactctagcggctcagagaggactttgctgggtttctttctgtgaatatctccgtgctgaccatgctggaattggatgattctgcaattcgggacctactgcaggggtccgtttagtaacgtcttgtctgtgatctttgttcttgacctctagaccccaagatgtgaacagtgcacgtgttaatgtcatctttgctcatgtgttataagccccaagttgctgtatattttcacaagtatgtctacacactggtcatgattttgataataaataacgataaatcga

SEQ ID NO: 457382 - DNA, 2363 bp, Homo sapiens
aaccactcgcgttctgggccccggagtccgagacaggcggggaccccggcagctcccggtgctatctctgagcgggttccgagccccacttccgggcggtcagaattagcctcagagcgccgagcaacgacgcgccggggacctcccgcccatgaggccggaaggggcggggagaacgctgcggaatggtccctgggcgcaacgtcatttccgcgtacgggggagggcgggcctggagcctgagccggcgccgctcagtgtgaggtggtttctgcgggtgaggctggcgcccgtaccatgagcgaggcggacgggctgcgacagcgccggcccctgcggccgcaggtcgtcacagacgatgatggccaggccccggaggctaaggacggcagctcctttagcggcagagttttccgagtgaccttcttgatgctggctgtttctctcaccgttcccctgcttggagccatgatgctgctggaatctcctatagatccacagcctctcagcttcaaagaacccccgctcttgcttggtgttctgcatccaaatacgaagctgcgacaggcagaaaggctgtttgaaaatcaacttgttggaccggagtccatagcacatattggggatgtgatgtttactgggacagcagatggccgggtcgtaaaacttgaaaatggtgaaatagagaccattgcccggtttggttcgggcccttgcaaaacccgagatgatgagcctgtgtgtgggagacccctgggtatccgtgcagggcccaatgggactctctttgtggccgatgcatacaagggactatttgaagtaaatccctggaaacgtgaagtgaaactgctgctgtcctccgagacacccattgaggggaagaacatgtcctttgtgaatgatcttacagtcactcaggatgggaggaagatttatttcaccgattctagcagcaaatggcaaagacgagactacctgcttctggtgatggagggcacagatgacgggcgcctgctggagtatgatactgtgaccagggaagtaaaagttttattggaccagctgcggttcccgaatggagtccagctgtctcctgcagaagactttgtcctggtggcagaaacaaccatggccaggatacgaagagtctacgtttctggcctgatgaagggcggggctgatctgtttgtggagaacatgcctggatttccagacaacatccggcccagcagctctggggggtactgggtgggcatgtcgaccatccgccctaaccctgggttttccatgctggatttcttatctgagagaccctggattaaaaggatgatttttaagctctttagtcaagagacggtgatgaagtttgtgccgcggtacagcctcgtcctagaactcagcgacagcggtgccttccggagaagcctgcatgatcccgatgggctggtggccacctacatcagcgaggtgcacgaacacgatgggcacctgtacctgggctctttcaggtcccccttcctctgcagactcagcctccaggctgtttagccctcccagatagctgcccctgccacgcaggccaggagtcttcacactcaggcaccaggcctggtccaggaggagctgtggacacagtcgtggttcaagtgtccacatgcacctgttagtccctgagaggtggtgggaatggctgcttcattcctcgaggatgcccgggccccacctgggcttgtctttctgtttagagggaagtgtaacatatctgccatgaggaacataaattcatgtaaagccattttctcttaaacaaaacaaaactttctaagtacagtcattctctaggatttgggaagctccttgcacttggaacagggctcaggtgggtggagcagtaaggcactacccagagagcttgctgctgcggccctgtcctgcggcctcaaagttcttctttactatatataacgtgcggtcatacctttcttcgttgtggtggggatggaagagcagagggagcatggcccaggggtgttgaggccagcggtgagagccgtgttagccaagacatggaactgtgttctcaagggttatgtggggcgtgggctctccatagtgtgtatggaatatctccgtgctgaccatgctggaattggatgattctgcaattcgggacctactgcaggggtccgtttagtaacgtcttgtctgtgatctttgttcttgacctctagaccccaagatgtgaacagtgcacgtgttaatgtcatctttgctcatgtgttataagccccaagttgctgtatattttcacaagtatgtctacacactggtcatgattttgataataaataacgataaatcga

SEQ ID NO: 457383 - DNA, 2893 bp, Homo sapiens
ctggatcccattgtcctccctaggtttacctgttcaaccattttctgtgcatgtgaccaatctgtggttgctgtgccctgtcacatggccccatccagggctgtagcaccccatgctgggctgtccccttcctccctgaccatgtgctggaggctgcctttcgcctcaagggctgtgatccctgcaccgggctgtccctgggtgtacacctcctcacttgcatgggctctcacagcctgatctgggcctcactgtggggacacctcctcaccccgtgtgggccctgacagcccgtgccaggccactcccctgcagggacacctcctcacccaagcggagtgggcttgtctgggtcaccatggtctgccatcccctgcacacatgtaccctgctcagccccatgctcctgatggagttgtttaggaggggagtgatgtagtacaaagaatgtttttaaagagaactgcagctactgcaaggagaacagcttgcagcagggctcagctggctgtgggagcctgtgtggaagctgtctcagtgactggggagaggcggcagggcaggcccaggccaggaacacacacaacagatggcaagactggcagctgggcttgtagggcacagagagactgggatcaagggaaggctggggtcctggccctgtctccagagctggggaggctgttgaatttgaagtgctattagaaaggccaggcagacatgggtcccagacagtgagaaacttagcactggtgttggagatggcgatttgagagctttctgggaaagtgactagttgtaatagtgagagaggatgagatctcttagggggaagagagaagagaggagagtgggaaggatccacggccgaacagcaggagatggcatttcgtaggtagtgggaagccttgggaattttttgagctgtaatgcagttgatctatcgctgttgaacctagagtctagtcagcttgtctgtctgcttgaacatttccagtgactgggagacattattcgttggacacttgtttgggtattttcccttgtattaaaagctagaaatctgtctgttaatttccattccttggtcttaggcagtggagtgctttgtcataatttccgaccaggtgtccttctgctctgccagaaatcacgcctctcgccatctgttctctgcttaatactcttcaacagtcccgtgtgaccacagagtccaggtctaagctcttttgcctccgtccctgtaggcgtccctcaggatctgcacgccccgctttgaggaaagcagtgggattttgctttttgttttggaagccatgttgtgtggtctgtggacctgcttgctttttttgaatgtgagctgctctcaaatctccatcatttgcaccttgcctatttgaaatgttttaaatctaaacagaagacttgtgtattccagggaagctgcgctggttgtgatctggtgagtggaggtcattctgagccttggctgcagtgctgtgaccacgtcggatgtgatatgtctctctcagttcagccgggccatccagagatgtgcttgcgttgctgtccttgtgctggggagcctctttggcctgatcttcacagggacaggggtggggtggggcctgctttggggcccctgggctgggagtgggagctggattagctgtcctgtggggcactgccctgtggggctgccctgtcatgggaaggagtcagaccgttcctggatggtgggggcggcacggttgatctgcgcacagtgttcttggccagctggtgaactttccctgcactgtgcttccctctagctctttagtcaagagacggtgatgaagtttgtgccgcggtacagcctcgtcctagaactcagcgacagcggtgccttccggagaagcctgcatgatcccgatgggctggtggccacctacatcagcgaggtgcacgaacacgatgggcacctgtacctgggctctttcaggtcccccttcctctgcagactcagcctccaggctgtttagccctcccagatagctgcccctgccacgcaggccaggagtcttcacactcaggcaccaggcctggtccaggaggagctgtggacacagtcgtggttcaagtgtccacatgcacctgttagtccctgagaggtggtgggaatggctgcttcattcctcgaggatgcccgggccccacctgggcttgtctttctgtttagagggaagtgtaacatatctgccatgaggaacataaattcatgtaaagccattttctcttaaacaaaacaaaactttctaagtacagtcattctctaggatttgggaagctccttgcacttggaacagggctcaggtgggtggagcagtaaggcactacccagagagcttgctgctgcggccctgtcctgcggcctcaaagttcttctttactatatataacgtgcggtcatacctttcttcgttgtggtggggatggaagagcagagggagcatggcccaggggtgttgaggccagcggtgagagccgtgttagccaagacatggaactgtgttctcaagggttatgtggggcgtgggctctccatagtgtgtatgaaaagcttgttgactctagcggctcagagaggactttgctgggtttctttctgtgaatatctccgtgctgaccatgctggaattggatgattctgcaattcgggacctactgcaggggtccgtttagtaacgtcttgtctgtgatctttgttcttgacctctagaccccaagatgtgaacagtgcacgtgttaatgtcatctttgctcatgtgttataagccccaagttgctgtatattttcacaagtatgtctacacactggtcatgattttgataataaataacgataaatcga

SEQ ID NO: 457384 - DNA, 2732 bp, Homo sapiens
ctggatcccattgtcctccctaggtttacctgttcaaccattttctgtgcatgtgaccaatctgtggttgctgtgccctgtcacatggccccatccagggctgtagcaccccatgctgggctgtccccttcctccctgaccatgtgctggaggctgcctttcgcctcaagggctgtgatccctgcaccgggctgtccctgggtgtacacctcctcacttgcatgggctctcacagcctgatctgggcctcactgtggggacacctcctcaccccgtgtgggccctgacagcccgtgccaggccactcccctgcagggacacctcctcacccaagcggagtgggcttgtctgggtcaccatggtctgccatcccctgcacacatgtaccctgctcagccccatgctcctgatggagttgtttaggaggggagtgatgtagtacaaagaatgtttttaaagagaactgcagctactgcaaggagaacagcttgcagcagggctcagctggctgtgggagcctgtgtggaagctgtctcagtgactggggagaggcggcagggcaggcccaggccaggaacacacacaacagatggcaagactggcagctgggcttgtagggcacagagagactgggatcaagggaaggctggggtcctggccctgtctccagagctggggaggctgttgaatttgaagtgctattagaaaggccaggcagacatgggtcccagacagtgagaaacttagcactggtgttggagatggcgatttgagagctttctgggaaagtgactagttgtaatagtgagagaggatgagatctcttagggggaagagagaagagaggagagtgggaaggatccacggccgaacagcaggagatggcatttcgtaggtagtgggaagccttgggaattttttgagctgtaatgcagttgatctatcgctgttgaacctagagtctagtcagcttgtctgtctgcttgaacatttccagtgactgggagacattattcgttggacacttgtttgggtattttcccttgtattaaaagctagaaatctgtctgttaatttccattccttggtcttaggcagtggagtgctttgtcataatttccgaccaggtgtccttctgctctgccagaaatcacgcctctcgccatctgttctctgcttaatactcttcaacagtcccgtgtgaccacagagtccaggtctaagctcttttgcctccgtccctgtaggcgtccctcaggatctgcacgccccgccagggaagctgcgctggttgtgatctggtgagtggaggtcattctgagccttggctgcagtgctgtgaccacgtcggatgtgatatgtctctctcagttcagccgggccatccagagatgtgcttgcgttgctgtccttgtgctggggagcctctttggcctgatcttcacagggacaggggtggggtggggcctgctttggggcccctgggctgggagtgggagctggattagctgtcctgtggggcactgccctgtggggctgccctgtcatgggaaggagtcagaccgttcctggatggtgggggcggcacggttgatctgcgcacagtgttcttggccagctggtgaactttccctgcactgtgcttccctctagctctttagtcaagagacggtgatgaagtttgtgccgcggtacagcctcgtcctagaactcagcgacagcggtgccttccggagaagcctgcatgatcccgatgggctggtggccacctacatcagcgaggtgcacgaacacgatgggcacctgtacctgggctctttcaggtcccccttcctctgcagactcagcctccaggctgtttagccctcccagatagctgcccctgccacgcaggccaggagtcttcacactcaggcaccaggcctggtccaggaggagctgtggacacagtcgtggttcaagtgtccacatgcacctgttagtccctgagaggtggtgggaatggctgcttcattcctcgaggatgcccgggccccacctgggcttgtctttctgtttagagggaagtgtaacatatctgccatgaggaacataaattcatgtaaagccattttctcttaaacaaaacaaaactttctaagtacagtcattctctaggatttgggaagctccttgcacttggaacagggctcaggtgggtggagcagtaaggcactacccagagagcttgctgctgcggccctgtcctgcggcctcaaagttcttctttactatatataacgtgcggtcatacctttcttcgttgtggtggggatggaagagcagagggagcatggcccaggggtgttgaggccagcggtgagagccgtgttagccaagacatggaactgtgttctcaagggttatgtggggcgtgggctctccatagtgtgtatgaaaagcttgttgactctagcggctcagagaggactttgctgggtttctttctgtgaatatctccgtgctgaccatgctggaattggatgattctgcaattcgggacctactgcaggggtccgtttagtaacgtcttgtctgtgatctttgttcttgacctctagaccccaagatgtgaacagtgcacgtgttaatgtcatctttgctcatgtgttataagccccaagttgctgtatattttcacaagtatgtctacacactggtcatgattttgataataaataacgataaatcga

SEQ ID NO: 457385 - DNA, 850 bp, Homo sapiens
cagctcggtcctctcctcccacctctcaggactaacaggtgcatgtggacacttgaaccacgactgtgtcacagctcctcctggaccaggcctggtgcctgagtgtgaagactcctggcctgcgtggcaggggcagctatctgggagggctaaacagcctggaggctgagtctgcagaggaagggggacctgaaagagccatgaggaacataaattcatgtaaagccattttctcttaaacaaaacaaaactttctaagtacagtcattctctaggatttgggaagctccttgcacttggaacagggctcaggtgggtggagcagtaaggcactacccagagagcttgctgctgcggccctgtcctgcggcctcaaagttcttctttactatatataacgtgcggtcatacctttcttcgttgtggtggggatggaagagcagagggagcatggcccaggggtgttgaggccagcggtgagagccgtgttagccaagacatggaactgtgttctcaagggttatgtggggcgtgggctctccatagtgtgtatgaaaagcttgttgactctagcggctcagagaggactttgctgggtttctttctgtgaatatctccgtgctgaccatgctggaattggatgattctgcaattcgggacctactgcaggggtccgtttagtaacgtcttgtctgtgatctttgttcttgacctctagaccccaagatgtgaacagtgcacgtgttaatgtcatctttgctcatgtgttataagccccaagttgctgtatattttcacaagtatgtctacacactggtcatgattttgataataaataacgataaatcga

SEQ ID NO: 457386 - DNA, 408 bp, Homo sapiens
  misc_feature (19)..(19): n is a, c, g, or t
tgagctcggtcccatgacncggaacacgccagcggtgagagccgtgttagccaagacatggaactgtgttctcaagggttatgtggggcgtgggctctccatagtgtgtatgaaaagcttgttgactctagcggctcagagaggactttgctgggtttctttctgtgaatatctccgtgctgaccatgctggaattggatgattctgcaattcgggacctactgcaggggtccgtttagtaacgtcttgtctgtgatctttgttcttgacctctagaccccaagatgtgaacagtgcacgtgttaatgtcatctttgctcatgtgttataagccccaagttgctgtatattttcacaagtatgtctacacactggtcatgattttgataataaataacgataaatcga

SEQ ID NO: 457387 - DNA, 1541 bp, Homo sapiens
ctggatcccattgtcctccctaggtttacctgttcaaccattttctgtgcatgtgaccaatctgtggttgctgtgccctgtcacatggccccatccagggctgtagcaccccatgctgggctgtccccttcctccctgaccatgtgctggaggctgcctttcgcctcaagggctgtgatccctgcaccgggctgtccctgggtgtacacctcctcacttgcatgggctctcacagcctgatctgggcctcactgtggggacacctcctcaccccgtgtgggccctgacagcccgtgccaggccactcccctgcagggacacctcctcacccaagcggagtgggcttgtctgggtcaccatggtctgccatcccctgcacacatgtaccctgctcagccccatgctcctgatggagttgtttaggaggggagtgatgtagtacaaagaatgtttttaaagagaactgcagctactgcaaggagaacagcttgcagcagggctcagctggctgtgggagcctgtgtggaagctgtctcagtgactggggagaggcggcagggcaggcccaggccaggaacacacacaacagatggcaagactggcagctgggcttgtagggcacagagagactgggatcaagggaaggctggggtcctggccctgtctccagagctggggaggctgttgaatttgaagtgctattagaaaggccaggcagacatgggtcccagacagtgagaaacttagcactggtgttggagatggcgatttgagagctttctgggaaagtgactagttgtaatagtgagagaggatgagatctcttagggggaagagagaagagaggagagtgggaaggatccacggccgaacagcaggagatggcatttcgtaggtagtgggaagccttgggaattttttgagctgtaatgcagttgatctatcgctgttgaacctagagtctagtcagcttgtctgtctgcttgaacatttccagtgactgggagacattattcgttggacacttgtttgggtattttcccttgtattaaaagctagaaatctgtctgttaatttccattccttggtcttaggcagtggagtgctttgtcataatttccgaccaggtgtccttctgctctgccagaaatcacgcctctcgccatctgttctctgcttaatactcttcaacagtcctgtgttctcaagggttatgtggggcgtgggctctccatagtgtgtatgaaaagcttgttgactctagcggctcagagaggactttgctgggtttctttctgtgaatatctccgtgctgaccatgctggaattggatgattctgcaattcgggacctactgcaggggtccgtttagtaacgtcttgtctgtgatctttgttcttgacctctagaccccaagatgtgaacagtgcacgtgttaatgtcatctttgctcatgtgttataagccccaagttgctgtatattttcacaagtatgtctacacactggtcatgattttgataataaataacgataaatcga

SEQ ID NO: 457388 - DNA, 608 bp, Homo sapiens
ctgtgtgtctcagtggaggttcctgctggggaggagtccgttgtcttgtgcgtgggggcccgaacataggccctgcagcccagctgcttgggggcattccactctgctggccaccagctgtgactgcaggtcccttagttgctctctgcccagcttcctcatcaaattggggtcatagtagccctgcctgtgggattgttgcgagggtttaaaggcgatcacacctcgagagtgcttagcactcaatccatgttctttctattatttttcaaaacttactactacttttcttttctaaaaggagatgagtagaatgtcatatttctctcaaatagaactaacaaatagaactgaagcctgcctaacacttgcagtagatgttatcaagtcagttggccttagtaaaagaaggaattcctcatccttatagaaaagattctgcctttaatgaaattagtctaaaaaaatcatttaacacctaatactgtttttactataagaaggaataaatcttctgacaaatgacatggagaagtttcagtttttctttttaaatcagttaggttggttaatattttgcaattattgagaagttcctagttcaagtc

SEQ ID NO: 457389 - DNA, 434 bp, Homo sapiens
cttggtcctcccctgacctacttcccctctgttcatactgggccctgtgcacaaaggtttcttctcagcagctgagcctttgttcatgatggtcatagagcactttccatatatatatttggaccaagaccagtttggtgcttggctaaaattttttttctgaaattgaggggctatggttcactctctgcttgggtgaatttttcagagtctacgtttctggcctgatgaagggcggggctgatctgtttgtggagaacatgcctggatttccagacaacatccggcccagcagctctggggggtactgggtgggcatgtcgaccatccgccctaaccctgggttttccatgctggatttcttatctgagagaccctggattaaaaggatgatttttaaggtaactgtgaaaactgttattccaagaaagaaa

SEQ ID NO: 457390 - DNA, 2417 bp, Homo sapiens
aaccactcgcgttctgggccccggagtccgagacaggcggggaccccggcagctcccggtgctatctctgagcgggttccgagccccacttccgggcggtcagaattagcctcagagcgccgagcaacgacgcgccggggacctcccgcccatgaggccggaaggggcggggagaacgctgcggaatggtccctgggcgcaacgtcatttccgcgtacgggggagggcgggcctggagcctgagccggcgccgctcagtgtgaggtggtttctgcgggtgaggctggcgcccgtaccatgagcgaggcggacgggctgcgacagcgccggcccctgcggccgcaggtcgtcacagacgatgatggccaggccccggaggctaaggacggcagctcctttagcggcagagttttccgagtgaccttcttgatgctggctgtttctctcaccgttcccctgcttggagccatgatgctgctggaatctcctatagatccacagcctctcagcttcaaagaacccccgctcttgcttggtgttctgcatccaaatacgaagctgcgacaggcagaaaggctgtttgaaaatcaacttgttggaccggagtccatagcacatattggggatgtgatgtttactgggacagcagatggccgggtcgtaaaacttgaaaatggtgaaatagagaccattgcccggtttggttcgggcccttgcaaaacccgagatgatgagcctgtgtgtgggagacccctgggtatccgtgcagggcccaatgggactctctttgtggccgatgcatacaagggactatttgaagtaaatccctggaaacgtgaagtgaaactgctgctgtcctccgagacacccattgaggggaagaacatgtcctttgtgaatgatcttacagtcactcaggatgggaggaagatttatttcaccgattctagcagcaaatggcaaagacgagactacctgcttctggtgatggagggcacagatgacgggcgcctgctggagtatgatactgtgaccagggaagtaaaagttttattggaccagctgcggttcccgaatggagtccagctgtctcctgcagaagactttgtcctggtggcagaaacaaccatggccaggatacgaagagtctacgtttctggcctgatgaagggcggggctgatctgtttgtggagaacatgcctggatttccagacaacatccggcccagcagctctggggggtactgggtgggcatgtcgaccatccgccctaaccctgggttttccatgctggatttcttatctgagagaccctggattaaaaggatgatttttaagctctttagtcaagagacggtgatgaagtttgtgccgcggtacagcctcgtcctagaactcagcgacagcggtgccttccggagaagcctgcatgatcccgatgggctggtggccacctacatcagcgaggtgcacgaacacgatgggcacctgtacctgggctctttcaggtcccccttcctctgcagactcagcctccaggctgtttagccctcccagatagctgcccctgccacgcaggccaggagtcttcacactcaggcaccaggcctggtccaggaggagctgtggacacagtcgtggttcaagtgtccacatgcacctgttagtccctgagaggtggtgggaatggctgcttcattcctcgaggatgcccgggccccacctgggcttgtctttctgtttagagggaagtgtaacatatctgccatgaggaacataaattcatgtaaagccattttctcttaaacaaaacaaaactttctaagtacagtcattctctaggatttgggaagctccttgcacttggaacagggctcaggtgggtggagcagtaaggcactacccagagagcttgctgctgcggccctgtcctgcggcctcaaagttcttctttactatatataacgtgcggtcatacctttcttcgttgtggtggggatggaagagcagagggagcatggcccaggggtgttgaggccagcggtgagagccgtgttagccaagacatggaactgtgttctcaagggttatgtggggcgtgggctctccatagtgtgtatgaaaagcttgttgactctagcggctcagagaggactttgctgggtttctttctgtgaatatctccgtgctgaccatgctggaattggatgattctgcaattcgggacctactgcaggggtccgtttagtaacgtcttgtctgtgatctttgttcttgacctctagaccccaagatgtgaacagtgcacgtgttaatgtcatctttgctcatgtgttataagccccaagttgctgtatattttcacaagtatgtctacacactggtcatgattttgataataaataacgataaatcga

SEQ ID NO: 457391 - DNA, 2445 bp, Homo sapiens
aaccactcgcgttctgggccccggagtccgagacaggcggggaccccggcagctcccggtgctatctctgagcgggttccgagccccacttccgggcggtcagaattagcctcagagcgccgagcaacgacgcgccggggacctcccgcccatgaggccggaaggggcggggagaacgctgcggaatggtccctgggcgcaacgtcatttccgcgtacgggggagggcgggcctggagcctgagccggcgccgctcagtgtgaggtggtttctgcgggtgaggctggcgcccgtaccatgagcgaggcggacgggctgcgacagcgccggcccctgcggccgcaggtcgtcacagacgatgatggccaggccccggaggctaaggacggcagctcctttagcggcagagttttccgagtgaccttcttgatgctggctgtttctctcaccgttcccctgcttggagccatgatgctgctggaatctcctatagatccacagcctctcagcttcaaagaacccccgctcttgcttggtgttctgcatccaaatacgaagctgcgacaggcagaaaggctgtttgaaaatcaacttgttggaccggagtccatagcacatattggggatgtgatgtttactgggacagcagatggccgggtcgtaaaacttgaaaatggtgaaatagagaccattgcccggtttggttcgggcccttgcaaaacccgagatgatgagcctgtgtgtgggagacccctgggtatccgtgcagggcccaatgggactctctttgtggccgatgcatacaagggactatttgaagtaaatccctggaaacgtgaagtgaaactgctgctgtcctccgagacacccattgaggggaagaacatgtcctttgtgaatgatcttacagtcactcaggatgggaggaagatttatttcaccgattctagcagcaaatggcaaagacgagactacctgcttctggtgatggagggcacagatgacgggcgcctgctggagtatgatactgtgaccagggaagtaaaagttttattggaccagctgcggttcccgaatggagtccagctgtctcctgcagaagactttgtcctggtggcagaaacaaccatggccaggatacgaagagtctacgtttctggcctgatgaagggcggggctgatctgtttgtggagaacatgcctggatttccagacaacatccggcccagcagctctggggggtactgggtgggcatgtcgaccatccgccctaaccctgggttttccatgctggatttcttatctgagagaccctggattaaaaggatgatttttaagccagggaagctgcgctggttgtgatctgctctttagtcaagagacggtgatgaagtttgtgccgcggtacagcctcgtcctagaactcagcgacagcggtgccttccggagaagcctgcatgatcccgatgggctggtggccacctacatcagcgaggtgcacgaacacgatgggcacctgtacctgggctctttcaggtcccccttcctctgcagactcagcctccaggctgtttagccctcccagatagctgcccctgccacgcaggccaggagtcttcacactcaggcaccaggcctggtccaggaggagctgtggacacagtcgtggttcaagtgtccacatgcacctgttagtccctgagaggtggtgggaatggctgcttcattcctcgaggatgcccgggccccacctgggcttgtctttctgtttagagggaagtgtaacatatctgccatgaggaacataaattcatgtaaagccattttctcttaaacaaaacaaaactttctaagtacagtcattctctaggatttgggaagctccttgcacttggaacagggctcaggtgggtggagcagtaaggcactacccagagagcttgctgctgcggccctgtcctgcggcctcaaagttcttctttactatatataacgtgcggtcatacctttcttcgttgtggtggggatggaagagcagagggagcatggcccaggggtgttgaggccagcggtgagagccgtgttagccaagacatggaactgtgttctcaagggttatgtggggcgtgggctctccatagtgtgtatgaaaagcttgttgactctagcggctcagagaggactttgctgggtttctttctgtgaatatctccgtgctgaccatgctggaattggatgattctgcaattcgggacctactgcaggggtccgtttagtaacgtcttgtctgtgatctttgttcttgacctctagaccccaagatgtgaacagtgcacgtgttaatgtcatctttgctcatgtgttataagccccaagttgctgtatattttcacaagtatgtctacacactggtcatgattttgataataaataacgataaatcga

SEQ ID NO: 457392 - DNA, 1962 bp, Homo sapiens
gccgtggggtgaatcggccgaggctggaattcctatagatccacagcctctcagcttcaaagaacccccgctcttgcttggtgttctgcatccaaatacgaagctgcgacaggcagaaaggctgtttgaaaatcaacttgttggaccggagtccatagcacatattggggatgtgatgtttactgggacagcagatggccgggtcgtaaaacttgaaaatggtgaaatagagaccattgcccggtttggttcgggcccttgcaaaacccgagatgatgagcctgtgtgtgggagacccctgggtatccgtgcagggcccaatgggactctctttgtggccgatgcatacaagggactatttgaagtaaatccctggaaacgtgaagtgaaactgctgctgtcctccgagacacccattgaggggaagaacatgtcctttgtgaatgatcttacagtcactcaggatgggaggaagatttatttcaccgattctagcagcaaatggcaaagacgagactacctgcttctggtgatggagggcacagatgacgggcgcctgctggagtatgatactgtgaccagggaagtaaaagttttattggaccagctgcggttcccgaatggagtccagctgtctcctgcagaagactttgtcctggtggcagaaacaaccatggccaggatacgaagagtctacgtttctggcctgatgaagggcggggctgatctgtttgtggagaacatgcctggatttccagacaacatccggcccagcagctctggggggtactgggtgggcatgtcgaccatccgccctaaccctgggttttccatgctggatttcttatctgagagaccctggattaaaaggatgatttttaagctctttagtcaagagacggtgatgaagtttgtgccgcggtacagcctcgtcctagaactcagcgacagcggtgccttccggagaagcctgcatgatcccgatgggctggtggccacctacatcagcgaggtgcacgaacacgatgggcacctgtacctgggctctttcaggtcccccttcctctgcagactcagcctccaggctgtttagccctcccagatagctgcccctgccacgcaggccaggagtcttcacactcaggcaccaggcctggtccaggaggagctgtggacacagtcgtggttcaagtgtccacatgcacctgttagtccctgagaggtggtgggaatggctgcttcattcctcgaggatgcccgggccccacctgggcttgtctttctgtttagagggaagtgtaacatatctgccatgaggaacataaattcatgtaaagccattttctcttaaacaaaacaaaactttctaagtacagtcattctctaggatttgggaagctccttgcacttggaacagggctcaggtgggtggagcagtaaggcactacccagagagcttgctgctgcggccctgtcctgcggcctcaaagttcttctttactatatataacgtgcggtcatacctttcttcgttgtggtggggatggaagagcagagggagcatggcccaggggtgttgaggccagcggtgagagccgtgttagccaagacatggaactgtgttctcaagggttatgtggggcgtgggctctccatagtgtgtatgaaaagcttgttgactctagcggctcagagaggactttgctgggtttctttctgtgaatatctccgtgctgaccatgctggaattggatgattctgcaattcgggacctactgcaggggtccgtttagtaacgtcttgtctgtgatctttgttcttgacctctagaccccaagatgtgaacagtgcacgtgttaatgtcatctttgctcatgtgttataagccccaagttgctgtatattttcacaagtatgtctacacactggtcatgattttgataataaataacgataaatcga

SEQ ID NO: 457393 - DNA, 2797 bp, Homo sapiens
aaccactcgcgttctgggccccggagtccgagacaggcggggaccccggcagctcccggtgctatctctgagcgggttccgagccccacttccgggcggtcagaattagcctcagagcgccgagcaacgacgcgccggggacctcccgcccatgaggccggaaggggcggggagaacgctgcggaatggtccctgggcgcaacgtcatttccgcgtacgggggagggcgggcctggagcctgagccggcgccgctcagtgtgaggtggtttctgcgggtgaggctggcgcccgtaccatgagcgaggcggacgggctgcgacagcgccggcccctgcggccgcaggtcgtcacagacgatgatggccaggccccggaggctaaggacggcagctcctttagcggcagagttttccgagtgaccttcttgatgctggctgtttctctcaccgttcccctgcttggagccatgatgctgctggaatctcctatagatccacagcctctcagcttcaaagaacccccgctcttgcttggtgttctgcatccaaatacgaagctgcgacaggcagaaaggctgtttgaaaatcaacttgttggaccggagtccatagcacatattggggatgtgatgtttactgggacagcagatggccgggtcgtaaaacttgaaaatggtgaaatagagaccattgcccggtttggttcgggcccttgcaaaacccgagatgatgagcctgtgtgtgggagacccctgggtatccgtgcagggcccaatgggactctctttgtggccgatgcatacaagggactatttgaagtaaatccctggaaacgtgaagtgaaactgctgctgtcctccgagacacccattgaggggaagaacatgtcctttgtgaatgatcttacagtcactcaggatgggaggaagatttatttcaccgattctagcagcaaatggcaaagacgagactacctgcttctggtgatggagggcacagatgacgggcgcctgctggagtatgatactgtgaccagggaagtaaaagttttattggaccagctgcggttcccgaatggagtccagctgtctcctgcagaagactttgtcctggtggcagaaacaaccatggccaggatacgaagagtctacgtttctggcctgatgaagggcggggctgatctgtttgtggagaacatgcctggatttccagacaacatccggcccagcagctctggggggtactgggtgggcatgtcgaccatccgccctaaccctgggttttccatgctggatttcttatctgagagaccctggattaaaaggatgatttttaagccagggaagctgcgctggttgtgatctggtgagtggaggtcattctgagccttggctgcagtgctgtgaccacgtcggatgtgatatgtctctctcagttcagccgggccatccagagatgtgcttgcgttgctgtccttgtgctggggagcctctttggcctgatcttcacagggacaggggtggggtggggcctgctttggggcccctgggctgggagtgggagctggattagctgtcctgtggggcactgccctgtggggctgccctgtcatgggaaggagtcagaccgttcctggatggtgggggcggcacggttgatctgcgcacagtgttcttggccagctggtgaactttccctgcactgtgcttccctctagctctttagtcaagagacggtgatgaagtttgtgccgcggtacagcctcgtcctagaactcagcgacagcggtgccttccggagaagcctgcatgatcccgatgggctggtggccacctacatcagcgaggtgcacgaacacgatgggcacctgtacctgggctctttcaggtcccccttcctctgcagactcagcctccaggctgtttagccctcccagatagctgcccctgccacgcaggccaggagtcttcacactcaggcaccaggcctggtccaggaggagctgtggacacagtcgtggttcaagtgtccacatgcacctgttagtccctgagaggtggtgggaatggctgcttcattcctcgaggatgcccgggccccacctgggcttgtctttctgtttagagggaagtgtaacatatctgccatgaggaacataaattcatgtaaagccattttctcttaaacaaaacaaaactttctaagtacagtcattctctaggatttgggaagctccttgcacttggaacagggctcaggtgggtggagcagtaaggcactacccagagagcttgctgctgcggccctgtcctgcggcctcaaagttcttctttactatatataacgtgcggtcatacctttcttcgttgtggtggggatggaagagcagagggagcatggcccaggggtgttgaggccagcggtgagagccgtgttagccaagacatggaactgtgttctcaagggttatgtggggcgtgggctctccatagtgtgtatgaaaagcttgttgactctagcggctcagagaggactttgctgggtttctttctgtgaatatctccgtgctgaccatgctggaattggatgattctgcaattcgggacctactgcaggggtccgtttagtaacgtcttgtctgtgatctttgttcttgacctctagaccccaagatgtgaacagtgcacgtgttaatgtcatctttgctcatgtgttataagccccaagttgctgtatattttcacaagtatgtctacacactggtcatgattttgataataaataacgataaatcga

SEQ ID NO: 457394 - DNA, 2632 bp, Homo sapiens
aaccactcgcgttctgggccccggagtccgagacaggcggggaccccggcagctcccggtgctatctctgagcgggttccgagccccacttccgggcggtcagaattagcctcagagcgccgagcaacgacgcgccggggacctcccgcccatgaggccggaaggggcggggagaacgctgcggaatggtccctgggcgcaacgtcatttccgcgtacgggggagggcgggcctggagcctgagccggcgccgctcagtgtgaggtggtttctgcgggtgaggctggcgcccgtaccatgagcgaggcggacgggctgcgacagcgccggcccctgcggccgcaggtcgtcacagacgatgatggccaggccccggaggctaaggacggcagctcctttagcggcagagttttccgagtgaccttcttgatgctggctgtttctctcaccgttcccctgcttggagccatgatgctgctggaatctcctatagatccacagcctctcagcttcaaagaacccccgctcttgcttggtgttctgcatccaaatacgaagctgcgacaggcagaaaggctgtttgaaaatcaacttgttggaccggagtccatagcacatattggggatgtgatgtttactgggacagcagatggccgggtcgtaaaacttgaaaatggtgaaatagagaccattgcccggtttggttcgggcccttgcaaaacccgagatgatgagcctgtgtgtgggagacccctgggtatccgtgcagggcccaatgggactctctttgtggccgatgcatacaagggactatttgaagtaaatccctggaaacgtgaagtgaaactgctgctgtcctccgagacacccattgaggggaagaacatgtcctttgtgaatgatcttacagtcactcaggatgggaggaagatttatttcaccgattctagcagcaaatggcaaagacgagactacctgcttctggtgatggagggcacagatgacgggcgcctgctggagtatgatactgtgaccagggaagtaaaagttttattggaccagctgcggttcccgaatggagtccagctgtctcctgcagaagactttgtcctggtggcagaaacaaccatggccaggatacgaagagtctacgtttctggcctgatgaagggcggggctgatctgtttgtggagaacatgcctggatttccagacaacatccggcccagcagctctggggggtactgggtgggcatgtcgaccatccgccctaaccctgggttttccatgctggatttcttatctgagagaccctggattaaaaggatgatttttaaggcgtccctcaggatctgcacgccccgctttgaggaaagcagtgggattttgctttttgttttggaagccatgttgtgtggtctgtggacctgcttgctttttttgaatgtgagctgctctcaaatctccatcatttgcaccttgcctatttgaaatgttttaaatctaaacagaagacttgtgtattccagggaagctgcgctggttgtgatctgctctttagtcaagagacggtgatgaagtttgtgccgcggtacagcctcgtcctagaactcagcgacagcggtgccttccggagaagcctgcatgatcccgatgggctggtggccacctacatcagcgaggtgcacgaacacgatgggcacctgtacctgggctctttcaggtcccccttcctctgcagactcagcctccaggctgtttagccctcccagatagctgcccctgccacgcaggccaggagtcttcacactcaggcaccaggcctggtccaggaggagctgtggacacagtcgtggttcaagtgtccacatgcacctgttagtccctgagaggtggtgggaatggctgcttcattcctcgaggatgcccgggccccacctgggcttgtctttctgtttagagggaagtgtaacatatctgccatgaggaacataaattcatgtaaagccattttctcttaaacaaaacaaaactttctaagtacagtcattctctaggatttgggaagctccttgcacttggaacagggctcaggtgggtggagcagtaaggcactacccagagagcttgctgctgcggccctgtcctgcggcctcaaagttcttctttactatatataacgtgcggtcatacctttcttcgttgtggtggggatggaagagcagagggagcatggcccaggggtgttgaggccagcggtgagagccgtgttagccaagacatggaactgtgttctcaagggttatgtggggcgtgggctctccatagtgtgtatgaaaagcttgttgactctagcggctcagagaggactttgctgggtttctttctgtgaatatctccgtgctgaccatgctggaattggatgattctgcaattcgggacctactgcaggggtccgtttagtaacgtcttgtctgtgatctttgttcttgacctctagaccccaagatgtgaacagtgcacgtgttaatgtcatctttgctcatgtgttataagccccaagttgctgtatattttcacaagtatgtctacacactggtcatgattttgataataaataacgataaatcga

SEQ ID NO: 457395 - DNA, 2224 bp, Homo sapiens
aaccactcgcgttctgggccccggagtccgagacaggcggggaccccggcagctcccggtgctatctctgagcgggttccgagccccacttccgggcggtcagaattagcctcagagcgccgagcaacgacgcgccggggacctcccgcccatgaggccggaaggggcggggagaacgctgcggaatggtccctgggcgcaacgtcatttccgcgtacgggggagggcgggcctggagcctgagccggcgccgctcagtgtgaggtggtttctgcgggtgaggctggcgcccgtaccatgagcgaggcggacgggctgcgacagcgccggcccctgcggccgcaggtcgtcacagacgatgatggccaggccccggaggctaaggacggcagctcctttagcggcagagttttccgagtgaccttcttgatgctggctgtttctctcaccgttcccctgcttggagccatgatgctgctggaatctcctatagatccacagcctctcagcttcaaagaacccccgctcttgcttggtgttctgcatccaaatacgaagctgcgacaggcagaaaggctgtttgaaaatcaacttgttggaccggagtccatagcacatattggggatgtgatgtttactgggacagcagatggccgggtcgtaaaacttgaaaatggtgaaatagagaccattgcccggtttggttcgggcccttgcaaaacccgagatgatgagcctgtgtgtgggagacccctgggtatccgtgcagggcccaatgggactctctttgtggccgatgcatacaagggactatttgaagtaaatccctggaaacgtgaagtgaaactgctgctgtcctccgagacacccattgaggggaagaacatgtcctttgtgaatgatcttacagtcactcaggatgggaggaagatttatttcaccgattctagcagcaaatggcaaagacgagactacctgcttctggtgatggagggcacagatgacgggcgcctgctggagtatgatactgtgaccagggaagtaaaagttttattggaccagctgcggttcccgaatggagtccagctgtctcctgcagaagactttgtcctggtggcagaaacaaccatggccaggatacgaagctctttagtcaagagacggtgatgaagtttgtgccgcggtacagcctcgtcctagaactcagcgacagcggtgccttccggagaagcctgcatgatcccgatgggctggtggccacctacatcagcgaggtgcacgaacacgatgggcacctgtacctgggctctttcaggtcccccttcctctgcagactcagcctccaggctgtttagccctcccagatagctgcccctgccacgcaggccaggagtcttcacactcaggcaccaggcctggtccaggaggagctgtggacacagtcgtggttcaagtgtccacatgcacctgttagtccctgagaggtggtgggaatggctgcttcattcctcgaggatgcccgggccccacctgggcttgtctttctgtttagagggaagtgtaacatatctgccatgaggaacataaattcatgtaaagccattttctcttaaacaaaacaaaactttctaagtacagtcattctctaggatttgggaagctccttgcacttggaacagggctcaggtgggtggagcagtaaggcactacccagagagcttgctgctgcggccctgtcctgcggcctcaaagttcttctttactatatataacgtgcggtcatacctttcttcgttgtggtggggatggaagagcagagggagcatggcccaggggtgttgaggccagcggtgagagccgtgttagccaagacatggaactgtgttctcaagggttatgtggggcgtgggctctccatagtgtgtatgaaaagcttgttgactctagcggctcagagaggactttgctgggtttctttctgtgaatatctccgtgctgaccatgctggaattggatgattctgcaattcgggacctactgcaggggtccgtttagtaacgtcttgtctgtgatctttgttcttgacctctagaccccaagatgtgaacagtgcacgtgttaatgtcatctttgctcatgtgttataagccccaagttgctgtatattttcacaagtatgtctacacactggtcatgattttgataataaataacgataaatcga

SEQ ID NO: 457396 - DNA, 2091 bp, Homo sapiens
aaccactcgcgttctgggccccggagtccgagacaggcggggaccccggcagctcccggtgctatctctgagcgggttccgagccccacttccgggcggtcagaattagcctcagagcgccgagcaacgacgcgccggggacctcccgcccatgaggccggaaggggcggggagaacgctgcggaatggtccctgggcgcaacgtcatttccgcgtacgggggagggcgggcctggagcctgagccggcgccgctcagtgtgaggtggtttctgcgggtgaggctggcgcccgtaccatgagcgaggcggacgggctgcgacagcgccggcccctgcggccgcaggtcgtcacagacgatgatggccaggccccggaggctaaggacggcagctcctttagcggcagagttttccgagtgaccttcttgatgctggctgtttctctcaccgttcccctgcttggagccatgatgctgctggaatctcctatagatccacagcctctcaggtgaagtgaaactgctgctgtcctccgagacacccattgaggggaagaacatgtcctttgtgaatgatcttacagtcactcaggatgggaggaagatttatttcaccgattctagcagcaaatggcaaagacgagactacctgcttctggtgatggagggcacagatgacgggcgcctgctggagtatgatactgtgaccagggaagtaaaagttttattggaccagctgcggttcccgaatggagtccagctgtctcctgcagaagactttgtcctggtggcagaaacaaccatggccaggatacgaagagtctacgtttctggcctgatgaagggcggggctgatctgtttgtggagaacatgcctggatttccagacaacatccggcccagcagctctggggggtactgggtgggcatgtcgaccatccgccctaaccctgggttttccatgctggatttcttatctgagagaccctggattaaaaggatgatttttaagctctttagtcaagagacggtgatgaagtttgtgccgcggtacagcctcgtcctagaactcagcgacagcggtgccttccggagaagcctgcatgatcccgatgggctggtggccacctacatcagcgaggtgcacgaacacgatgggcacctgtacctgggctctttcaggtcccccttcctctgcagactcagcctccaggctgtttagccctcccagatagctgcccctgccacgcaggccaggagtcttcacactcaggcaccaggcctggtccaggaggagctgtggacacagtcgtggttcaagtgtccacatgcacctgttagtccctgagaggtggtgggaatggctgcttcattcctcgaggatgcccgggccccacctgggcttgtctttctgtttagagggaagtgtaacatatctgccatgaggaacataaattcatgtaaagccattttctcttaaacaaaacaaaactttctaagtacagtcattctctaggatttgggaagctccttgcacttggaacagggctcaggtgggtggagcagtaaggcactacccagagagcttgctgctgcggccctgtcctgcggcctcaaagttcttctttactatatataacgtgcggtcatacctttcttcgttgtggtggggatggaagagcagagggagcatggcccaggggtgttgaggccagcggtgagagccgtgttagccaagacatggaactgtgttctcaagggttatgtggggcgtgggctctccatagtgtgtatgaaaagcttgttgactctagcggctcagagaggactttgctgggtttctttctgtgaatatctccgtgctgaccatgctggaattggatgattctgcaattcgggacctactgcaggggtccgtttagtaacgtcttgtctgtgatctttgttcttgacctctagaccccaagatgtgaacagtgcacgtgttaatgtcatctttgctcatgtgttataagccccaagttgctgtatattttcacaagtatgtctacacactggtcatgattttgataataaataacgataaatcga

SEQ ID NO: 457397 - DNA, 1331 bp, Homo sapiens
tgtggtgactctagacgatcccgttatcatcccccttcgtcatggccaggatacgtaagagtctacgtttctggcctgatgaagggcggggctgatctgtttgtggagaacatgcctggatttccagacaacatccggcccagcagctctggggggtactgggtgggcatgtcgaccatccgccctaaccctgggttttccatgctggatttcttatctgagagaccctggattaaaaggatgatttttaagctctttagtcaagagacggtgatgaagtttgtgccgcggtacagcctcgtcctagaactcagcgacagcggtgccttccggagaagcctgcatgatcccgatgggctggtggccacctacatcagcgaggtgcacgaacacgatgggcacctgtacctgggctctttcaggtcccccttcctctgcagactcagcctccaggctgtttagccctcccagatagctgcccctgccacgcaggccaggagtcttcacactcaggcaccaggcctggtccaggaggagctgtggacacagtcgtggttcaagtgtccacatgcacctgttagtccctgagaggtggtgggaatggctgcttcattcctcgaggatgcccgggccccacctgggcttgtctttctgtttagagggaagtgtaacatatctgccatgaggaacataaattcatgtaaagccattttctcttaaacaaaacaaaactttctaagtacagtcattctctaggatttgggaagctccttgcacttggaacagggctcaggtgggtggagcagtaaggcactacccagagagcttgctgctgcggccctgtcctgcggcctcaaagttcttctttactatatataacgtgcggtcatacctttcttcgttgtggtggggatggaagagcagagggagcatggcccaggggtgttgaggccagcggtgagagccgtgttagccaagacatggaactgtgttctcaagggttatgtggggcgtgggctctccatagtgtgtatgaaaagcttgttgactctagcggctcagagaggactttgctgggtttctttctgtgaatatctccgtgctgaccatgctggaattggatgattctgcaattcgggacctactgcaggggtccgtttagtaacgtcttgtctgtgatctttgttcttgacctctagaccccaagatgtgaacagtgcacgtgttaatgtcatctttgctcatgtgttataagccccaagttgctgtatattttcacaagtatgtctacacactggtcatgattttgataataaataacgataaatcga

SEQ ID NO: 457398 - DNA, 986 bp, Homo sapiens
aaccactcgcgttctgggccccggagtccgagacaggcggggaccccggcagctcccggtgctatctctgagcgggttccgagccccacttccgggcggtcagaattagcctcagagcgccgagcaacgacgcgccggggacctcccgcccatgaggccggaaggggcggggagaacgctgcggaatggtccctgggcgcaacgtcatttccgcgtacgggggagggcgggcctggagcctgagccggcgccgctcagtgtgaggtggtttctgcgggtgaggctggcgcccgtaccatgagcgaggcggacgggctgcgacagcgccggcccctgcggccgcaggtcgtcacagacgatgatggccaggccccggaggctaaggacggcagctcctttagcggcagagttttccgagtgaccttcttgatgctggctgtttctctcaccgttcccctgcttggagccatgatgctgctggaatctcctatagatccacagcctctcagcttcaaagaacccccgctcttgcttggtgttctgcatccaaatacgaagctgcgacaggcagaaaggctgtttgaaaatcaacttgttggaccggagccagcggtgagagccgtgttagccaagacatggaactgtgttctcaagggttatgtggggcgtgggctctccatagtgtgtatgaaaagcttgttgactctagcggctcagagaggactttgctgggtttctttctgtgaatatctccgtgctgaccatgctggaattggatgattctgcaattcgggacctactgcaggggtccgtttagtaacgtcttgtctgtgatctttgttcttgacctctagaccccaagatgtgaacagtgcacgtgttaatgtcatctttgctcatgtgttataagccccaagttgctgtatattttcacaagtatgtctacacactggtcatgattttgataataaataacgataaatcga

SEQ ID NO: 457399 - DNA, 1326 bp, Homo sapiens
gcacccacagccccggctaccccggagaagcctgacttgagaaccctttctgcagagtcccggcagtgcgggactccggtagccgcccctccggtagccgcccctcctgcccccgcgccgccgccctatatgttgcccgccgcggcctctggggcatggagcacgctgcccagccctggcgatggcaacggcgacgggggtggcggaggagcgcctgctggccgcgctcgcctacctgcagtgcgccgtgggctgcgcggtcttcgcgcggaatcgtcagacgaactcagtgtacggccgccacgcgctgcccagccacaggctccgagtgccggcgcgggccgcctgggtggtgcaggagctgccctcgctggccctgccgctctaccagtacgccagcgagtccgccccgcgtctccgcagcgcgcccaactgcatcctcctggccatgttcctcgtccactacgggcatcggtgcttaatttacccatttctgatgcgaggaggaaagcctatgccactgttggcgtgtacaatggcgattatgttctgtacctgtaacggctatttgcaaagcagatacttgagccattgtgcagtgtatgctgatgactgggtaacagatccccgttttctaataggttttggcttgtggttaacgggcatgttgataaacatccattcagatcatatcctaaggaatctcagaaaaccaggagatactggatacaaaataccaaggggaggcttatttgaatacgtaactgcagccaactattttggagaaatcatggagtggtgtggctatgccctggccagctggtctgtccaaggcgcggcttttgctttcttcacgttttgttttttatctggtagagcaaaagagcatcatgagtggtacctccggaaatttgaagagtatccaaagttcagaaaaattataattccatttttgttttaagtgcgtttttcatgaaattatcttcaacttgaagctttccaatggcgcttctctatggactttgtaaataagttatatctttgtaattttcctgctactttatcattttcaagatgtcctctaggaattttttttctagtaattttgcaatctacctaataagtacctaaatacgctgaaatggaggttgaatatcctactgtgtaacaggtcagaatttcaagctctgggtaataactgctgatattttttctaatttcaaatttacctcttttggctatgtcttgccaagtgtgtatgagactagactttacaactgtctttgatggcattttcagaacaataaatgtcacaatcccttctat

SEQ ID NO: 457400 - DNA, 2089 bp, Homo sapiens
gcacccacagccccggctaccccggagaagcctgacttgagaaccctttctgcagagtcccggcagtgcgggactccggtagccgcccctccggtagccgcccctcctgcccccgcgccgccgccctatatgttgcccgccgcggcctctggggcatggagcacgctgcccagccctggcgatggcaacggcgacgggggtggcggaggagcgcctgctggccgcgctcgcctacctgcagtgcgccgtgggctgcgcggtcttcgcgcggaatcgtcagacgaactcagtgtacggccgccacgcgctgcccagccacaggctccgagtgccggcgcgggccgcctgggtggtgcaggagctgccctcgctggccctgccgctctaccagtacgccagcgagtccgccccgcgtctccgcagcgcgcccaactgcatcctcctggccatgttcctcgtccactacgggcatcggtgcttaatttacccatttctgatgcgaggaggaaagcctatgccactgttggcgtgtacaatggcgattatgttctgtacctgtaacggctatttgcaaagcagatacttgagccattgtgcagtgtatgctgatgactgggtaacagatccccgttttctaataggttttggcttgtggttaacgggcatgttgataaacatccattcagatcatatcctaaggaatctcagaaaaccaggagatactggatacaaaataccaaggggaggcttatttgaatacgtaactgcagccaactattttggagaaatcatggagtggtgtggctatgccctggccagctggtctgtccaaggcgcggcttttgctttcttcacgttttgttttttatctggtagagcaaaagagcatcatgagtggtacctccggaaatttgaagagtatccaaagttcagaaaaattataattccatttttgttttaagtgcgtttttcatgaaattatcttcaacttgaagctttccaatggcgcttctctatggactttgtaaataagttatatctttgtaattttcctgctactttatcattttcaagatgtcctctaggaattttttttctagtaattttgcaatctacctaataagtacctaaatacgctgaaatggaggttgaatatcctactgtgtaacaggtcagaatttcaagctctgggtaataactgctgatattttttctaatttcaaatttacctcttttggctatgtcttgccaagtgtgtatgagactagactttacaactgtctttgatggcattttcagaacaataaatgtcacaatcccttctatagccccctacagtgatctcttcaaggtcaactgcagtgttgcttccctccccctatagggctggaatctgtctaggagccctctctcggaggccacagaggctgggggtagccattgtgcagtcatggcccgggggaaacttgccaaccttcgtgtcaggtgctgtgtgtaagtggagaacttggggatagaggaggaagctcctcgtggcccttccaaggtgaggcaaaggcatctggacttgttccagcccagcccaccgggtgacatcaccgggcagggaggggtgctggtggtggttcatacggagtaagctgctctgcctgtgtgagtggctcctgggccctaaacaggcacctttaggccatgggtcactcaccgtgagccatcaatgtgctctggtctgacatggtttctctctgtcttctagtctagacctagtttttttgttctgttccccacgtatggatatagtagagattgttgtctgtgaaatttctcttttgtagattttgagttttcccttgtagtgtaaagaatgatcactttctgtaacaataacaagaccactttttaagatttatcctgtttgttctttgttgattgaaacataataattgttaaaattctctacagccttctttttcttccatagctaatcttccttctaatagtttttgctttctgttttgctgttgttgctttgcaaagctttcccctcatagcctgtacctgttatcaatataaaataatcttcctgttg

SEQ ID NO: 457401 - DNA, 2315 bp, Homo sapiens
gcacccacagccccggctaccccggagaagcctgacttgagaaccctttctgcagagtcccggcagtgcgggactccggtagccgcccctccggtagccgcccctcctgcccccgcgccgccgccctatatgttgcccgccgcggcctctggggcatggagcacgctgcccagccctggcgatggcaacggcgacgggggtggcggaggagcgcctgctggccgcgctcgcctacctgcagtgcgccgtgggctgcgcggtcttcgcgcggaatcgtcagacgaactcagtgtacggccgccacgcgctgcccagccacaggctccgagtgccggcgcgggccgcctgggtggtgcaggagctgccctcgctggccctgccgctctaccagtacgccagcgagtccgccccgcgtctccgcagcgcgcccaactgcatcctcctggccatgttcctcgtccactacgggcatcggtgcttaatttacccatttctgatgcgaggaggaaagcctatgccactgttggcgtgtacaatggcgattatgttctgtacctgtaacggctatttgcaaagcagatacttgagccattgtgcagtgtatgctgatgactgggtaacagatccccgttttctaataggttttggcttgtggttaacgggcatgttgataaacatccattcagatcatatcctaaggaatctcagaaaaccaggagatactggatacaaaataccaaggggaggcttatttgaatacgtaactgcagccaactattttggagaaatcatggagtggtgtggctatgccctggccagctggtctgtccaaggcgcggcttttgctttcttcacgttttgttttttatctggtagagcaaaagagcatcatgagtggtacctccggaaatttgaagagtatccaaagttcagaaaaattataattccatttttctgaactttggatactcttcaaatttcagaaaaattataattccatttttgttttaagtgcgtttttcatgaaattatcttcaacttgaagctttccaatggcgcttctctatggactttgtaaataagttatatctttgtaattttcctgctactttatcattttcaagatgtcctctaggaattttttttctagtaattttgcaatctacctaataagtacctaaatacgctgaaatggaggttgaatatcctactgtgtaacaggtcagaatttcaagctctgggtaataactgctgatattttttctaatttcaaatttacctcttttggctatgtcttgccaagtgtgtatgagactagactttacaactgtctttgatggcattttcagaacaataaatgtcacaatcccttctatagccccctacagtgatctcttcaaggtcaactgcagtgttgcttccctccccctatagggctggaatctgtctaggagccctctctcggaggccacagaggctgggggtagccattgtgcagtcatggcccgggggaaacttgccaaccttcgtgtcaggtgctgtgtgtaagtggagaacttggggatagaggaggaagctcctcgtggcccttccaaggtgaggcaaaggcatctggacttgttccagcccagcccaccgggtgacatcaccgggcagggaggggtgctggtggtggttcatacggagtaagctgctctgcctgtgtgagtggctcctgggccctaaacaggcacctttaggccatgggtcactcaccgtgagccatcaatgtgctctggtctgacatggtttctctctgtcttctagtctagacctagtttttttgttctgttccccacgtatggatatagtagagattgttgtctgtgaaatttctcttttgtagattttgagttttcccttgtagtgtaaagaatgatcactttctgtaacaataacaagaccactttttaagatttatcctgtttgttctttgttgattgaaacataataattgttaaaattctctacagccttctttttcttccatagctaatcttccttctaatagtttttgctttctgttttgctgttgttgctttgcaaagctttcccctcatagcctgtacctgttatcaatataaaataatcttcctgttgaatgcttcatgacttgaattctactttgataaaaacattgccatactgctttttatcttgatgaattcatctggcattgctttgccttatcatctcatctggagtttttaaatgccatttgtttcagttgtctttaacaacataataaatagactttgccatttaaaaaaaaaact

SEQ ID NO: 457402 - DNA, 2331 bp, Homo sapiens
gcacccacagccccggctaccccggagaagcctgacttgagaaccctttctgcagagtcccggcagtgcgggactccggtagccgcccctccggtagccgcccctcctgcccccgcgccgccgccctatatgttgcccgccgcggcctctggggcatggagcacgctgcccagccctggcgatggcaacggcgacgggggtggcggaggagcgcctgctggccgcgctcgcctacctgcagtgcgccgtgggctgcgcggtcttcgcgcggaatcgtcagacgaactcagtgtacggccgccacgcgctgcccagccacaggctccgagtgccggcgcgggccgcctgggtggtgcaggagctgccctcgctggccctgccgctctaccagtacgccagcgagtccgccccgcgtctccgcagcgcgcccaactgcatcctcctggccatgttcctcgtccactacgggcatcggtgcttaatttacccatttctgatgcgaggaggaaagcctatgccactgttggcgtgtacaatggcgattatgttctgtacctgtaacggctatttgcaaagcagatacttgagccattgtgcagtgtatgctgatgactgggtaacagatccccgttttctaataggttttggcttgtggttaacgggcatgttgataaacatccattcagatcatatcctaaggaatctcagaaaaccaggagatactggatacaaaataccaaggggaggcttatttgaatacgtaactgcagccaactattttggagaaatcatggagtggtgtggctatgccctggccagctggtctgtccaaggcgcggcttttgctttcttcacgttttgttttttatctggtagagcaaaagagcatcatgagtggtacctccggaaatttgaagagtatccaaagttcagaaaaattataattccatttttgttttaagtgcgtttttcatgaaattatcttcaacttgaagctttccaatggcgcttctctatggactttgtaaataagttatatctttgtaattttcctgctactttatcattttcaagatgtcctctaggaattttttttctagtaattttgcaatctacctaataagtacctaaatacgctgaaatggaggttgaatatcctactgtgtaacaggtcagaatttcaagctctgggtaataactgctgatattttttctaatttcaaatttacctcttttggctatgtcttgccaagtgtgtatgagactagactttacaactgtctttgatggcattttcagaacaataaatgtcacaatcccttctatagccccctacagtgatctcttcaaggtcaactgcagtgttgcttccctccccctatagggctggaatctgtctaggagccctctctcggaggccacagaggctgggggtagccattgtgcagtcatggcccgggggaaacttgccaaccttcgtgtcaggtgctgtgtgtaagtggagaacttggggatagaggaggaagctcctcgtggcccttccaaggtgaggcaaaggcatctggacttgttccagcccagcccaccgggtgacatcaccgggcagggaggggtgctggtggtggttcatacggagtaagctgctctgcctgtgtgagtggctcctgggccctaaacaggcacctttaggccatgggtcactcaccgtgagccatcaatgtgctctggtctgacatggtttctctctgtcttctagtctagacctagtttttttgttctgttccccacgtatggatatagtagagattgttgtctgtgaaatttctcttttgtagattttgagttttcccttgtagtgtaaagaatgatcactttctgtaacaataacaagaccactttttaagatttaaaaaaaaaaaaaaaaagaaaaagaaaaaaaaagaaaaaaaaaaaaaaaaaaaaagacaggggggcgagccacaaagaaatcgccccaagggggcccacaacaccaccacggcaaaccgcccaaacacctgacgccacaacagggggcccccacctacacggaggaccacattacaacacgcactgcgcccacgggcccggacaaaaaaacacacctcctaaccagcgggagacacaccccggcgccctcaacaggagcagaccatccgtcgcctgcgcgcacagacagcctccccacgacgactactcacggccggtctcgtaaccacacatcagggtgccgcaacacatcacccgcgacgggcgagacgaacttcaacaaccctcccacgggacaactctcacgcaaccctcccccgccgc

SEQ ID NO: 457403 - DNA, 1641 bp, Homo sapiens
caatttttttcctttaggttttggcttgtggttaacgggcatgttgataaacatccattcagatcatatcctaaggaatctcagaaaaccaggagatactggatacaaaataccaaggggaggcttatttgaatacgtaactgcagccaactattttggagaaatcatggagtggtgtggctatgccctggccagctggtctgtccaaggcgcggcttttgctttcttcacgttttgttttttatctggtagagcaaaagagcatcatgagtggtacctccggaaatttgaagagtatccaaagttcagaaaaattataattccatttttgttttaagtgcgtttttcatgaaattatcttcaacttgaagctttccaatggcgcttctctatggactttgtaaataagttatatctttgtaattttcctgctactttatcattttcaagatgtcctctaggaattttttttctagtaattttgcaatctacctaataagtacctaaatacgctgaaatggaggttgaatatcctactgtgtaacaggtcagaatttcaagctctgggtaataactgctgatattttttctaatttcaaatttacctcttttggctatgtcttgccaagtgtgtatgagactagactttacaactgtctttgatggcattttcagaacaataaatgtcacaatcccttctatagccccctacagtgatctcttcaaggtcaactgcagtgttgcttccctccccctatagggctggaatctgtctaggagccctctctcggaggccacagaggctgggggtagccattgtgcagtcatggcccgggggaaacttgccaaccttcgtgtcaggtgctgtgtgtaagtggagaacttggggatagaggaggaagctcctcgtggcccttccaaggtgaggcaaaggcatctggacttgttccagcccagcccaccgggtgacatcaccgggcagggaggggtgctggtggtggttcatacggagtaagctgctctgcctgtgtgagtggctcctgggccctaaacaggcacctttaggccatgggtcactcaccgtgagccatcaatgtgctctggtctgacatggtttctctctgtcttctagtctagacctagtttttttgttctgttccccacgtatggatatagtagagattgttgtctgtgaaatttctcttttgtagattttgagttttcccttgtagtgtaaagaatgatcactttctgtaacaataacaagaccactttttaagatttatcctgtttgttctttgttgattgaaacataataattgttaaaattctctacagccttctttttcttccatagctaatcttccttctaatagtttttgctttctgttttgctgttgttgctttgcaaagctttcccctcatagcctgtacctgttatcaatataaaataatcttcctgttgaatgcttcatgacttgaattctactttgataaaaacattgccatactgctttttatcttgatgaattcatctggcattgctttgccttatcatctcatctggagtttttaaatgccatttgtttcagttgtctttaacaacataataaatagactttgccatttaaaaaaaaaact

SEQ ID NO: 457404 - DNA, 2265 bp, Homo sapiens
gcacccacagccccggctaccccggagaagcctgacttgagaaccctttctgcagagtcccggcagtgcgggactccggtagccgcccctccggtagccgcccctcctgcccccgcgccgccgccctatatgttgcccgccgcggcctctggggcatggagcacgctgcccagccctggcgatggcaacggcgacgggggtggcggaggagcgcctgctggccgcgctcgcctacctgcagtgcgccgtgggctgcgcggtcttcgcgcggaatcgtcagacgaactcagtgtacggccgccacgcgctgcccagccacaggctccgagtgccggcgcgggccgcctgggtggtgcaggagctgccctcgctggccctgccgctctaccagtacgccagcgagtccgccccgcgtctccgcagcgcgcccaactgcatcctcctggccatgttcctcgtccactacgggcatcggtgcttaatttacccatttctgatgcgaggaggaaagcctatgccactgttggcgtgtacaatggcgattatgttctgtacctgtaacggctatttgcaaagcagatacttgagccattgtgcagtgtatgctgatgactgggtaacagatccccgttttctaataggttttggcttgtggttaacgggcatgttgataaacatccattcagatcatatcctaaggaatctcagaaaaccaggagatactggatacaaaataccaaggggaggcttatttgaatacgtaactgcagccaactattttggagaaatcatggagtggtgtggctatgccctggccagctggtctgtccaaggcgcggcttttgctttcttcacgttttgttttttatctggtagagcaaaagagcatcatgagtggtacctccggaaatttgaagagtatccaaagttcagaaaaattataattccatttttgttttaagtgcgtttttcatgaaattatcttcaacttgaagctttccaatggcgcttctctatggactttgtaaataagttatatctttgtaattttcctgctactttatcattttcaagatgtcctctaggaattttttttctagtaattttgcaatctacctaataagtacctaaatacgctgaaatggaggttgaatatcctactgtgtaacaggtcagaatttcaagctctgggtaataactgctgatattttttctaatttcaaatttacctcttttggctatgtcttgccaagtgtgtatgagactagactttacaactgtctttgatggcattttcagaacaataaatgtcacaatcccttctatagccccctacagtgatctcttcaaggtcaactgcagtgttgcttccctccccctatagggctggaatctgtctaggagccctctctcggaggccacagaggctgggggtagccattgtgcagtcatggcccgggggaaacttgccaaccttcgtgtcaggtgctgtgtgtaagtggagaacttggggatagaggaggaagctcctcgtggcccttccaaggtgaggcaaaggcatctggacttgttccagcccagcccaccgggtgacatcaccgggcagggaggggtgctggtggtggttcatacggagtaagctgctctgcctgtgtgagtggctcctgggccctaaacaggcacctttaggccatgggtcactcaccgtgagccatcaatgtgctctggtctgacatggtttctctctgtcttctagtctagacctagtttttttgttctgttccccacgtatggatatagtagagattgttgtctgtgaaatttctcttttgtagattttgagttttcccttgtagtgtaaagaatgatcactttctgtaacaataacaagaccactttttaagatttatcctgtttgttctttgttgattgaaacataataattgttaaaattctctacagccttctttttcttccatagctaatcttccttctaatagtttttgctttctgttttgctgttgttgctttgcaaagctttcccctcatagcctgtacctgttatcaatataaaataatcttcctgttgaatgcttcatgacttgaattctactttgataaaaacattgccatactgctttttatcttgatgaattcatctggcattgctttgccttatcatctcatctggagtttttaaatgccatttgtttcagttgtctttaacaacataataaatagactttgccatttaaaaaaaaaact

SEQ ID NO: 457405 - DNA, 1182 bp, Homo sapiens
gcacccacagccccggctaccccggagaagcctgacttgagaaccctttctgcagagtcccggcagtgcgggactccggtagccgcccctccggtagccgcccctcctgcccccgcgccgccgccctatatgttgcccgccgcggcctctggggcatggagcacgctgcccagccctggcgatggcaacggcgacgggggtggcggaggagcgcctgctggccgcgctcgcctacctgcagtgcgccgtgggctgcgcggtcttcccgcgtctccgcagcgcgcccaactgcatcctcctggccatgttcctcgtccactacgggcatcggtgcttaatttacccatttctgatgcgaggaggaaagcctatgccactgttggcgtgtacaatggcgattatgttctgtacctgtaacggctatttgcaaagcagatacttgagccattgtgcagtgtatgctgatgactgggtaacagatccccgttttctaataggttttggcttgtggttaacgggcatgttgataaacatccattcagatcatatcctaaggaatctcagaaaaccaggagatactggatacaaaataccaaggggaggcttatttgaatacgtaactgcagccaactattttggagaaatcatggagtggtgtggctatgccctggccagctggtctgtccaaggcgcggcttttgctttcttcacgttttgttttttatctggtagagcaaaagagcatcatgagtggtacctccggaaatttgaagagtatccaaagttcagaaaaattataattccatttttgttttaagtgcgtttttcatgaaattatcttcaacttgaagctttccaatggcgcttctctatggactttgtaaataagttatatctttgtaattttcctgctactttatcattttcaagatgtcctctaggaattttttttctagtaattttgcaatctacctaataagtacctaaatacgctgaaatggaggttgaatatcctactgtgtaacaggtcagaatttcaagctctgggtaataactgctgatattttttctaatttcaaatttacctcttttggctatgtcttgccaagtgtgtatgagactagactttacaactgtctttgatggcattttcagaacaataaatgtcacaatcccttctat

SEQ ID NO: 457406 - DNA, 2121 bp, Homo sapiens
gcacccacagccccggctaccccggagaagcctgacttgagaaccctttctgcagagtcccggcagtgcgggactccggtagccgcccctccggtagccgcccctcctgcccccgcgccgccgccctatatgttgcccgccgcggcctctggggcatggagcacgctgcccagccctggcgatggcaacggcgacgggggtggcggaggagcgcctgctggccgcgctcgcctacctgcagtgcgccgtgggctgcgcggtcttcccgcgtctccgcagcgcgcccaactgcatcctcctggccatgttcctcgtccactacgggcatcggtgcttaatttacccatttctgatgcgaggaggaaagcctatgccactgttggcgtgtacaatggcgattatgttctgtacctgtaacggctatttgcaaagcagatacttgagccattgtgcagtgtatgctgatgactgggtaacagatccccgttttctaataggttttggcttgtggttaacgggcatgttgataaacatccattcagatcatatcctaaggaatctcagaaaaccaggagatactggatacaaaataccaaggggaggcttatttgaatacgtaactgcagccaactattttggagaaatcatggagtggtgtggctatgccctggccagctggtctgtccaaggcgcggcttttgctttcttcacgttttgttttttatctggtagagcaaaagagcatcatgagtggtacctccggaaatttgaagagtatccaaagttcagaaaaattataattccatttttgttttaagtgcgtttttcatgaaattatcttcaacttgaagctttccaatggcgcttctctatggactttgtaaataagttatatctttgtaattttcctgctactttatcattttcaagatgtcctctaggaattttttttctagtaattttgcaatctacctaataagtacctaaatacgctgaaatggaggttgaatatcctactgtgtaacaggtcagaatttcaagctctgggtaataactgctgatattttttctaatttcaaatttacctcttttggctatgtcttgccaagtgtgtatgagactagactttacaactgtctttgatggcattttcagaacaataaatgtcacaatcccttctatagccccctacagtgatctcttcaaggtcaactgcagtgttgcttccctccccctatagggctggaatctgtctaggagccctctctcggaggccacagaggctgggggtagccattgtgcagtcatggcccgggggaaacttgccaaccttcgtgtcaggtgctgtgtgtaagtggagaacttggggatagaggaggaagctcctcgtggcccttccaaggtgaggcaaaggcatctggacttgttccagcccagcccaccgggtgacatcaccgggcagggaggggtgctggtggtggttcatacggagtaagctgctctgcctgtgtgagtggctcctgggccctaaacaggcacctttaggccatgggtcactcaccgtgagccatcaatgtgctctggtctgacatggtttctctctgtcttctagtctagacctagtttttttgttctgttccccacgtatggatatagtagagattgttgtctgtgaaatttctcttttgtagattttgagttttcccttgtagtgtaaagaatgatcactttctgtaacaataacaagaccactttttaagatttatcctgtttgttctttgttgattgaaacataataattgttaaaattctctacagccttctttttcttccatagctaatcttccttctaatagtttttgctttctgttttgctgttgttgctttgcaaagctttcccctcatagcctgtacctgttatcaatataaaataatcttcctgttgaatgcttcatgacttgaattctactttgataaaaacattgccatactgctttttatcttgatgaattcatctggcattgctttgccttatcatctcatctggagtttttaaatgccatttgtttcagttgtctttaacaacataataaatagactttgccatttaaaaaaaaaact

SEQ ID NO: 457407 - DNA, 1825 bp, Homo sapiens
gcacccacagccccggctaccccggagaagcctgacttgagaaccctttctgcagagtcccggcagtgcgggactccggtagccgcccctccggtagccgcccctcctgcccccgcgccgccgccctatatgttgcccgcgtctccgcagcgcgcccaactgcatcctcctggccatgttcctcgtccactacgggcatcggttttggcttgtggttaacgggcatgttgataaacatccattcagatcatatcctaaggaatctcagaaaaccaggagatactggatacaaaataccaaggggaggcttatttgaatacgtaactgcagccaactattttggagaaatcatggagtggtgtggctatgccctggccagctggtctgtccaaggcgcggcttttgctttcttcacgttttgttttttatctggtagagcaaaagagcatcatgagtggtacctccggaaatttgaagagtatccaaagttcagaaaaattataattccatttttgttttaagtgcgtttttcatgaaattatcttcaacttgaagctttccaatggcgcttctctatggactttgtaaataagttatatctttgtaattttcctgctactttatcattttcaagatgtcctctaggaattttttttctagtaattttgcaatctacctaataagtacctaaatacgctgaaatggaggttgaatatcctactgtgtaacaggtcagaatttcaagctctgggtaataactgctgatattttttctaatttcaaatttacctcttttggctatgtcttgccaagtgtgtatgagactagactttacaactgtctttgatggcattttcagaacaataaatgtcacaatcccttctatagccccctacagtgatctcttcaaggtcaactgcagtgttgcttccctccccctatagggctggaatctgtctaggagccctctctcggaggccacagaggctgggggtagccattgtgcagtcatggcccgggggaaacttgccaaccttcgtgtcaggtgctgtgtgtaagtggagaacttggggatagaggaggaagctcctcgtggcccttccaaggtgaggcaaaggcatctggacttgttccagcccagcccaccgggtgacatcaccgggcagggaggggtgctggtggtggttcatacggagtaagctgctctgcctgtgtgagtggctcctgggccctaaacaggcacctttaggccatgggtcactcaccgtgagccatcaatgtgctctggtctgacatggtttctctctgtcttctagtctagacctagtttttttgttctgttccccacgtatggatatagtagagattgttgtctgtgaaatttctcttttgtagattttgagttttcccttgtagtgtaaagaatgatcactttctgtaacaataacaagaccactttttaagatttatcctgtttgttctttgttgattgaaacataataattgttaaaattctctacagccttctttttcttccatagctaatcttccttctaatagtttttgctttctgttttgctgttgttgctttgcaaagctttcccctcatagcctgtacctgttatcaatataaaataatcttcctgttgaatgcttcatgacttgaattctactttgataaaaacattgccatactgctttttatcttgatgaattcatctggcattgctttgccttatcatctcatctggagtttttaaatgccatttgtttcagttgtctttaacaacataataaatagactttgccatttaaaaaaaaaact

SEQ ID NO: 457408 - DNA, 722 bp, Homo sapiens
gcacccacagccccggctaccccggagaagcctgacttgagaaccctttctgcagagtcccggcagtgcgggactccggtagccgcccctccggtagccgcccctcctgcccccgcgccgccgccctatatgttgcccgccgcggcctctggggcatggagcacgctgcccagccctggcgatggcaacggcgacgggggtggcggaggagcgcctgctggccgcgctcgcctacctgcagtgcgccgtgggctgcgcggtcttcgcgcggaatcgtcagacgaactcagtgtacggccgccacgcgctgcccagccacaggctccgagtgccggcgcgggccgcctgggtggtgcaggagctgccctcgctggccctgccgctctaccagtacgccagcgagtccgccccgcgtctccgcagcgcgcccaactgcatcctcctggccatgttcctcgtccactacgggcatcggtgcttaatttacccatttctgatgcgaggaggaaagcctatgccactgttggcgtgtacaatggcgattatgttctgtacctgtaacggctatttgcaaagcagatacttgagccattgtgcagtgtatgctgatgactgggtaacagatccccgttttctaatagaggaagaacaggcttttgagttcctgtgcagatcacacgatttatgcctccccatgttctctgaggcagaaaggatgtccc

SEQ ID NO: 457409 - DNA, 2159 bp, Homo sapiens
tgcttccggggcggtggcgacggaggcggaagtgcggtgttttagccggtggctgctgtctctgggcgggccgtgggaggctcccgaggtgggggccggggcgggatggctgcagcggcggccggggccgggagcgggccctgggcggcccaggagaagcagttcccgccggcgctgctgagtttcttcatctacaacccgcgcttcgggccgcgcgaaggacaggaggaaaataagattttattttatcatccaaatgaggtagaaaagaatgagaagattagaaatgtcggattgtgtgaagctattgtacagtttacaaggacatttagcccatcaaaacctgcaaaatctttacatacacagaagaacagacagttcttcaatgaaccagaagaaaatttctggatggtcatggtatttacacacacagtgtatctttctgaaattgtatggtgaagttatgggtgatctttactgttcagaatttaggaaagttctctggctgttgcatccaagtaaaattaaaataaaattggttgcaattttaaaatcaagttcttcctatttgctttattcattcttggggctgttttaagaagttgtgtttctggtgctgtagcatgttcaaagtttttaaattaaggcaaaataaacatggtctaatgaattcattgtataatttcagtttatcaaactttgtaggttgttcggaatcctataattgaaaaacagagtaaagatggaaaaccagttattgaatatcaagaggaggagttgttggtaatgtgtcattgtttgtttatttatttatttttttaaatgtattgctgagtatgttgaatgccttacttggtcggatttaaactaggaggcttttgcagaagtttctcggggtatatagcaaaggtttatgtttatcatttacatgagcacaatctttttaaaatgtatatgcacccaatctcactaataccttctactcttcatctatattgaaagccctcctaaagtaaggcttactgattgacaaattagagtttaaacacttctggctgggaacagtggctcacacctgtaatcctagtactttgggaggtcaaggcaggcagattacttgaggtcaggggttcgagaccagcctggccaatatggcggaaccctgtctctactaaaactacaaaaactggccagggatggtggcgcacacctgtcatcccggcttctcaggaggctgaggcaggagaatcgcttgaaccggggacgcaaatgttgcagtgagccaggattgtaccactgcgctccagcctggacaacagagcgagactccatctcaaaaaaaaaaaaaaaaaaaaagaacgcaaacactttttttcagcacgcaactattgtgggatgaagtttataaacattatactgtttggccaagagtcagtgtacctttgccatctatccagtagacattgtttttcccttgaactgagctgtgtgctgtgttttcgcgtctgcaggacaaggtttatagctcggtgctgcggcagtgctacagcatgtacaaggtaagcgtggcgttctttctcaactcagagtccaaccacttacccctatctctaggctccagggttgtttaaagagaagtctataaatgactgcaaagtgactctgtatttgtcttagagaagaaaataatgaggcctttgaaacaggtagtgaggtttatgcctacatttattcagtaagtattgaactcccttctcttttctcagccttatagtaggaatgtgtccccattgatgaaaaagtgtatctatgtgctcaaggaacatacagaatgcagataattttatgatttaaaagtttcagtgaggcagggcacagtggatcacacctgtaatttcagcattctgggaggctaaggtgggaggattgcttgagcccaggaattcaggaccagtctgggcaatatagcaagaccccatctctacaaaaaaattttataaaagttagccaggtatcatggtgcatgcctgtagtcccagctacctgggaggctgaggtgggaggatcgctcgcaccttggaggtcgaggctgcagtgaactgtgattgcaccactgcactctaccctgggcaacagcgagattccatctcaaaaaaaaa

SEQ ID NO: 457410 - DNA, 969 bp, Homo sapiens
tgcttccggggcggtggcgacggaggcggaagtgcggtgttttagccggtggctgctgtctctgggcgggccgtgggaggctcccgaggtgggggccggggcgggatggctgcagcggcggccggggccgggagcgggccctgggcggcccaggagaagcagttcccgccggcgctgctgagtttcttcatctacaacccgcgcttcgggccgcgcgaaggacaggaggaaaataagattttattttatcatccaaatgaggtagaaaagaatgagaagattagaaatgtcggattgtgtgaagctattgtacagtttacaaggacatttagcccatcaaaacctgcaaaatctttacatacacagaagaacagacagttcttcaatgaaccagaagaaaatttctggatggtcatggttgttcggaatcctataattgaaaaacagagtaaagatggaaaaccagttattgaatatcaagaggaggagttgttggacaaggtttatagctcggtgctgcggcagtgctacagcatgtacaagctttttaatggtacatttctgaaagccatggaagacggaggcgtcaagcttctgaaagaaagattagagaaattcttccatcggtatttgcaaacgctacatttgcagtcatgtgacctacttgacatttttggtggaatcagcttcttcccgttggataaaatgacttatttgaaaatccagtcctttattaatagaatggaggaaagcctgaatatagtcaaatacactgcttttctctataacgatcagctcatctggtaggtacaccccgaggcatggtattaaaagaagaaattaagataataaaaacagcagtgactggattgatgacaggttgtcaaacaggaacttgcagcggggaggatgggtaggaagcatcttcatagatattgtcaaaataaagcagtgattatttaaagcaga

SEQ ID NO: 457411 - DNA, 395 bp, Homo sapiens
cgggccaggtcggaaacggagcaggtcaaaacacccaggctggtctcgaactcccgtaatccagccatgtaggaaacctgagatgcagtgggccaaggggtatgttaaaacactgtgacgagttcagtgctaagaactgtaatgctcaggaaatcttacagcacgtgccatcctaagcctgtgtgtgtgtcctcgtgtctctctactttttcttcttcttgctggtgatggtcttgctggatggggacacggtcacatcctccttgggagggtccagtatgaggtgagaggatgacacgtctgccggctccttgagcactgtgatgtccacctcatagtcatgtctcttggcctcttcctctctcaagataaagatgttcagcctaaaagcaaac

SEQ ID NO: 457412 - DNA, 596 bp, Homo sapiens
tgatagttgtctccagatgtagtcccttcgacggtgttctgccaggaacagagaccaaatattcattcctttttatgtcaacgacgcccataggaaattacggcttgtccggaaagcacttggtcctgatgcgttctggcagctacggaagacaggaagagagcgagcagctggggaaggagaggagggacctcgaactgtgcgtcttgattacggcaccgcaggaatgccctgtctctgctgggatgctgagctctgcgggagaaaatgacacaacccacagatttgcaccagagggagaagaaacctaggatgacgaggggtcacagaggccgaatctctgtgaagagtatttcaagaagctgacgcttttcctgactatggagagatcggttcaagtgacagcaggattcctggcggtggcaacacggagtcactgctgatgaaaaggggccttcagtggcctggggaggacagtgccacgtggagcaaaagctaagggacacacaggagaggtcctggagaaggtgagcacgtacacagcccaccaagatgcctagcagcaaaggtgtacatgtacacagccccccaagata

SEQ ID NO: 457413 - DNA, 2006 bp, Homo sapiens
  misc_feature (1857)..(1868): n is a, c, g, or t
  misc_feature (1888)..(1892): n is a, c, g, or t
  misc_feature (1908)..(1912): n is a, c, g, or t
  misc_feature (1928)..(1929): n is a, c, g, or t
  misc_feature (1931)..(1936): n is a, c, g, or t
  misc_feature (1944)..(1944): n is a, c, g, or t
  misc_feature (1958)..(1958): n is a, c, g, or t
tgcttccggggcggtggcgacggaggcggaagtgcggtgttttagccggtggctgctgtctctgggcgggccgtgggaggctcccgaggtgggggccggggcgggatggctgcagcggcggccggggccgggagcgggccctgggcggcccaggagaagcagttcccgccggcgctgctgagtttcttcatctacaacccgcgcttcgggccgcgcgaaggacaggaggaaaataagattttattttatcatccaaatgaggtagaaaagaatgagaagattagaaatgtcggattgtgtgaagctattgtacagtttacaaggacatttagcccatcaaaacctgcaaaatctttacatacacagaagaacagacagttcttcaatgaaccagaagaaaatttctggatggtcatggttgttcggaatcctataattgaaaaacagagtaaagatggaaaaccagttattgaatatcaagaggaggagttgttggacaaggtttatagctcggtgctgcggcagtgctacagcatgtacaagctttttaatggtacatttctgaaagccatggaagacggaggcgtcaagcttctgaaagaaagattagagaaattcttccatcggtatttgcaaacgctacatttgcagtcatgtgacctacttgacatttttggtggaatcagcttcttcccgttggataaaatgacttatttgaaaatccagtcctttattaatagaatggaggaaagcctgaatatagtcaaatacactgcttttctctataacgatcagctcatctggagtggattagaacaagatgacatgagaattttatacaaataccttaccacctcccttttcccaaggcacatcgaacctgagttagcaggaagggattctccaataagagcagaaatgccaggaaatcttcaacactatggaagatttcttaccggacccttgaacctcaatgatccagatgcaaaatgcagattccccaaaatttttgtaaatacagatgacacttatgaagagctccatttaatcgtttataaggccatgagtgcggctgtgtgctttatgatcgacgcctctgtccacccaacgttggatttttgccgaagactggacagcatcgttgggccccagctcacagtgctggcctctgacatctgtgaacagtttaacatcaacaagaggatgtctgggtctgagaaagaaccccagtttaagtttatctacttcaaccacatgaatctcgccgagaagagcacagttcacatgaggaaaacgcccagcgtgtcgctcacttccgtgcacccggatttaatgaagattctcggtgacatcaacagtgactttaccagagtggatgaagatgaggagatcattgtgaaggccatgagtgattactgggttgttggaaagaagtctgatcggcgggagctctatgttattttgaatcaaaaaaatgcaaacctgattgaagtaaatgaagaggtcaagaaactttgtgcaacgcagttcaacaacatcttcttcttggattgacggatgacggctcaccgagagcatatctaaaaaacactctgcaaacatttggtcacatgcaagttagtggtcatatgacggactgcattcaggacaagggtaaagcaatacttgctttgaagaatcagatttcgactcggtctgctgatctgaggtttttagattttaaatatttatgtggaattaattaaaggtagttggctatatcgctatcatttcattcttttgacattatttgaatattttactggaaaataagactaataaattgttaaaagtttttaaaaaaaaaaaaaaaaaaannnnnnnnnnnnaaaaaaaaaaaaaaaaaaannnnnttttttttttttttannnnntttttttttttttttnngnnnnnntttttttntttttttttttttnttttttttttttttttttttaaaattttttttttttttttaatttttt

SEQ ID NO: 457414 - DNA, 2196 bp, Homo sapiens
tgcttccggggcggtggcgacggaggcggaagtgcggtgttttagccggtggctgctgtctctgggcgggccgtgggaggctcccgaggtgggggccggggcgggatggctgcagcggcggccggggccgggagcgggccctgggcggcccaggagaagcagttcccgccggcgctgctgagtttcttcatctacaacccgcgcttcgggccgcgcgaaggacaggaggaaaataagattttattttatcatccaaatgaggtagaaaagaatgagaagattagaaatgtcggattgtgtgaagctattgtacagtttacaaggacatttagcccatcaaaacctgcaaaatctttacatacacagaagaacagacagttcttcaatgaaccagaagaaaatttctggatggtcatggttgttcggaatcctataattgaaaaacagagtaaagatggaaaaccagttattgaatatcaagaggaggagttgttggacaaggtttatagctcggtgctgcggcagtgctacagcatgtacaagctttttaatggtacatttctgaaagccatggaagacggaggcgtcaagcttctgaaagaaagattagagaaattcttccatcggtatttgcaaacgctacatttgcagtcatgtgacctacttgacatttttggtggaatcagcttcttcccgttggataaaatgacttatttgaaaatccagtcctttattaatagaatggaggaaagcctgaatatagtcaaatacactgcttttctctataacgatcagctcatctggagtggattagaacaagatgacatgagaattttatacaaataccttaccacctcccttttcccaaggcacatcgaacctgagttagcaggaagggattctccaataagagcagaaatgccaggaaatcttcaacactatggaagatttcttaccggacccttgaacctcaatgatccagatgcaaaatgcagattccccaaaatttttgtaaatacagatgacacttatgaagagctccatttaatcgtttataaggccatgagtgcggctgtgtgctttatgatcgacgcctctgtccacccaacgttggatttttgccgaagactggacagcatcgttgggccccagctcacagtgctggcctctgacatctgtgaacagtttaacatcaacaagaggatgtctgggtctgagaaagaaccccagtttaagtttatctacttcaaccacatgaatctcgccgagaagagcacagttcacatgaggaaaacgcccagcgtgtcgctcacttccgtgcacccggatttaatgaagattctcggtgacatcaacagtgactttaccagagtggatgaagatgaggagatcattgtgaaggccatgagtgattactgggttgttggaaagaagtctgatcggcgggagctctatgttattttgaatcaaaaaaatgcaaacctgattgaagtaaatgaagaggtcaagaaactttgtgcaacgcagttcaacaacatcttcttcttggattgacggatgacggctcaccgagagcatatctaaaaaacactctgcaaacatttggtcacatgcaagttagtggtcatatgacggactgcattcaggacaaggattacactggccaccagctccgtgacccaggctggaatgcaatggctcactgcagcctcaacctcctgagctcaagcaatcctcccacctcagcctcccaagaagctagaaccacatgtacacaccaccacggtcggctgatgttttaattttgcagagatgggggggtctcactatgttgcccaggctggtctcgaactcccgtaatccagccatgtaggaaacctgagatgcagtgggccaaggggtatgttaaaacactgtgacgagttcagtgctaagaactgtaatgctcaggaaatcttacagcacgtgccatcctaagcctgtgtgtgtgtcctcgtgtctctctactttttcttcttcttgctggtgatggtcttgctggatggggacacggtcacatcctccttgggagggtccagtatgaggtgagaggatgacacgtctgccggctccttgagcactgtgatgtccacctcatagtcatgtctcttggcctcttcctctctcaagataaagatgttcagcctaaaagcaaac

SEQ ID NO: 457415 - DNA, 1912 bp, Homo sapiens
  misc_feature (1763)..(1774): n is a, c, g, or t
  misc_feature (1794)..(1798): n is a, c, g, or t
  misc_feature (1814)..(1818): n is a, c, g, or t
  misc_feature (1834)..(1835): n is a, c, g, or t
  misc_feature (1837)..(1842): n is a, c, g, or t
  misc_feature (1850)..(1850): n is a, c, g, or t
  misc_feature (1864)..(1864): n is a, c, g, or t
tgcttccggggcggtggcgacggaggcggaagtgcggtgttttagccggtggctgctgtctctgggcgggccgtgggaggctcccgaggtgggggccggggcgggatggctgcagcggcggccggggccgggagcgggccctgggcggcccaggagaagcagttcccgccggcgctgctgagtttcttcatctacaacccgcgcttcgggccgcgcgaaggacaggaggaaaataagattttattttatcatccaaatgaggtagaaaagaatgagaagattagaaatgtcggattgtgtgaagctattgtacagtttacaaggttgttcggaatcctataattgaaaaacagagtaaagatggaaaaccagttattgaatatcaagaggaggagttgttggacaaggtttatagctcggtgctgcggcagtgctacagcatgtacaagctttttaatggtacatttctgaaagccatggaagacggaggcgtcaagcttctgaaagaaagattagagaaattcttccatcggtatttgcaaacgctacatttgcagtcatgtgacctacttgacatttttggtggaatcagcttcttcccgttggataaaatgacttatttgaaaatccagtcctttattaatagaatggaggaaagcctgaatatagtcaaatacactgcttttctctataacgatcagctcatctggagtggattagaacaagatgacatgagaattttatacaaataccttaccacctcccttttcccaaggcacatcgaacctgagttagcaggaagggattctccaataagagcagaaatgccaggaaatcttcaacactatggaagatttcttaccggacccttgaacctcaatgatccagatgcaaaatgcagattccccaaaatttttgtaaatacagatgacacttatgaagagctccatttaatcgtttataaggccatgagtgcggctgtgtgctttatgatcgacgcctctgtccacccaacgttggatttttgccgaagactggacagcatcgttgggccccagctcacagtgctggcctctgacatctgtgaacagtttaacatcaacaagaggatgtctgggtctgagaaagaaccccagtttaagtttatctacttcaaccacatgaatctcgccgagaagagcacagttcacatgaggaaaacgcccagcgtgtcgctcacttccgtgcacccggatttaatgaagattctcggtgacatcaacagtgactttaccagagtggatgaagatgaggagatcattgtgaaggccatgagtgattactgggttgttggaaagaagtctgatcggcgggagctctatgttattttgaatcaaaaaaatgcaaacctgattgaagtaaatgaagaggtcaagaaactttgtgcaacgcagttcaacaacatcttcttcttggattgacggatgacggctcaccgagagcatatctaaaaaacactctgcaaacatttggtcacatgcaagttagtggtcatatgacggactgcattcaggacaagggtaaagcaatacttgctttgaagaatcagatttcgactcggtctgctgatctgaggtttttagattttaaatatttatgtggaattaattaaaggtagttggctatatcgctatcatttcattcttttgacattatttgaatattttactggaaaataagactaataaattgttaaaagtttttaaaaaaaaaaaaaaaaaaannnnnnnnnnnnaaaaaaaaaaaaaaaaaaannnnnttttttttttttttannnnntttttttttttttttnngnnnnnntttttttntttttttttttttnttttttttttttttttttttaaaattttttttttttttttaatttttt

SEQ ID NO: 457416 - DNA, 3022 bp, Homo sapiens
  misc_feature (2873)..(2884): n is a, c, g, or t
  misc_feature (2904)..(2908): n is a, c, g, or t
  misc_feature (2924)..(2928): n is a, c, g, or t
  misc_feature (2944)..(2945): n is a, c, g, or t
  misc_feature (2947)..(2952): n is a, c, g, or t
  misc_feature (2960)..(2960): n is a, c, g, or t
  misc_feature (2974)..(2974): n is a, c, g, or t
tgcttccggggcggtggcgacggaggcggaagtgcggtgttttagccggtggctgctgtctctgggcgggccgtgggaggctcccgaggtgggggccggggcgggatggctgcagcggcggccggggccgggagcgggccctgggcggcccaggagaagcagttcccgccggcgctgctgagtttcttcatctacaacccgcgcttcgggccgcgcgaaggacaggaggaaaataagattttattttatcatccaaatgaggtagaaaagaatgagaagattagaaatgtcggattgtgtgaagctattgtacagtttacaaggacatttagcccatcaaaacctgcaaaatctttacatacacagaagaacagacagttcttcaatgaaccagaagaaaatttctggatggtcatggtatttacacacacagtgtatctttctgaaattgtatggtgaagttatgggtgatctttactgttcagaatttaggaaagttctctggctgttgcatccaagtaaaattaaaataaaattggttgcaattttaaaatcaagttcttcctatttgctttattcattcttggggctgttttaagaagttgtgtttctggtgctgtagcatgttcaaagtttttaaattaaggcaaaataaacatggtctaatgaattcattgtataatttcagtttatcaaactttgtaggttgttcggaatcctataattgaaaaacagagtaaagatggaaaaccagttattgaatatcaagaggaggagttgttggtaatgtgtcattgtttgtttatttatttatttttttaaatgtattgctgagtatgttgaatgccttacttggtcggatttaaactaggaggcttttgcagaagtttctcggggtatatagcaaaggtttatgtttatcatttacatgagcacaatctttttaaaatgtatatgcacccaatctcactaataccttctactcttcatctatattgaaagccctcctaaagtaaggcttactgattgacaaattagagtttaaacacttctggctgggaacagtggctcacacctgtaatcctagtactttgggaggtcaaggcaggcagattacttgaggtcaggggttcgagaccagcctggccaatatggcggaaccctgtctctactaaaactacaaaaactggccagggatggtggcgcacacctgtcatcccggcttctcaggaggctgaggcaggagaatcgcttgaaccggggacgcaaatgttgcagtgagccaggattgtaccactgcgctccagcctggacaacagagcgagactccatctcaaaaaaaaaaaaaaaaaaaaagaacgcaaacactttttttcagcacgcaactattgtgggatgaagtttataaacattatactgtttggccaagagtcagtgtacctttgccatctatccagtagacattgtttttcccttgaactgagctgtgtgctgtgttttcgcgtctgcaggacaaggtttatagctcggtgctgcggcagtgctacagcatgtacaagctttttaatggtacatttctgaaagccatggaagacggaggcgtcaagcttctgaaagaaagattagagaaattcttccatcggtatttgcaaacgctacatttgcagtcatgtgacctacttgacatttttggtggaatcagcttcttcccgttggataaaatgacttatttgaaaatccagtcctttattaatagaatggaggaaagcctgaatatagtcaaatacactgcttttctctataacgatcagctcatctggagtggattagaacaagatgacatgagaattttatacaaataccttaccacctcccttttcccaaggcacatcgaacctgagttagcaggaagggattctccaataagagcagaaatgccaggaaatcttcaacactatggaagatttcttaccggacccttgaacctcaatgatccagatgcaaaatgcagattccccaaaatttttgtaaatacagatgacacttatgaagagctccatttaatcgtttataaggccatgagtgcggctgtgtgctttatgatcgacgcctctgtccacccaacgttggatttttgccgaagactggacagcatcgttgggccccagctcacagtgctggcctctgacatctgtgaacagtttaacatcaacaagaggatgtctgggtctgagaaagaaccccagtttaagtttatctacttcaaccacatgaatctcgccgagaagagcacagttcacatgaggaaaacgcccagcgtgtcgctcacttccgtgcacccggatttaatgaagattctcggtgacatcaacagtgactttaccagagtggatgaagatgaggagatcattgtgaaggccatgagtgattactgggttgttggaaagaagtctgatcggcgggagctctatgttattttgaatcaaaaaaatgcaaacctgattgaagtaaatgaagaggtcaagaaactttgtgcaacgcagttcaacaacatcttcttcttggattgacggatgacggctcaccgagagcatatctaaaaaacactctgcaaacatttggtcacatgcaagttagtggtcatatgacggactgcattcaggacaagggtaaagcaatacttgctttgaagaatcagatttcgactcggtctgctgatctgaggtttttagattttaaatatttatgtggaattaattaaaggtagttggctatatcgctatcatttcattcttttgacattatttgaatattttactggaaaataagactaataaattgttaaaagtttttaaaaaaaaaaaaaaaaaaannnnnnnnnnnnaaaaaaaaaaaaaaaaaaannnnnttttttttttttttannnnntttttttttttttttnngnnnnnntttttttntttttttttttttnttttttttttttttttttttaaaattttttttttttttttaatttttt

SEQ ID NO: 457417 - DNA, 1148 bp, Homo sapiens
  misc_feature (999)..(1010): n is a, c, g, or t
  misc_feature (1030)..(1034): n is a, c, g, or t
  misc_feature (1050)..(1054): n is a, c, g, or t
  misc_feature (1070)..(1071): n is a, c, g, or t
  misc_feature (1073)..(1078): n is a, c, g, or t
  misc_feature (1086)..(1086): n is a, c, g, or t
  misc_feature (1100)..(1100): n is a, c, g, or t
cattctcaacattaaatgtatttgcagttagcaggaagggattctccaataagagcagaaatgccaggaaatcttcaacactatggaagatttcttaccggacccttgaacctcaatgatccagatgcaaaatgcagattccccaaaatttttgtaaatacagatgacacttatgaagagctccatttaatcgtttataaggccatgagtgcggctgtgtgctttatgatcgacgcctctgtccacccaacgttggatttttgccgaagactggacagcatcgttgggccccagctcacagtgctggcctctgacatctgtgaacagtttaacatcaacaagaggatgtctgggtctgagaaagaaccccagtttaagtttatctacttcaaccacatgaatctcgccgagaagagcacagttcacatgaggaaaacgcccagcgtgtcgctcacttccgtgcacccggatttaatgaagattctcggtgacatcaacagtgactttaccagagtggatgaagatgaggagatcattgtgaaggccatgagtgattactgggttgttggaaagaagtctgatcggcgggagctctatgttattttgaatcaaaaaaatgcaaacctgattgaagtaaatgaagaggtcaagaaactttgtgcaacgcagttcaacaacatcttcttcttggattgacggatgacggctcaccgagagcatatctaaaaaacactctgcaaacatttggtcacatgcaagttagtggtcatatgacggactgcattcaggacaagggtaaagcaatacttgctttgaagaatcagatttcgactcggtctgctgatctgaggtttttagattttaaatatttatgtggaattaattaaaggtagttggctatatcgctatcatttcattcttttgacattatttgaatattttactggaaaataagactaataaattgttaaaagtttttaaaaaaaaaaaaaaaaaaannnnnnnnnnnnaaaaaaaaaaaaaaaaaaannnnnttttttttttttttannnnntttttttttttttttnngnnnnnntttttttntttttttttttttnttttttttttttttttttttaaaattttttttttttttttaatttttt

SEQ ID NO: 457418 - DNA, 867 bp, Homo sapiens
  misc_feature (718)..(729): n is a, c, g, or t
  misc_feature (749)..(753): n is a, c, g, or t
  misc_feature (769)..(773): n is a, c, g, or t
  misc_feature (789)..(790): n is a, c, g, or t
  misc_feature (792)..(797): n is a, c, g, or t
  misc_feature (805)..(805): n is a, c, g, or t
  misc_feature (819)..(819): n is a, c, g, or t
aaaaaaattttaaaagaagaatctagttgtatccggcccgagtgctactgtcttcgtgacatgttttcacaggtctgagaaagaaccccagtttaagtttatctacttcaaccacatgaatctcgccgagaagagcacagttcacatgaggaaaacgcccagcgtgtcgctcacttccgtgcacccggatttaatgaagattctcggtgacatcaacagtgactttaccagagtggatgaagatgaggagatcattgtgaaggccatgagtgattactgggttgttggaaagaagtctgatcggcgggagctctatgttattttgaatcaaaaaaatgcaaacctgattgaagtaaatgaagaggtcaagaaactttgtgcaacgcagttcaacaacatcttcttcttggattgacggatgacggctcaccgagagcatatctaaaaaacactctgcaaacatttggtcacatgcaagttagtggtcatatgacggactgcattcaggacaagggtaaagcaatacttgctttgaagaatcagatttcgactcggtctgctgatctgaggtttttagattttaaatatttatgtggaattaattaaaggtagttggctatatcgctatcatttcattcttttgacattatttgaatattttactggaaaataagactaataaattgttaaaagtttttaaaaaaaaaaaaaaaaaaannnnnnnnnnnnaaaaaaaaaaaaaaaaaaannnnnttttttttttttttannnnntttttttttttttttnngnnnnnntttttttntttttttttttttnttttttttttttttttttttaaaattttttttttttttttaatttttt

SEQ ID NO: 457419 - DNA, 692 bp, Homo sapiens
  misc_feature (543)..(554): n is a, c, g, or t
  misc_feature (574)..(578): n is a, c, g, or t
  misc_feature (594)..(598): n is a, c, g, or t
  misc_feature (614)..(615): n is a, c, g, or t
  misc_feature (617)..(622): n is a, c, g, or t
  misc_feature (630)..(630): n is a, c, g, or t
  misc_feature (644)..(644): n is a, c, g, or t
gcggccgcctactactactaaatcgcggccgcgtcgaccaacagtgactttaccagagtggatgaagatgaggagatcattgtgaaggccatgagtgattactgggttgttggaaagaagtctgatcggcgggagctctatgttattttgaatcaaaaaaatgcaaacctgattgaagtaaatgaagaggtcaagaaactttgtgcaacgcagttcaacaacatcttcttcttggattgacggatgacggctcaccgagagcatatctaaaaaacactctgcaaacatttggtcacatgcaagttagtggtcatatgacggactgcattcaggacaagggtaaagcaatacttgctttgaagaatcagatttcgactcggtctgctgatctgaggtttttagattttaaatatttatgtggaattaattaaaggtagttggctatatcgctatcatttcattcttttgacattatttgaatattttactggaaaataagactaataaattgttaaaagtttttaaaaaaaaaaaaaaaaaaannnnnnnnnnnnaaaaaaaaaaaaaaaaaaannnnnttttttttttttttannnnntttttttttttttttnngnnnnnntttttttntttttttttttttnttttttttttttttttttttaaaattttttttttttttttaatttttt

SEQ ID NO: 457420 - DNA, 834 bp, Homo sapiens
  misc_feature (685)..(696): n is a, c, g, or t
  misc_feature (716)..(720): n is a, c, g, or t
  misc_feature (736)..(740): n is a, c, g, or t
  misc_feature (756)..(757): n is a, c, g, or t
  misc_feature (759)..(764): n is a, c, g, or t
  misc_feature (772)..(772): n is a, c, g, or t
  misc_feature (786)..(786): n is a, c, g, or t
gcgtgaaccaccttcatgggcgccgcttccaaacagacccgggagccctgaagtcaccggttccctcgcgcggcactccctgagccttttaaatgccacgtgcgcccgttccatttcctgttcttggtttggaacgcttattctcacagtctggccgtatgagtaacgaacaattgcattttgaccctcgtcttgcagagtggatgaagatgaggagatcattgtgaaggccatgagtgattactgggttgttggaaagaagtctgatcggcgggagctctatgttattttgaatcaaaaaaatgcaaacctgattgaagtaaatgaagaggtcaagaaactttgtgcaacgcagttcaacaacatcttcttcttggattgacggatgacggctcaccgagagcatatctaaaaaacactctgcaaacatttggtcacatgcaagttagtggtcatatgacggactgcattcaggacaagggtaaagcaatacttgctttgaagaatcagatttcgactcggtctgctgatctgaggtttttagattttaaatatttatgtggaattaattaaaggtagttggctatatcgctatcatttcattcttttgacattatttgaatattttactggaaaataagactaataaattgttaaaagtttttaaaaaaaaaaaaaaaaaaannnnnnnnnnnnaaaaaaaaaaaaaaaaaaannnnnttttttttttttttannnnntttttttttttttttnngnnnnnntttttttntttttttttttttnttttttttttttttttttttaaaattttttttttttttttaatttttt

SEQ ID NO: 457421 - DNA, 520 bp, Homo sapiens
cgactcggtctgctgatctgaggtttttagattttaaatatttatgtggaattaattaaaggtagttggctatatcgctatcatttcattcttttgacattatttgaatattttactggaaaataagactaataaattgttaaaagtttttaaaattaaaattctggtttggtgttgagtctctctcctgctgcctatttatagattacactggccaccagctccgtgacccaggctggaatgcaatggctcactgcagcctcaacctcctgagctcaagcaatcctcccacctcagcctcccaagaagctagaaccacatgtacacaccaccacggtcggctgatgttttaattttgcagagatgggggggtctcactatgttgcccaggctggtctcgaactcccgtaatccagccatgtaggaaacctgagatgcagtgggccaaggggtatgttaaaacactgtgacgagttcagtgctaagaactgtaatgctcaggaaatcttacagcacgtgc

SEQ ID NO: 457422 - DNA, 705 bp, Homo sapiens
tggaacttccggggggagctttatgttattttgaatcaaaaaaatgcaaacctgattgaagtaaatggtctgagaaagaaccccagtttaagtttatctacttcaaccacatgaatctcgccgagaagagcacagttcacatgaggaaaacgcccagcgtgtcgctcacttccgtgcacccggatttaatgaagattctcggtgacatcaacagtgactttaccagagtggatgaagatgaggagatcattgtgaaggccatgagtgattactgggttgttggaaagaagtctgatcggcgggagctctatgttattttgaatcaaaaaaatgcaaacctgattgaagtaaatggtaagtaggatttggtatttcaggagaatttgagaagttgtcttttcattgcattaagaaacatggttaaaaaataggtaaatagaacaaatcatgactgttgagattctaagcaggtgcctctgctccacatttgatccattttctgttccttggaaaactatgacaagaccttcctgtagcacaggaaacttggcaatggcagaaagaaaattattttctacaattctaaaaaaaaaaaaaaatgactttatattaagaaatgtccccctttttttggagacaggttctcactttgtcacacaggctggagtgcagtggtgcaatcatagctcaccacagcccccaact

SEQ ID NO: 457423 - DNA, 475 bp, Homo sapiens
  misc_feature (299)..(299): n is a, c, g, or t
  misc_feature (363)..(363): n is a, c, g, or t
  misc_feature (435)..(435): n is a, c, g, or t
  misc_feature (455)..(455): n is a, c, g, or t
tgcttccggggcggtggcgacggaggcggaagtgcggtgttttagccggtggctgctgtctctgggcgggccgtgggaggctcccgaggtgggggccggggcgggatggctgcagcggcggccggggccgggagcgggccctgggcggcccaggagaagcagttcccgccggcgctgctgagtttcttcatctacaacccgcgcttcgggccgcgcgaaggacaggagcatggggaagtgattgactgtgtgcaggagctgagccactccgtgaacaagctgtttggtctggcgtctgnagccgttgacagatgcgtcagattcaccaatggcctggggacctgcggcctgttgtcagccctnaaatccctgtttgccaagtatgtgtctgatttcaccagcactctccagtccatacgaaagaagtgcaaactngaccacatttctcccaactncctcttgcaggaagattgga

SEQ ID NO: 457424 - DNA, 2189 bp, Homo sapiens
tgcttccggggcggtggcgacggaggcggaagtgcggtgttttagccggtggctgctgtctctgggcgggccgtgggaggctcccgaggtgggggccggggcgggatggctgcagcggcggccggggccgggagcgggccctgggcggcccaggagaagcagttcccgccggcgctgctgagtttcttcatctacaacccgcgcttcgggccgcgcgaaggacaggaggaaaataagattttattttatcatccaaatgaggtagaaaagaatgagaagattagaaatgtcggattgtgtgaagctattgtacagtttacaaggacatttagcccatcaaaacctgcaaaatctttacatacacagaagaacagacagttcttcaatgaaccagaagaaaatttctggatggtcatggttgttcggaatcctataattgaaaaacagagtaaagatggaaaaccagttattgaatatcaagaggaggagttgttggacaaggtttatagctcggtgctgcggcagtgctacagcatgtacaagctttttaatggtacatttctgaaagccatggaagacggaggcgtcaagcttctgaaagaaagattagagaaattcttccatcggtatttgcaaacgctacatttgcagtcatgtgacctacttgacatttttggtggaatcagcttcttcccgttggataaaatgacttatttgaaaatccagtcctttattaatagaatggaggaaagcctgaatatagtcaaatacactgcttttctctataacgatcagctcatctggagtggattagaacaagatgacatgagaattttatacaaataccttaccacctcccttttcccaaggcacatcgaacctgagttagcaggaagggattctccaataagagcagaaatgccaggaaatcttcaacactatggaagatttcttaccggacccttgaacctcaatgatccagatgcaaaatgcagattccccaaaatttttgtaaatacagatgacacttatgaagagctccatttaatcgtttataaggccatgagtgcggctgtgtgctttatgatcgacgcctctgtccacccaacgttggatttttgccgaagactggacagcatcgttgggccccagctcacagtgctggcctctgacatctgtgaacagtttaacatcaacaagaggatgtctgggtctgagaaagaaccccagtttaagtttatctacttcaaccacatgaatctcgccgagaagagcacagttcacatgaggaaaacgcccagcgtgtcgctcacttccgtgcacccggatttaatgaagattctcggtgacatcaacagtgactttaccagagtggatgaagatgaggagatcattgtgaaggccatgagtgattactgggttgttggaaagaagtctgatcggcgggagctctatgttattttgaatcaaaaaaatgcaaacctgattgaagtaaatgaagaggtcaagaaactttgtgcaacgcagttcaacaacatcttcttcttggattgacggatgacggctcaccgagagcatatctaaaaaacactctgcaaacatttggtcacatgcaagttagtggtcatatgacggactgcattcaggacaaggattacactggccaccagctccgtgacccaggctggaatgcaatggctcactgcagcctcaacctcctgagctcaagcaatcctcccacctcagcctcccaagaagctagaaccacatgtacacaccaccacggaaattacggcttgtccggaaagcacttggtcctgatgcgttctggcagctacggaagacaggaagagagcgagcagctggggaaggagaggagggacctcgtaagttaccttgcttccagttcgtcatcttccatcttccgctgctgggcctgtgctgtgctacgtaacctgtctgcccttattttctccttgatagcttcttcacgtttatacgcatgaaagagcgtgttcacaaagaagacgtacgtattattgacccacgtgttgaactcttcctctcgatcatccttgggtctctcatatttctctggaatagagtttcatgaagctgaacatgaatacaatcctgctgtcaattgggggtctgcgtgctttttctcgttctagcctccctggggtggg

SEQ ID NO: 457425 - DNA, 2294 bp, Homo sapiens
  misc_feature (2145)..(2156): n is a, c, g, or t
  misc_feature (2176)..(2180): n is a, c, g, or t
  misc_feature (2196)..(2200): n is a, c, g, or t
  misc_feature (2216)..(2217): n is a, c, g, or t
  misc_feature (2219)..(2224): n is a, c, g, or t
  misc_feature (2232)..(2232): n is a, c, g, or t
  misc_feature (2246)..(2246): n is a, c, g, or t
tgcttccggggcggtggcgacggaggcggaagtgcggtgttttagccggtggctgctgtctctgggcgggccgtgggaggctcccgaggtgggggccggggcgggatggctgcagcggcggccggggccgggagcgggccctgggcggcccaggagaagcagttcccgccggcgctgctgagtttcttcatctacaacccgcgcttcgggccgcgcgaaggacaggaggaaaataagattttattttatcatccaaatgaggtagaaaagaatgagaagattagaaatgtcggattgtgtgaagctattgtacagtttacaaggacatttagcccatcaaaacctgcaaaatctttacatacacagaagaacagacagttcttcaatgaaccagaagaaaatttctggatggtcatggtatttacacacacagtgtatctttctgaaattgtatggtgaagttatgggtgatctttactgttcagaatttaggaaagttctctggctgttgcatccaagtaaaattaaaataaaattggttgcaattttaaaatcaagttcttcctatttgctttattcattcttggggctgttttaagaagttgtgtttctggtgctgtagcatgttcaaagtttttaaattaaggcaaaataaacatggtctaatgaattcattgtataatttcagtttatcaaactttgtaggttgttcggaatcctataattgaaaaacagagtaaagatggaaaaccagttattgaatatcaagaggaggagttgttggacaaggtttatagctcggtgctgcggcagtgctacagcatgtacaagctttttaatggtacatttctgaaagccatggaagacggaggcgtcaagcttctgaaagaaagattagagaaattcttccatcggtatttgcaaacgctacatttgcagtcatgtgacctacttgacatttttggtggaatcagcttcttcccgttggataaaatgacttatttgaaaatccagtcctttattaatagaatggaggaaagcctgaatatagtcaaatacactgcttttctctataacgatcagctcatctggagtggattagaacaagatgacatgagaattttatacaaataccttaccacctcccttttcccaaggcacatcgaacctgagttagcaggaagggattctccaataagagcagaaatgccaggaaatcttcaacactatggaagatttcttaccggacccttgaacctcaatgatccagatgcaaaatgcagattccccaaaatttttgtaaatacagatgacacttatgaagagctccatttaatcgtttataaggccatgagtgcggctgtgtgctttatgatcgacgcctctgtccacccaacgttggatttttgccgaagactggacagcatcgttgggccccagctcacagtgctggcctctgacatctgtgaacagtttaacatcaacaagaggatgtctgggtctgagaaagaaccccagtttaagtttatctacttcaaccacatgaatctcgccgagaagagcacagttcacatgaggaaaacgcccagcgtgtcgctcacttccgtgcacccggatttaatgaagattctcggtgacatcaacagtgactttaccagagtggatgaagatgaggagatcattgtgaaggccatgagtgattactgggttgttggaaagaagtctgatcggcgggagctctatgttattttgaatcaaaaaaatgcaaacctgattgaagtaaatgaagaggtcaagaaactttgtgcaacgcagttcaacaacatcttcttcttggattgacggatgacggctcaccgagagcatatctaaaaaacactctgcaaacatttggtcacatgcaagttagtggtcatatgacggactgcattcaggacaagggtaaagcaatacttgctttgaagaatcagatttcgactcggtctgctgatctgaggtttttagattttaaatatttatgtggaattaattaaaggtagttggctatatcgctatcatttcattcttttgacattatttgaatattttactggaaaataagactaataaattgttaaaagtttttaaaaaaaaaaaaaaaaaaannnnnnnnnnnnaaaaaaaaaaaaaaaaaaannnnnttttttttttttttannnnntttttttttttttttnngnnnnnntttttttntttttttttttttnttttttttttttttttttttaaaattttttttttttttttaatttttt

SEQ ID NO: 457426 - DNA, 1849 bp, Homo sapiens
tgcttccggggcggtggcgacggaggcggaagtgcggtgttttagccggtggctgctgtctctgggcgggccgtgggaggctcccgaggtgggggccggggcgggatggctgcagcggcggccggggccgggagcgggccctgggcggcccaggagaagcagttcccgccggcgctgctgagtttcttcatctacaacccgcgcttcgggccgcgcgaaggacaggaggaaaataagattttattttatcatccaaatgaggtagaaaagaatgagaagattagaaatgtcggattgtgtgaagctattgtacagtttacaaggacatttagcccatcaaaacctgcaaaatctttacatacacagaagaacagacagttcttcaatgaaccagaagaaaatttctggatggtcatggttgttcggaatcctataattgaaaaacagagtaaagatggaaaaccagttattgaatatcaagaggaggagttgttggacaaggtttatagctcggtgctgcggcagtgctacagcatgtacaagctttttaatggtacatttctgaaagccatggaagacggaggcgtcaagcttctgaaagaaagattagagaaattcttccatcggtatttgcaaacgctacatttgcagtcatgtgacctacttgacatttttggtggaatcagcttcttcccgttggataaaatgacttatttgaaaatccagtcctttattaatagaatggaggaaagcctgaatatagtcaaatacactgcttttctctataacgatcagctcatctggagtggattagaacaagatgacatgagaattttatacaaataccttaccacctcccttttcccaaggcacatcgaacctgagttagcaggaagggattctccaataagagcagaaatgccaggaaatcttcaacactatggaagatttcttaccggacccttgaacctcaatgatccagatgcaaaatgcagattccccaaaatttttgtaaatacagatgacacttatgaagagctccatttaatcgtttataaggccatgagtgcggctgtgtgctttatgatcgacgcctctgtccacccaacgttggatttttgccgaagactggacagcatcgttgggccccagctcacagtgctggcctctgacatctgtgaacagtttaacatcaacaagaggatgtctgggtctgagaaagaaccccagtttaagtttatctacttcaaccacatgaatctcgccgagaagagcacagttcacatgaggaaaacgcccagcgtgtcgctcacttccgtgcacccggatttaatgaagattctcggtgacatcaacagtgactttaccagagtggatgaagatgaggagatcattgtgaaggccatgagtgattactgggttgttggaaagaagtctgatcggcgggagctctatgttattttgaatcaaaaaaatgcaaacctgattgaagtaaatggtaagtaggatttggtatttcaggagaatttgagaagttgtcttttcattgcattaagaaacatggttaaaaaataggtaaatagaacaaatcatgactgttgagattctaagcaggtgcctctgctccacatttgatccattttctgttccttggaaaactatgacaagaccttcctgtagcacaggaaacttggcaatggcagaaagaaaattattttctacaattctaaaaaaaaaaaaaaatgactttatattaagaaatgtccccctttttttggagacaggttctcactttgtcacacaggctggagtgcagtggtgcaatcatagctcaccacagcccccaact

SEQ ID NO: 457427 - DNA, 1491 bp, Homo sapiens
  misc_feature (1342)..(1353): n is a, c, g, or t
  misc_feature (1373)..(1377): n is a, c, g, or t
  misc_feature (1393)..(1397): n is a, c, g, or t
  misc_feature (1413)..(1414): n is a, c, g, or t
  misc_feature (1416)..(1421): n is a, c, g, or t
  misc_feature (1429)..(1429): n is a, c, g, or t
  misc_feature (1443)..(1443): n is a, c, g, or t
gagatggagtgtctctctgtcgctcaggctggagtgtggagtacagtggcacgatctcagctcactgcagcctccatctcctgggttcaagcaattcccctgcctcagcctctctagtagctgggattgcaggtgcccaccaccagaaccagctaatttttgtagttttagtagagatgaggttttgccatgttggccaggctgcccttgaactcctgacttcaggtgatccacccagctcagcctcccaaagtgctgggattacaggcatgagccaccacgcccagccggcctattctgatatggtgtttgccaaatagcagctggcatcaaaagcaactggtgtgtatgaagtgggagtgtgttctgtttctagattcctgattctccttcacctcgttgaatcaagtcatgtctgttcttgcttttaagatttcttaccggacccttgaacctcaatgatccagatgcaaaatgcagattccccaaaatttttgtaaatacagatgacacttatgaagagctccatttaatcgtttataaggccatgagtgcggctgtgtgctttatgatcgacgcctctgtccacccaacgttggatttttgccgaagactggacagcatcgttgggccccagctcacagtgctggcctctgacatctgtgaacagtttaacatcaacaagaggatgtctgggtctgagaaagaaccccagtttaagtttatctacttcaaccacatgaatctcgccgagaagagcacagttcacatgaggaaaacgcccagcgtgtcgctcacttccgtgcacccggatttaatgaagattctcggtgacatcaacagtgactttaccagagtggatgaagatgaggagatcattgtgaaggccatgagtgattactgggttgttggaaagaagtctgatcggcgggagctctatgttattttgaatcaaaaaaatgcaaacctgattgaagtaaatgaagaggtcaagaaactttgtgcaacgcagttcaacaacatcttcttcttggattgacggatgacggctcaccgagagcatatctaaaaaacactctgcaaacatttggtcacatgcaagttagtggtcatatgacggactgcattcaggacaagggtaaagcaatacttgctttgaagaatcagatttcgactcggtctgctgatctgaggtttttagattttaaatatttatgtggaattaattaaaggtagttggctatatcgctatcatttcattcttttgacattatttgaatattttactggaaaataagactaataaattgttaaaagtttttaaaaaaaaaaaaaaaaaaannnnnnnnnnnnaaaaaaaaaaaaaaaaaaannnnnttttttttttttttannnnntttttttttttttttnngnnnnnntttttttntttttttttttttnttttttttttttttttttttaaaattttttttttttttttaatttttt

SEQ ID NO: 457428 - DNA, 1553 bp, Homo sapiens
gagctgtcaaagcgagcaggggtggcgccgggagtgggaacgccacacagtgccaaatccccggctccagctcccgactcccggctcccggctcccggctcccggtgcccaatcccgggccgcagccatgaacggcgaggagcagtactacgcggccacgcagctttacaaggacccatgcgcgttccagcgaggcccggcgccggagttcagcgccagcccccctgcgtgcctgtacatgggccgccagcccccgccgccgccgccgcacccgttccctggcgccctgggcgcgctggagcagggcagccccccggacatctccccgtacgaggtgccccccctcgccgacgaccccgcggtggcgcaccttcaccaccacctcccggctcagctcgcgctcccccacccgcccgccgggcccttcccggagggagccgagccgggcgtcctggaggagcccaaccgcgtccagctgcctttcccatggatgaagtctaccaaagctcacgcgtggaaaggccagtgggcaggcggcgcctacgctgcggagccggaggagaacaagcggacgcgcacggcctacacgcgcgcacagctgctagagctggagaaggagttcctattcaacaagtacatctcacggccgcgccgggtggagctggctgtcatgttgaacttgaccgagagacacatcaagatctggttccaaaaccgccgcatgaagtggaaaaaggaggaggacaagaagcgcggcggcgggacagctgtcgggggtggcggggtcgcggagcctgagcaggactgcgccgtgacctccggcgaggagcttctggcgctgccgccgccgccgccccccggaggtgctgtgccgcccgctgcccccgttgccgcccgagagggccgcctgccgcctggccttagcgcgtcgccacagccctccagcgtcgcgcctcggcggccgcaggaaccacgatgagaggcaggagctgctcctggctgaggggcttcaaccactcgccgaggaggagcagagggcctaggaggaccccgggcgtggaccacccgccctggcagttgaatggggcggcaattgcggggcccaccttagaccgaaggggaaaacccgctctctcaggcgcatgtgccagttggggccccgcgggtagatgccggcaggccttccggaagaaaaagagccattggtttttgtagtattggggccctcttttagtgatactggattggcgttgtttgtggctgttgcgcacatccctgccctcctacagcactccaccttgggacctgtttagagaagccggctcttcaaagacaatggaaactgtaccatacacattggaaggctccctaacacacacagcggggaagctgggccgagtaccttaatctgccataaagccattcttactcgggcgacccctttaagtttagaaataattgaaaggaaatgtttgagttttcaaagatcccgtgaaattgatgccagtggaatacagtgagtcctcctcttcctctggcatcaatttcacccg

SEQ ID NO: 457429 - DNA, 2717 bp, Homo sapiens
gggaggggaaagcagcgcagagatcgcagagaccaaggaggcgcccgcggctgcagagctgcagagcgggatctcttcgagctgtctgtgtccgggcagccggcgcgcaactgagccagaggacagcgcatcctttcggcgcgggccggcagggcccctgcggtcggcaagctggctccccgggtggccaccgggacccccgagcccaatggcgggggcggcggcaaaatcgacaacactgtagagatcacccccacctccaacggacaggtcgggaccctcggagatgcggtgcccacggagcagctgcagggtgagcgggagcgcgagcgggagggggagggagacgcgggcggcgacggactgggcagcagcctgtcgctggccgtgcccccaggccccctcagctttgaggcgctgctcgcccaggtgggggcgctgggcggcggccagcagctgcagctcggcctctgctgcctgccggtgctcttcgtggctctgggcatggcctcggaccccatcttcacgctggcgcccccgctgcattgccactacggggccttcccccctaatgcctctggctgggagcagcctcccaatgccagcggcgtcagcgtcgccagcgctgccctagcagccagcgccgccagccgtgtcgccaccagtaccgacccctcgtgcagcggcttcgccccgccggacttcaaccattgcctcaaggattgggactataatggccttcctgtgctcaccaccaacgccatcggccagtgggatctggtgtgtgacctgggctggcaggtgatcctggagcagatcctcttcatcttgggctttgcctccggctacctgttcctgggttaccccgcagacagatttggccgtcgcgggattgtgctgctgaccttggggctggtgggcccctgtggagtaggaggggctgctgcaggctcctccacaggcgtcatggccctccgattcctcttgggctttctgcttgccggtgttgacctgggtgtctacctgatgcgcctggagctgtgcgacccaacccagaggcttcgggtggccctggcaggggagttggtgggggtgggagggcacttcctgttcctgggcctggcccttgtctctaaggattggcgattcctacagcgaatgatcaccgctccctgcatcctcttcctgttttatggctggcctggtttgttcctggagtccgcacggtggctgatagtgaagcggcagattgaggaggctcagtctgtgctgaggatcctggctgagcgaaaccggccccatgggcagatgctgggggaggaggcccaggaggccctgcaggacctggagaatacctgccctctccctgcaacatcctccttttcctttgcttccctcctcaactaccgcaacatctggaaaaatctgcttatcctgggcttcaccaacttcattgcccatgccattcgccactgctaccagcctgtgggaggaggagggagcccatcggacttctacctgtgctctctgctggccagcggcaccgcagccctggcctgtgtcttcctgggggtcaccgtggaccgatttggccgccggggcatccttcttctctccatgacccttaccggcattgcttccctggtcctgctgggcctgtgggattatctgaacgaggctgccatcaccactttctctgtccttgggctcttctcctcccaagctgccgccatcctcagcaccctccttgctgctgaggtcatccccaccactgtccggggccgtggcctgggcctgatcatggctctaggggcgcttggaggactgagcggcccggcccagcgcctccacatgggccatggagccttcctgcagcacgtggtgctggcggcctgcgccctcctctgcattctcagcattatgctgctgccggagaccaagcgcaagctcctgcccgaggtgctccgggacggggagctgtgtcgccggccttccctgctgcggcagccaccccctacccgctgtgaccacgtcccgctgcttgccacccccaaccctgccctctgagcggcctctgagtaccctggcgggaggctggcccacacagaaaggtggcaagaagatcgggaagactgagtagggaaggcagggctgcccagaagtctcagaggcacctcacgccagccatcgcggagagctcagagggccgtccccaccctgcctcctccctgctgctttgcattcacttccttggccagagtcaggggacagggagagagctccacactgtaaccactgggtctgggctccatcctgcgcccaaagacatccacccagacctcattatttcttgctctatcattctgtttcaataaagacatttggaataaacgagcataatatcatagcctggacttccctcccttctgtttgtccttctatctcttgggggaaggtttttctcagtggaatgcacaccgataacaagctcccctctccctccttgtgccctgccccgagtggtgacttacagacaactgtcaccacttactgactgcttgcactgctgccagaactggcctaagcacttgacacacttcgtatcatttaatttttacagcattgcaaggtaggtgtttggatcaattaggggttgttgttgttgttgttgttgttgtttgttgttgtaagcaataaaaactggctctaatgaactt

SEQ ID NO: 457430 - DNA, 2399 bp, Homo sapiens
gggaggggaaagcagcgcagagatcgcagagaccaaggaggcgcccgcggctgcagagctgcagagcgggatctcttcgagctgtctgtgtccgggcagccggcgcgcaactgagccagaggacagcgcatcctttcggcgcgggccggcagggcccctgcggtcggcaagctggctccccgggtggccaccgggacccccgagcccaatggcgggggcggcggcaaaatcgacaacactgtagagatcacccccacctccaacggacaggtcgggaccctcggagatgcggtgcccacggagcagctgcagggtgagcgggagcgcgagcgggagggggagggagacgcgggcggcgacggactgggcagcagcctgtcgctggccgtgcccccaggccccctcagctttgaggcgctgctcgcccaggtgggggcgctgggcggcggccagcagctgcagctcggcctctgctgcctgccggtgctcttcgtggctctgggcatggcctcggaccccatcttcacgctggcgcccccgctgcattgccactacggggccttcccccctaatgcctctggctgggagcagcctcccaatgccagcggcgtcagcgtcgccagcgctgccctagcagccagcgccgccagccgtgtcgccaccagtaccgacccctcgtgcagcggcttcgccccgccggacttcaaccattgcctcaaggattgggactataatggccttcctgtgctcaccaccaacgccatcggccagtgggatctggtgtgtgacctgggctggcaggtgatcctggagcagatcctcttcatcttgggctttgcctccggctacctgttcctgggttaccccgcagacagatttggccgtcgcgggattgtgctgctgaccttggggctggtgggcccctgtggagtaggaggggctgctgcaggctcctccacaggcgtcatggccctccgattcctcttgggctttctgcttgccggtgttgacctgggtgtctacctgatgcgcctggagctgtgcgacccaacccagaggcttcgggtggccctggcaggggagttggtgggggtgggagggcacttcctgttcctgggcctggcccttgtctctaaggattggcgattcctacagcgaatgatcaccgctccctgcatcctcttcctgttttatggctggcctggtttgttcctggagtccgcacggtggctgatagtgaagcggcagattgaggaggctcagtctgtgctgaggatcctggctgagcgaaaccggccccatgggcagatgctgggggaggaggcccaggaggccctgcaggacctggagaatacctgccctctccctgcaacatcctccttttcctttgcttccctcctcaactaccgcaacatctggaaaaatctgcttatcctgggcttcaccaacttcattgcccatgccattcgccactgctaccagcctgtgggaggaggagggagcccatcggacttctacctgtgctctctgctggccagcggcaccgcagccctggcctgtgtcttcctgggggtcaccgtggaccgatttggccgccggggcatccttcttctctccatgacccttaccggcattgcttccctggtcctgctgggcctgtgggattatctgaacgaggctgccatcaccactttctctgtccttgggctcttctcctcccaagctgccgccatcctcagcaccctccttgctgctgaggtcatccccaccactgtccggggccgtggcctgggcctgatcatggctctaggggcgcttggaggactgagcggcccggcccagcgcctccacatgggccatggagccttcctgcagcacgtggtgctggcggcctgcgccctcctctgcattctcagcattatgctgctgccggagaccaagcgcaagctcctgcccgaggtgctccgggacggggagctgtgtcgccggccttccctgctgcggcagccaccccctacccgctgtgaccacgtcccgctgcttgccacccccaaccctgccctctgagcggcctctgagtaccctggcgggaggctggcccacacagaaaggtggcaagaagatcgggaagactgagtagggaaggcagggctgcccagaagtctcagaggcacctcacgccagccatcgcggagagctcagagggccgtccccaccctgcctcctccctgctgctttgcattcacttccttggccagagtcaggggacagggagagagctccacactgtaaccactgggtctgggctccatcctgcgcccaaagacatccacccagacctcattatttcttgctctatcattctgtttcaataaagacatttggaataaacgagcata

SEQ ID NO: 457431 - DNA, 2453 bp, Homo sapiens
gggaggggaaagcagcgcagagatcgcagagaccaaggaggcgcccgcggctgcagagctgcagagcgggatctcttcgagctgtctgtgtccgggcagccggcgcgcaactgagccagaggacagcgcatcctttcggcgcgggccggcagggcccctgcggtcggcaagctggctccccgggtggccaccgggacccccgagcccaatggcgggggcggcggcaaaatcgacaacactgtagagatcacccccacctccaacggacaggtcgggaccctcggagatgcggtgcccacggagcagctgcagggtgagcgggagcgcgagcgggagggggagggagacgcgggcggcgacggactgggcagcagcctgtcgctggccgtgcccccaggccccctcagctttgaggcgctgctcgcccaggtgggggcgctgggcggcggccagcagctgcagctcggcctctgctgcctgccggtgctcttcgtggctctgggcatggcctcggaccccatcttcacgctggcgcccccgctgcattgccactacggggccttcccccctaatgcctctggctgggagcagcctcccaatgccagcggcgtcagcgtcgccagcgctgccctagcagccagcgccgccagccgtgtcgccaccagtaccgacccctcgtgcagcggcttcgccccgccggacttcaaccattgcctcaaggattgggactataatggccttcctgtgctcaccaccaacgccatcggccagtgggatctggtgtgtgacctgggctggcaggtgatcctggagcagatcctcttcatcttgggctttgcctccggctacctgttcctgggttaccccgcagacagatttggccgtcgcgggattgtgctgctgaccttggggctggtgggcccctgtggagtaggaggggctgctgcaggctcctccacaggcgtcatggccctccgattcctcttgggctttctgcttgccggtgttgacctgggtgtctacctgatgcgcctggagctgtgcgacccaacccagaggcttcgggtggccctggcaggggagttggtgggggtgggagggcacttcctgttcctgggcctggcccttgtctctaaggattggcgattcctacagcgaatgatcaccgctccctgcatcctcttcctgttttatggctggcctggtttgttcctggagtccgcacggtggctgatagtgaagcggcagattgaggaggctcagtctgtgctgaggatcctggctgagcgaaaccggccccatgggcagatgctgggggaggaggcccaggaggccctgcaggacctggagaatacctgccctctccctgcaacatcctccttttcctttgcttccctcctcaactaccgcaacatctggaaaaatctgcttatcctgggcttcaccaacttcattgcccatgccattcgccactgctaccagcctgtgggaggaggagggagcccatcggacttctacctgtgctctctgctggccagcggcaccgcagccctggcctgtgtcttcctgggggtcaccgtggaccgatttggccgccggggcatccttcttctctccatgacccttaccggcattgcttccctggtcctgctgggcctgtgggattgtgagcatcctatcttccccacagtgtgggctcaacaagggaaccccaacagagatctgaacgaggctgccatcaccactttctctgtccttgggctcttctcctcccaagctgccgccatcctcagcaccctccttgctgctgaggtcatccccaccactgtccggggccgtggcctgggcctgatcatggctctaggggcgcttggaggactgagcggcccggcccagcgcctccacatgggccatggagccttcctgcagcacgtggtgctggcggcctgcgccctcctctgcattctcagcattatgctgctgccggagaccaagcgcaagctcctgcccgaggtgctccgggacggggagctgtgtcgccggccttccctgctgcggcagccaccccctacccgctgtgaccacgtcccgctgcttgccacccccaaccctgccctctgagcggcctctgagtaccctggcgggaggctggcccacacagaaaggtggcaagaagatcgggaagactgagtagggaaggcagggctgcccagaagtctcagaggcacctcacgccagccatcgcggagagctcagagggccgtccccaccctgcctcctccctgctgctttgcattcacttccttggccagagtcaggggacagggagagagctccacactgtaaccactgggtctgggctccatcctgcgcccaaagacatccacccagacctcattatttcttgctctatcattctgtttcaataaagacatttggaataaacgagcata

SEQ ID NO: 457432 - DNA, 2347 bp, Homo sapiens
gggaggggaaagcagcgcagagatcgcagagaccaaggaggcgcccgcggctgcagagctgcagagcgggatctcttcgagctgtctgtgtccgggcagccggcgcgcaactgagccagaggacagcgcatcctttcggcgcgggccggcagggcccctgcggtcggcaagctggctccccgggtggccaccgggacccccgagcccaatggcgggggcggcggcaaaatcgacaacactgtagagatcacccccacctccaacggacaggtcgggaccctcggagatgcggtgcccacggagcagctgcagggtgagcgggagcgcgagcgggagggggagggagacgcgggcggcgacggactgggcagcagcctgtcgctggccgtgcccccaggccccctcagctttgaggcgctgctcgcccaggtgggggcgctgggcggcggccagcagctgcagctcggcctctgctgcctgccggtgctcttcgtggctctgggcatggcctcggaccccatcttcacgctggcgcccccgctgcattgccactacggggccttcccccctaatgcctctggctgggagcagcctcccaatgccagcggcgtcagcgtcgccagcgctgccctagcagccagcgccgccagccgtgtcgccaccagtaccgacccctcgtgcagcggcttcgccccgccggacttcaaccattgcctcaaggattgggactataatggccttcctgtgctcaccaccaacgccatcggccagtgggatctggtgtgtgacctgggctggcaggtgatcctggagcagatcctcttcatcttgggctttgcctccggctacctgttcctgggttaccccgcagacagatttggccgtcgcgggattgtgctgctgaccttggggctggtgggcccctgtggagtaggaggggctgctgcaggctcctccacaggcgtcatggccctccgattcctcttgggctttctgcttgccggtgttgacctgggtgtctacctgatgcgcctggagctgtgcgacccaacccagaggcttcgggtggccctggcaggggagttggtgggggtgggagggcacttcctgttcctgggcctggcccttgtctctaaggattggcgattcctacagcgaatgatcaccgctccctgcatcctcttcctgttttatggctggcctggtttgttcctggagtccgcacggtggctgatagtgaagcggcagattgaggaggctcagtctgtgctgaggatcctggctgagcgaaaccggccccatgggcagatgctgggggaggaggcccaggaggccctgcaggcttcattgcccatgccattcgccactgctaccagcctgtgggaggaggagggagcccatcggacttctacctgtgctctctgctggccagcggcaccgcagccctggcctgtgtcttcctgggggtcaccgtggaccgatttggccgccggggcatccttcttctctccatgacccttaccggcattgcttccctggtcctgctgggcctgtgggattgtgagcatcctatcttccccacagtgtgggctcaacaagggaaccccaacagagatctgaacgaggctgccatcaccactttctctgtccttgggctcttctcctcccaagctgccgccatcctcagcaccctccttgctgctgaggtcatccccaccactgtccggggccgtggcctgggcctgatcatggctctaggggcgcttggaggactgagcggcccggcccagcgcctccacatgggccatggagccttcctgcagcacgtggtgctggcggcctgcgccctcctctgcattctcagcattatgctgctgccggagaccaagcgcaagctcctgcccgaggtgctccgggacggggagctgtgtcgccggccttccctgctgcggcagccaccccctacccgctgtgaccacgtcccgctgcttgccacccccaaccctgccctctgagcggcctctgagtaccctggcgggaggctggcccacacagaaaggtggcaagaagatcgggaagactgagtagggaaggcagggctgcccagaagtctcagaggcacctcacgccagccatcgcggagagctcagagggccgtccccaccctgcctcctccctgctgctttgcattcacttccttggccagagtcaggggacagggagagagctccacactgtaaccactgggtctgggctccatcctgcgcccaaagacatccacccagacctcattatttcttgctctatcattctgtttcaataaagacatttggaataaacgagcata

SEQ ID NO: 457433 - DNA, 2963 bp, Homo sapiens
  misc_feature (2402)..(2402): n is a, c, g, or t
  misc_feature (2409)..(2409): n is a, c, g, or t
gggaggggaaagcagcgcagagatcgcagagaccaaggaggcgcccgcggctgcagagctgcagagcgggatctcttcgagctgtctgtgtccgggcagccggcgcgcaactgagccagaggacagcgcatcctttcggcgcgggccggcagggcccctgcggtcggcaagctggctccccgggtggccaccgggacccccgagcccaatggcgggggcggcggcaaaatcgacaacactgtagagatcacccccacctccaacggacaggtcgggaccctcggagatgcggtgcccacggagcagctgcagggtgagcgggagcgcgagcgggagggggagggagacgcgggcggcgacggactgggcagcagcctgtcgctggccgtgcccccaggccccctcagctttgaggcgctgctcgcccaggtgggggcgctgggcggcggccagcagctgcagctcggcctctgctgcctgccggtgctcttcgtggctctgggcatggcctcggaccccatcttcacgctggcgcccccgctgcattgccactacggggccttcccccctaatgcctctggctgggagcagcctcccaatgccagcggcgtcagcgtcgccagcgctgccctagcagccagcgccgccagccgtgtcgccaccagtaccgacccctcgtgcagcggcttcgccccgccggacttcaaccattgcctcaaggattgggactataatggccttcctgtgctcaccaccaacgccatcggccagtgggatctggtgtgtgacctgggctggcaggtgatcctggagcagatcctcttcatcttgggctttgcctccggctacctgttcctgggttaccccgcagacagatttggccgtcgcgggattgtgctgctgaccttggggctggtgggcccctgtggagtaggaggggctgctgcaggctcctccacaggcgtcatggccctccgattcctcttgggctttctgcttgccggtgttgacctgggtgtctacctgatgcgcctggagctgtgcgacccaacccagaggcttcgggtggccctggcaggggagttggtgggggtgggagggcacttcctgttcctgggcctggcccttgtctctaaggattggcgattcctacagcgaatgatcaccgctccctgcatcctcttcctgttttatggctggcctggtttgttcctggagtccgcacggtggctgatagtgaagcggcagattgaggaggctcagtctgtgctgaggatcctggctgagcgaaaccggccccatgggcagatgctgggggaggaggcccaggaggccctgcaggacctggagaatacctgccctctccctgcaacatcctccttttcctttgcttccctcctcaactaccgcaacatctggaaaaatctgcttatcctgggcttcaccaacttcattgcccatgccattcgccactgctaccagcctgtgggaggaggagggagcccatcggacttctacctgtgctctctgctggccagcggcaccgcagccctggcctgtgtcttcctgggggtcaccgtggaccgatttggccgccggggcatccttcttctctccatgacccttaccggcattgcttccctggtcctgctgggcctgtgggattatctgaacgaggctgccatcaccactttctctgtccttgggctcttctcctcccaagctgccgccatcctcagcaccctccttgctgctgaggtcatccccaccactgtccggggccgtggcctgggcctgatcatggctctaggggcgcttggaggactgagcggcccggcccagcgcctccacatgggccatggagccttcctgcagcacgtggtgctggcggcctgcgccctcctctgcattctcagcattatgctgctgccggagaccaagcgcaagctcctgcccgaggtgctccgggacggggagctgtgtcgccggccttccctgctgcggcagccaccccctacccgctgtgaccacgtcccgctgcttgccacccccaaccctgccctctgagcggcctctgagtaccctggcgggaggctggcccacacagaaaggtggcaagaagatcgggaagactgagtagggaaggcagggctgcccagaagtctcagaggcacctcacgccagccatcgcggagagctcagagggccgtccccaccctgcctcctccctgctgctttgcattcacttccttggccagagtcaggggacagggagagagctccacactgtaaccactgggtctgggctccatcctgcgcccaaagacatccacccagacctcattatttcttgctctatcattctgtttcaataaagacatttggaataaacgagcataaanaaaacanaaaagagaacaaagacgaaaccgaaaggacaagaagaaaaaaaaaaataaaaaagaaagagaagaagaacaaaacaagaaggggggcggggcccaattagaaaatcacccgggtggcggcgagccagaattagtgcccaacaccccgatgtgcttgtgaaaaacaacagggagtgctgccacaacattaagagagccacgctaaatacaatgagaccgcaacgcgaggactggcgcaccgaatagaaagcaccggcagacgatgagagaaacacaactaaggactgagcagagattctcaagacagacaaccctacaccgaaacagtggcggggcgggagacccaaaacgggggtcgccagcccatatcccaacgacgccgatacaacagaccccagtggggggcaaaaagcatacaccaacgtcgagccgagggcgagtagtcgaagggggatccacacacggagtgcagaaatcccgcgcaggagcggcacgccagcgggtgtgccaacaggggttcataattagtgggaaggaaatctctctggcccgggg

SEQ ID NO: 457434 - DNA, 2589 bp, Homo sapiens
gggaggggaaagcagcgcagagatcgcagagaccaaggaggcgcccgcggctgcagagctgcagagcgggatctcttcgagctgtctgtgtccgggcagccggcgcgcaactgagccagaggacagcgcatcctttcggcgcgggccggcagggcccctgcggtcggcaagctggctccccgggtggccaccgggacccccgagcccaatggcgggggcggcggcaaaatcgacaacactgtagagatcacccccacctccaacggacaggtcgggaccctcggagatgcggtgcccacggagcagctgcagggtgagcgggagcgcgagcgggagggggagggagacgcgggcggcgacggactgggcagcagcctgtcgctggccgtgcccccaggccccctcagctttgaggcgctgctcgcccaggtgggggcgctgggcggcggccagcagctgcagctcggcctctgctgcctgccggtgctcttcgtggctctgggcatggcctcggaccccatcttcacgctggcgcccccgctgcattgccactacggggccttcccccctaatgcctctggctgggagcagcctcccaatgccagcggcgtcagcgtcgccagcgctgccctagcagccagcgccgccagccgtgtcgccaccagtaccgacccctcgtgcagcggcttcgccccgccggacttcaaccattgcctcaaggattgggactataatggccttcctgtgctcaccaccaacgccatcggccagtgggatctggtgtgtgacctgggctggcaggtgatcctggagcagatcctcttcatcttgggctttgcctccggctacctgttcctgggttaccccgcagacagatttggccgtcgcgggattgtgctgctgaccttggggctggtgggcccctgtggagtaggaggggctgctgcaggctcctccacaggcgtcatggccctccgattcctcttgggctttctgcttgccggtgttgacctgggtgtctacctgatgcgcctggagctgtgcgacccaacccagaggcttcgggtggccctggcaggggagttggtgggggtgggagggcacttcctgttcctgggcctggcccttgtctctaaggattggcgattcctacagcgaatgatcaccgctccctgcatcctcttcctgttttatggctggcctggtttgttcctggagtccgcacggtggctgatagtgaagcggcagattgaggaggctcagtctgtgctgaggatcctggctgagcgaaaccggccccatgggcagatgctgggggaggaggcccaggaggccctgcaggacctggagaatacctgccctctccctgcaacatcctccttttcctttgcttccctcctcaactaccgcaacatctggaaaaatctgcttatcctgggcttcaccaacttcattgcccatgccattcgccactgctaccagcctgtgggaggaggagggagcccatcggacttctacctgtgctctctgctggccagcggcaccgcagccctggcctgtgtcttcctgggggtcaccgtggaccgatttggccgccggggcatccttcttctctccatgacccttaccggcattgcttccctggtcctgctgggcctgtgggattatctgaacgaggctgccatcaccactttctctgtccttgggctcttctcctcccaagctgccgccatcctcagcaccctccttgctgctgaggtcatccccaccactgtccggggccgtggcctgggcctgatcatggctctaggggcgcttggaggactgagcggcccggcccagcgcctccacatgggccatggagccttcctgcagcacgtggtgctggcggcctgcgccctcctctgcattctcagcattatgctgctgccggagaccaagcgcaagctcctgcccgaggtgctccgggacggggagctgtgtcgccggccttccctgctgcggcagccaccccctacccgctgtgaccacgtcccgctgcttgccacccccaaccctgccctctgagcggcctctgagtaccctggcgggaggctggcccacacagaaaggtggcaagaagatcgggaagactgagtagggaaggcagggctgcccagaagtctcagaggcacctcacgccagccatcgcggagagctcagagggccgtccccaccctgcctcctccctgctgctttgcattcacttccttggccagagtcaggggacagggagagagctccacactgtaaccactgggtctgggctccatcctgcgcccaaagacatccacccagacctcattatttcttgctctatcattctgtttcaataaagacatttggaataaacgagcataaaaaaaaaaagaaaaataaaaaaacaaaaaaaaacctgtaatttcaaaagtcctctaggggtgcccacgccccgaaatccccttgtaggggctggaaaacatttaacgggccccagtttaaaaccagcgtgcccggaaaaacccatgggcgtgccgcatcagccacttacggctgcccatctgctcctgg

SEQ ID NO: 457435 - DNA, 2174 bp, Homo sapiens
gggaggggaaagcagcgcagagatcgcagagaccaaggaggcgcccgcggctgcagagctgcagagcgggatctcttcgagctgtctgtgtccgggcagccggcgcgcaactgagccagaggacagcgcatcctttcggcgcgggccggcagggcccctgcggtcggcaagctggctccccgggtggccaccgggacccccgagcccaatggcgggggcggcggcaaaatcgacaacactgtagagatcacccccacctccaacggacaggtcgggaccctcggagatgcggtgcccacggagcagctgcagggtgagcgggagcgcgagcgggagggggagggagacgcgggcggcgacggactgggcagcagcctgtcgctggccgtgcccccaggccccctcagctttgaggcgctgctcgcccaggtgggggcgctgggcggcggccagcagctgcagctcggcctctgctgcctgccggtgctcttcgtggctctgggcatggcctcggaccccatcttcacgctggcgcccccgctgcattgccactacggggccttcccccctaatgcctctggctgggagcagcctcccaatgccagcggcgtcagcgtcgccagcgctgccctagcagccagcgccgccagccgtgtcgccaccagtaccgacccctcgtgcagcggcttcgccccgccggacttcaaccattgcctcaaggattgggactataatggccttcctgtgctcaccaccaacgccatcggccagtgggatctggtgtgtgacctgggctggcaggtgatcctggagcagatcctcttcatcttgggctttgcctccggctacctgttcctgggttaccccgcagacagatttggccgtcgcgggattgtgctgctgaccttggggctggtgggcccctgtggagtaggaggggctgctgcaggctcctccacaggcgtcatggccctccgattcctcttgggctttctgcttgccggtgttgacctgggtgtctacctgatgcgcctggagctgtgcgacccaacccagaggcttcgggtggccctggcaggggagttggtgggggtgggagggcacttcctgttcctgggcctggcccttgtctctaaggattggcgattcctacagcgaatgatcaccgctccctgcatcctcttcctgttttatggctggcctggtttgttcctggagtccgcacggtggctgatagtgaagcggcagattgaggaggctcagtctgtgctgaggatcctggctgagcgaaaccggccccatgggcagatgctgggggaggaggcccaggaggccctgcaggacctggagaatacctgccctctccctgcaacatcctccttttcctttgcttccctcctcaactaccgcaacatctggaaaaatctgcttatcctgggcttcaccaacttcattgcccatgccattcgccactgctaccagcctgtgggaggaggagggagcccatcggacttctacctgtgctctctgctggccagcggcaccgcagccctggcctgtgtcttcctgggggtcaccgtggaccgatttggccgccggggcatccttcttctctccatgacccttaccggcattgcttccctggtcctgctgggcctgtgggattatctgaacgaggctgccatcaccactttctctgtccttgggctcttctcctcccaagctgccgccatcctcagcaccctccttgctgctgaggtcatccccaccactgtccggggccgtggcctgggcctgatcatggctctaggggcgcttggaggactgagcggcccggcccagcgcctccacatgggccatggagccttcctgcagcacgtggtgctggcggcctgcgccctcctctgcattctcagcattatgctgctgccggagaccaagcgcaagctcctgcccgaggtgctccgggacggggagctgtgtcgccggccttcccctcctccctgctgctttgcattcacttccttggccagagtcaggggacagggagagagctccacactgtaaccactgggtctgggctccatcctgcgcccaaagacatccacccagacctcattatttcttgctctatcattctgtttcaataaagacatttggaataaacgagcata

SEQ ID NO: 457436 - DNA, 1988 bp, Homo sapiens
gggaggggaaagcagcgcagagatcgcagagaccaaggaggcgcccgcggctgcagagctgcagagcgggatctcttcgagctgtctgtgtccgggcagccggcgcgcaactgagccagaggacagcgcatcctttcggcgcgggccggcagggcccctgcggtcggcaagctggctccccgggtggccaccgggacccccgagcccaatggcgggggcggcggcaaaatcgacaacactgtagagatcacccccacctccaacggacaggtcgggaccctcggagatgcggtgcccacggagcagctgcagggtgagcgggagcgcgagcgggagggggagggagacgcgggcggcgacggactgggcagcagcctgtcgctggccgtgcccccaggccccctcagctttgaggcgctgctcgcccaggtgggggcgctgggcggcggccagcagctgcagctcggcctctgctgcctgccggtgctcttcgtggctctgggcatggcctcggaccccatcttcacgctggcgcccccgctgcattgccactacggggccttcccccctaatgcctctggctgggagcagcctcccaatgccagcggcgtcagcgtcgccagcgctgccctagcagccagcgccgccagccgtgtcgccaccagtaccgacccctcgtgcagcggcttcgccccgccggacttcaaccattgcctcaaggattgggactataatggccttcctgtgctcaccaccaacgccatcggccagtgggatctggtgtgtgacctgggctggcaggtgatcctggagcagatcctcttcatcttgggctttgcctccggctacctgttcctgggttaccccgcagacagatttggccgtcgcgggattgtgctgctgaccttggggctggtgggcccctgtggagtaggaggggctgctgcaggctcctccacaggcgtcatggccctccgattcctcttgggctttctgcttgccggtgttgacctgggtgtctacctgatgcgcctggagctgtgcgacccaacccagaggcttcgggtggccctggcaggggagttggtgggggtgggagggcacttcctgttcctgggcctggcccttgtctctaaggattggcgattcctacagcgaatgatcaccgctccctgcatcctcttcctgttttatggctggcctggtttgttcctggagtccgcacggtggctgatagtgaagcggcagattgaggaggctcagtctgtgctgaggatcctggctgagcgaaaccggccccatgggcagatgctgggggaggaggcccaggaggccctgcaggacctggagaatacctgccctctccctgcaacatcctccttttcctttgcttccctcctcaactaccgcaacatctggaaaaatctgcttatcctgggcttcaccaacttcattgcccatgccattcgccactgctaccagcctgtgggaggaggagggagcccatcggacttctacctgtgctctctgctggccagcggcaccgcagccctggcctgtgtcttcctgggggtcaccgtggaccgatttggccgccggggcatccttcttctctccatgacccttaccggcattgcttccctggtcctgctgggcctgtgggattagtaccctggcgggaggctggcccacacagaaaggtggcaagaagatcgggaagactgagtagggaaggcagggctgcccagaagtctcagaggcacctcacgccagccatcgcggagagctcagagggccgtccccaccctgcctcctccctgctgctttgcattcacttccttggccagagtcaggggacagggagagagctccacactgtaaccactgggtctgggctccatcctgcgcccaaagacatccacccagacctcattatttcttgctctatcattctgtttcaataaagacatttggaataaacgagcata

SEQ ID NO: 457437 - DNA, 1130 bp, Homo sapiens
gggaggggaaagcagcgcagagatcgcagagaccaaggaggcgcccgcggctgcagagctgcagagcgggatctcttcgagctgtctgtgtccgggcagccggcgcgcaactgagccagaggacagcgcatcctttcggcgcgggccggcagggcccctgcggtcggcaagctggctccccgggtggccaccgggacccccgagcccaatggcgggggcggcggcaaaatcgacaacactgtagagatcacccccacctccaacggacaggtcgggaccctcggagatgcggtgcccacggagcagctgcagggtgagcgggagcgcgagcgggagggggagggagacgcgggcggcgacggactgggcagcagcctgtcgctggccgtgcccccaggccccctcagctttgaggcgctgctcgcccaggtgggggcgctgggcggcggccagcagctgcagctcggcctctgctgcctgccggtgctcttcgtggctctgggcatggcctcggaccccatcttcacgctggcgcccccgctgcattgccactacggggccttcccccctaatgcctctggctgggagcagcctcccaatgccagcggcgtcagcgtcgccagcgctgccctagcagccagcgccgccagccgtgtcgccaccagtaccgacccctcgtgcagcggcttcgccccgccggacttcaaccattgcctcaaggattgggactataatggccttcctgtgctcaccaccaacgccatcggccagtgggatctggtgtgtgacctgggctggcaggtgatcctggagcagatcctcttcatcttgggctttgcctccggctacctgttcctgggttaccccgcagacagatttggccgtcgcgggattgtgctgctgaccttggggctggtgggcccctgtggagtaggaggggctgctgcaggctcctccacaggcgtcatggccctccgattcctcttgggctttctgcttgccggtgttgacctgggtgtctacctgatgcgtctgggctccatcctgcgcccaaagacatccacccagacctcattatttcttgctctatcattctgtttcaataaagacatttggaataaacgagcata

SEQ ID NO: 457438 - DNA, 450 bp, Homo sapiens
tcccctccacaggttaatagttccaactccgtatatcaatgaacccccctcccacatctcctctgaacagtctgagcaagataagctccaggcccactgaccattagctctgttcctaaggatgaatggtcccaaatcccctaagcaatatcccatcccctctgttgagtgatgtcacatccattgacaagtgccctaatctctgaccaatagcccaagagtcaatgttcccacctcttaaagaaccacaaccacaccccagtgcccagtagccaggcatcacccacccatggtccccatccctccccatcttctcaagcctctgtccaactcttgctcccagaacttcattctcatacctctagctctgaagtgtgcagctgggtcttacccagcaactttcccaccaccagagagtctgggtgaccagaagcccttcccactttctag

SEQ ID NO: 457439 - DNA, 304 bp, Homo sapiens
gcgcccgcggctgcagagctgcagagcgggatctcttcgagctgtctgtgtccgggcagccggcgcgcaactgagccagaggacagcgcatcctttcggcgcgggccggcagggcccctgcggtcggcaagctggctccccgggtggccaccgggacccccgagcccaatggcgggggcggcggcaaaatcgacaacactgtagagatcacccccacctccaacggagtaagtgcccgagccccaggtggcgacgccatcctctcccagcacccccgcccccgcggagcgtctggcattttcct

SEQ ID NO: 457440 - DNA, 2613 bp, Homo sapiens
gggaggggaaagcagcgcagagatcgcagagaccaaggaggcgcccgcggctgcagagctgcagagcgggatctcttcgagctgtctgtgtccgggcagccggcgcgcaactgagccagaggacagcgcatcctttcggcgcgggccggcagggcccctgcggtcggcaagctggctccccgggtggccaccgggacccccgagcccaatggcgggggcggcggcaaaatcgacaacactgtagagatcacccccacctccaacggacaggtcgggaccctcggagatgcggtgcccacggagcagctgcagggtgagcgggagcgcgagcgggagggggagggagacgcgggcggcgacggactgggcagcagcctgtcgctggccgtgcccccaggccccctcagctttgaggcgctgctcgcccaggtgggggcgctgggcggcggccagcagctgcagctcggcctctgctgcctgccggtgctcttcgtggctctgggcatggcctcggaccccatcttcacgctggcgcccccgctgcattgccactacggggccttcccccctaatgcctctggctgggagcagcctcccaatgccagcggcgtcagcgtcgccagcgctgccctagcagccagcgccgccagccgtgtcgccaccagtaccgacccctcgtgcagcggcttcgccccgccggacttcaaccattgcctcaaggattgggactataatggccttcctgtgctcaccaccaacgccatcggccagatttggccgtcgcgggattgtgctgctgaccttggggctggtgggcccctgtggagtaggaggggctgctgcaggctcctccacaggcgtcatggccctccgattcctcttgggctttctgcttgccggtgttgacctgggtgtctacctgatgcgcctggagctgtgcgacccaacccagaggcttcgggtggccctggcaggggagttggtgggggtgggagggcacttcctgttcctgggcctggcccttgtctctaaggattggcgattcctacagcgaatgatcaccgctccctgcatcctcttcctgttttatggctggcctggtttgttcctggagtccgcacggtggctgatagtgaagcggcagattgaggaggctcagtctgtgctgaggatcctggctgagcgaaaccggccccatgggcagatgctgggggaggaggcccaggaggccctgcaggacctggagaatacctgccctctccctgcaacatcctccttttcctttgcttccctcctcaactaccgcaacatctggaaaaatctgcttatcctgggcttcaccaacttcattgcccatgccattcgccactgctaccagcctgtgggaggaggagggagcccatcggacttctacctgtgctctctgctggccagcggcaccgcagccctggcctgtgtcttcctgggggtcaccgtggaccgatttggccgccggggcatccttcttctctccatgacccttaccggcattgcttccctggtcctgctgggcctgtgggattatctgaacgaggctgccatcaccactttctctgtccttgggctcttctcctcccaagctgccgccatcctcagcaccctccttgctgctgaggtcatccccaccactgtccggggccgtggcctgggcctgatcatggctctaggggcgcttggaggactgagcggcccggcccagcgcctccacatgggccatggagccttcctgcagcacgtggtgctggcggcctgcgccctcctctgcattctcagcattatgctgctgccggagaccaagcgcaagctcctgcccgaggtgctccgggacggggagctgtgtcgccggccttccctgctgcggcagccaccccctacccgctgtgaccacgtcccgctgcttgccacccccaaccctgccctctgagcggcctctgagtaccctggcgggaggctggcccacacagaaaggtggcaagaagatcgggaagactgagtagggaaggcagggctgcccagaagtctcagaggcacctcacgccagccatcgcggagagctcagagggccgtccccaccctgcctcctccctgctgctttgcattcacttccttggccagagtcaggggacagggagagagctccacactgtaaccactgggtctgggctccatcctgcgcccaaagacatccacccagacctcattatttcttgctctatcattctgtttcaataaagacatttggaataaacgagcataatatcatagcctggacttccctcccttctgtttgtccttctatctcttgggggaaggtttttctcagtggaatgcacaccgataacaagctcccctctccctccttgtgccctgccccgagtggtgacttacagacaactgtcaccacttactgactgcttgcactgctgccagaactggcctaagcacttgacacacttcgtatcatttaatttttacagcattgcaaggtaggtgtttggatcaattaggggttgttgttgttgttgttgttgttgtttgttgttgtaagcaataaaaactggctctaatgaactt

SEQ ID NO: 457441 - DNA, 2482 bp, Homo sapiens
gggaggggaaagcagcgcagagatcgcagagaccaaggaggcgcccgcggctgcagagctgcagagcgggatctcttcgagctgtctgtgtccgggcagccggcgcgcaactgagccagaggacagcgcatcctttcggcgcgggccggcagggcccctgcggtcggcaagctggctccccgggtggccaccgggacccccgagcccaatggcgggggcggcggcaaaatcgacaacactgtagagatcacccccacctccaacggacaggtcgggaccctcggagatgcggtgcccacggagcagtgcattgccactacggggccttcccccctaatgcctctggctgggagcagcctcccaatgccagcggcgtcagcgtcgccagcgctgccctagcagccagcgccgccagccgtgtcgccaccagtaccgacccctcgtgcagcggcttcgccccgccggacttcaaccattgcctcaaggattgggactataatggccttcctgtgctcaccaccaacgccatcggccagtgggatctggtgtgtgacctgggctggcaggtgatcctggagcagatcctcttcatcttgggctttgcctccggctacctgttcctgggttaccccgcagacagatttggccgtcgcgggattgtgctgctgaccttggggctggtgggcccctgtggagtaggaggggctgctgcaggctcctccacaggcgtcatggccctccgattcctcttgggctttctgcttgccggtgttgacctgggtgtctacctgatgcgcctggagctgtgcgacccaacccagaggcttcgggtggccctggcaggggagttggtgggggtgggagggcacttcctgttcctgggcctggcccttgtctctaaggattggcgattcctacagcgaatgatcaccgctccctgcatcctcttcctgttttatggctggcctggtttgttcctggagtccgcacggtggctgatagtgaagcggcagattgaggaggctcagtctgtgctgaggatcctggctgagcgaaaccggccccatgggcagatgctgggggaggaggcccaggaggccctgcaggacctggagaatacctgccctctccctgcaacatcctccttttcctttgcttccctcctcaactaccgcaacatctggaaaaatctgcttatcctgggcttcaccaacttcattgcccatgccattcgccactgctaccagcctgtgggaggaggagggagcccatcggacttctacctgtgctctctgctggccagcggcaccgcagccctggcctgtgtcttcctgggggtcaccgtggaccgatttggccgccggggcatccttcttctctccatgacccttaccggcattgcttccctggtcctgctgggcctgtgggattatctgaacgaggctgccatcaccactttctctgtccttgggctcttctcctcccaagctgccgccatcctcagcaccctccttgctgctgaggtcatccccaccactgtccggggccgtggcctgggcctgatcatggctctaggggcgcttggaggactgagcggcccggcccagcgcctccacatgggccatggagccttcctgcagcacgtggtgctggcggcctgcgccctcctctgcattctcagcattatgctgctgccggagaccaagcgcaagctcctgcccgaggtgctccgggacggggagctgtgtcgccggccttccctgctgcggcagccaccccctacccgctgtgaccacgtcccgctgcttgccacccccaaccctgccctctgagcggcctctgagtaccctggcgggaggctggcccacacagaaaggtggcaagaagatcgggaagactgagtagggaaggcagggctgcccagaagtctcagaggcacctcacgccagccatcgcggagagctcagagggccgtccccaccctgcctcctccctgctgctttgcattcacttccttggccagagtcaggggacagggagagagctccacactgtaaccactgggtctgggctccatcctgcgcccaaagacatccacccagacctcattatttcttgctctatcattctgtttcaataaagacatttggaataaacgagcataatatcatagcctggacttccctcccttctgtttgtccttctatctcttgggggaaggtttttctcagtggaatgcacaccgataacaagctcccctctccctccttgtgccctgccccgagtggtgacttacagacaactgtcaccacttactgactgcttgcactgctgccagaactggcctaagcacttgacacacttcgtatcatttaatttttacagcattgcaaggtaggtgtttggatcaattaggggttgttgttgttgttgttgttgttgtttgttgttgtaagcaataaaaactggctctaatgaactt

SEQ ID NO: 457442 - DNA, 2479 bp, Homo sapiens
gggaggggaaagcagcgcagagatcgcagagaccaaggaggcgcccgcggctgcagagctgcagagcgggatctcttcgagctgtctgtgtccgggcagccggcgcgcaactgagccagaggacagcgcatcctttcggcgcgggccggcagggcccctgcggtcggcaagctggctccccgggtggccaccgggacccccgagcccaatggcgggggcggcggcaaaatcgacaacactgtagagatcacccccacctccaacggacaggtcgggaccctcggagatgcggtgcccacggagcagctgcagggtgagcgggagcgcgagcgggagggggagggagacgcgggcggcgacggactgggcagcagcctgtcgctggccgtgcccccaggccccctcagctttgaggcgctgctcgcccaggtgggggcgctgggcggcggccagcagctgcagctcggcctctgctgcctgccggtgctcttcgtggctctgggcatggcctcggaccccatcttcacgctggcgcccccgctgcattgccactacggggccttcccccctaatgcctctggctgggagcagcctcccaatgccagcggcgtcagcgtcgccagcgctgccctagcagccagcgccgccagccgtgtcgccaccagtaccgacccctcgtgcagcggcttcgccccgccggacttcaaccattgcctcaaggattgggactataatggccttcctgtgctcaccaccaacgccatcggccagtgggatctggtgtgtgacctgggctggcaggtgatcctggagcagatcctcttcatcttgggctttgcctccggctacctgttcctgggttaccccgcagacagatttggccgtcgcgggattgtgctgctgaccttggggctggtgggcccctgtggagtaggaggggctgctgcaggctcctccacaggcgtcatggccctccgattcctcttgggctttctgcttgccggtgttgacctgggtgtctacctgatgcgcctggagctgtgcgacccaacccagaggcttcgggtggccctggcaggggagttggtgggggtgggagggcacttcctgttcctgggcctggcccttgtctctaaggattggcgattcctacagcgaatgatcaccgctccctgcatcctcttcctgttttatggctggcctggtttgttcctggagtccgcacggtggctgatagtgaagcggcagattgaggaggctcagtctgtgctgaggatcctggctgagcgaaaccggccccatgggcagatgctgggggaggaggcccaggaggccctgcaggacctggagaatacctgccctctccctgcaacatcctccttttcctttgcttccctcctcaactaccgcaacatctggaaaaatctgcttatcctgggcttcaccaacttcattgcccatgccattcgccactgctaccagcctgtgggaggaggagggagcccatcggacttctacctgtgctctctgctggccagcggcaccgcagccctggcctgtgtcttcctgggggtcaccgtggaccgatttggccgccggggcatccttcttctctccatgacccttaccggcattgcttccctggtcctgctgggcctgtgggattatctgaacgaggctgccatcaccactttctctgtccttgggctcttctcctcccaagctgccgccatcctcagcaccctccttgctgctgaggtcatccccaccactgtccggggccgtggcctgggcctgatcatggctctaggggcgcttggaggactgagcggcccggcccagcgcctccacatgggccatggagccttcctgcagcacgtggtgctggcggcctgcgccctcctctgcattctcagcattatgctgctgccggagaccaagcgcaagctcctgcccgaggtgctccgggacggggagctgtgtcgccggccttccctgctgcggcagccaccccctacccgctgtgaccacgtcccgctgcttgccacccccaaccctgccctctgagcggcctctgagtaccctggcgggaggctggcccacacagaaaggtggcaagaagatcgggaagactgagtagggaaggcagggctgcccagaagtctcagaggcacctcacgccagccatcgcggagagctcagagggccgtccccaccctgcctcctccctgctgctttgcattcacttccttggccagagtcaggggacagggagagagctccacactgtaaccactgggtctgggctccatcctgcgcccaaagacatccacccagacctcattatttcttgctctatcattctgtttcaataaagacatttggaataaacgagcataaaaatattatatcgtctatcaccgttcttcctattccctaataatactttaggggggggctcggtaccctttgcccttcg

SEQ ID NO: 457443 - DNA, 2256 bp, Homo sapiens
gggaggggaaagcagcgcagagatcgcagagaccaaggaggcgcccgcggctgcagagctgcagagcgggatctcttcgagctgtctgtgtccgggcagccggcgcgcaactgagccagaggacagcgcatcctttcggcgcgggccggcagggcccctgcggtcggcaagctggctccccgggtggccaccgggacccccgagcccaatggcgggggcggcggcaaaatcgacaacactgtagagatcacccccacctccaacggacaggtcgggaccctcggagatgcggtgcccacggagcagctgcagggtgagcgggagcgcgagcgggagggggagggagacgcgggcggcgacggactgggcagcagcctgtcgctggccgtgcccccaggccccctcagctttgaggcgctgctcgcccaggtgggggcgctgggcggcggccagcagctgcagctcggcctctgctgcctgccggtgctcttcgtggctctgggcatggcctcggaccccatcttcacgctggcgcccccgctgcattgccactacggggccttcccccctaatgcctctggctgggagcagcctcccaatgccagcggcgtcagcgtcgccagcgctgccctagcagccagcgccgccagccgtgtcgccaccagtaccgacccctcgtgcagcggcttcgccccgccggacttcaaccattgcctcaaggattgggactataatggccttcctgtgctcaccaccaacgccatcggccagtgggatctggtgtgtgacctgggctggcaggtgatcctggagcagatcctcttcatcttgggctttgcctccggctacctgttcctgggttaccccgcagacagatttggccgtcgcgggattgtgctgctgaccttggggctggtgggcccctgtggagtaggaggggctgctgcaggctcctccacaggcgtcatggccctccgattcctcttgggctttctgcttgccggtgttgacctgggtgtctacctgatgcgcctggagctgtgcgacccaacccagaggcttcgggtggccctggcaggggagttggtgggggtgggagggcacttcctgttcctgggcctggcccttgtctctaaggattggcgattcctacagcgaatgatcaccgctccctgcatcctcttcctgttttatggctggcctggtttgttcctggagtccgcacggtggctgatagtgaagcggcagattgaggaggctcagtctgtgctgaggatcctggctgagcgaaaccggccccatgggcagatgctgggggaggaggcccaggaggccctgcaggacctggagaatacctgccctctccctgcaacatcctccttttcctttgcttccctcctcaactaccgcaacatctggaaaaatctgcttatcctgggcttcaccaacttcattgcccatgccattcgccactgctaccagcctgtgggaggaggagggagcccatcggacttctacctgtgctctctgctggccagcggcaccgcagccctggcctgtgtcttcctgggggtcaccgtggaccgatttggccgccggggcatccttcttctctccatgacccttaccggcattgcttccctggtcctgctgggcctgtgggattatctgaacgaggctgccatcaccactttctctgtccttgggctcttctcctcccaagctgccgccatcctcagcaccctccttgctgctgaggtcatccccaccactgtccggggccgtggcctgggcctgatcatggctctaggggcgcttggaggactgagcggcccggcccagcgcctccacatgggccatggagccttcctgcagcacgtggtgctggcggcctgcgccctcctctgcattctcagcattatgctgctgccggagaccaagcgcaagctcctgcccgaggtgctccgggacggggagctgtgtcgccggccttccctgctgcggcagccaccccctacccgctgtgaccacgtcccgctgcttgccacccccaaccctgccctctgagcggcctctgcctcctccctgctgctttgcattcacttccttggccagagtcaggggacagggagagagctccacactgtaaccactgggtctgggctccatcctgcgcccaaagacatccacccagacctcattatttcttgctctatcattctgtttcaataaagacatttggaataaacgagcata

SEQ ID NO: 457444 - DNA, 2940 bp, Homo sapiens
  misc_feature (2379)..(2379): n is a, c, g, or t
  misc_feature (2386)..(2386): n is a, c, g, or t
gggaggggaaagcagcgcagagatcgcagagaccaaggaggcgcccgcggctgcagagctgcagagcgggatctcttcgagctgtctgtgtccgggcagccggcgcgcaactgagccagaggacagcgcatcctttcggcgcgggccggcagggcccctgcggtcggcaagctggctccccgggtggccaccgggacccccgagcccaatggcgggggcggcggcaaaatcgacaacactgtagagatcacccccacctccaacggacaggtcgggaccctcggagatgcggtgcccacggagcagctgcagggtgagcgggagcgcgagcgggagggggagggagacgcgggcggcgacggactgggcagcagcctgtcgctggccgtgcccccaggccccctcagctttgaggcgctgctcgcccaggtgggggcgctgggcggcggccagcagctgcagctcggcctctgctgcctgccggtgctcttcgtggctctgggcatggcctcggaccccatcttcacgctggcgcccccgctgcattgccactacggggccttcccccctaatgcctctggctgggagcagcctcccaatgccagcggcgtcagcgtcgccagcgctgccctagcagccagcgccgccagccgtgtcgccaccagtaccgacccctcgtgcagcggcttcgccccgccggacttcaaccattgcctcaaggattgggactataatggccttcctgtgctcaccaccaacgccatcggccagtgggatctggtgtgtgacctgggctggcaggtgatcctggagcagatcctcttcatcttgggctttgcctccggctacctgttcctgggttaccccgcagacagatttggccgtcgcgggattgtgctgctgaccttggggctggtgggcccctgtggagtaggaggggctgctgcaggctcctccacaggcgtcatggccctccgattcctcttgggctttctgcttgccggtgttgacctgggtgtctacctgatgcgcctggagctgtgcgacccaacccagaggcttcgggtggccctggcaggggagttggtgggggtgggagggcacttcctgttcctgggcctggcccttgtctctaaggattggcgattcctacagcgaatgatcaccgctccctgcatcctcttcctgttttatggctggcctggtttgttcctggagtccgcacggtggctgatagtgaagcggcagattgaggaggctcagtctgtgctgaggatcctggctgagcgaaaccggccccatgggcagatgctgggggaggaggcccaggaggccctgcaggacctggagaatacctgccctctccctgcaacatcctccttttcctttgcttccctcctcaactaccgcaacatctggaaaaatctgcttatcctgggcttcaccaacttcattgcccatgccattcgccactgctaccagcctgtgggaggaggagggagcccatcggacttctacctgtgctctctgctggccagcggcaccgcagccctggcctgtgtcttcctgggggtcaccgtggaccgatttggccgccggggcatccttcttctctccatgacccttaccggcattgcttccctggtcctgctgggcctgtgggattatctgaacgaggctgccatcaccactttctctgtccttgggctcttctcctcccaagctgccgccatcctcagcaccctccttgctgctgaggtcatccccaccactgtccggggccgtggcctgggcctgatcatggctctaggggcgcttggaggactgagcggcccggcccagcgcctccacatgggccatggagccttcctgcgccctcctctgcattctcagcattatgctgctgccggagaccaagcgcaagctcctgcccgaggtgctccgggacggggagctgtgtcgccggccttccctgctgcggcagccaccccctacccgctgtgaccacgtcccgctgcttgccacccccaaccctgccctctgagcggcctctgagtaccctggcgggaggctggcccacacagaaaggtggcaagaagatcgggaagactgagtagggaaggcagggctgcccagaagtctcagaggcacctcacgccagccatcgcggagagctcagagggccgtccccaccctgcctcctccctgctgctttgcattcacttccttggccagagtcaggggacagggagagagctccacactgtaaccactgggtctgggctccatcctgcgcccaaagacatccacccagacctcattatttcttgctctatcattctgtttcaataaagacatttggaataaacgagcataaanaaaacanaaaagagaacaaagacgaaaccgaaaggacaagaagaaaaaaaaaaataaaaaagaaagagaagaagaacaaaacaagaaggggggcggggcccaattagaaaatcacccgggtggcggcgagccagaattagtgcccaacaccccgatgtgcttgtgaaaaacaacagggagtgctgccacaacattaagagagccacgctaaatacaatgagaccgcaacgcgaggactggcgcaccgaatagaaagcaccggcagacgatgagagaaacacaactaaggactgagcagagattctcaagacagacaaccctacaccgaaacagtggcggggcgggagacccaaaacgggggtcgccagcccatatcccaacgacgccgatacaacagaccccagtggggggcaaaaagcatacaccaacgtcgagccgagggcgagtagtcgaagggggatccacacacggagtgcagaaatcccgcgcaggagcggcacgccagcgggtgtgccaacaggggttcataattagtgggaaggaaatctctctggcccgggg

SEQ ID NO: 457445 - DNA, 1804 bp, Homo sapiens
gggaggggaaagcagcgcagagatcgcagagaccaaggaggcgcccgcggctgcagagctgcagagcgggatctcttcgagctgtctgtgtccgggcagccggcgcgcaactgagccagaggacagcgcatcctttcggcgcgggccggcagggcccctgcggtcggcaagctggctccccgggtggccaccgggacccccgagcccaatggcgggggcggcggcaaaatcgacaacactgtagagatcacccccacctccaacggacaggtcgggaccctcggagatgcggtgcccacggagcagctgcagggtgagcgggagcgcgagcgggagggggagggagacgcgggcggcgacggactgggcagcagcctgtcgctggccgtgcccccaggccccctcagctttgaggcgctgctcgcccaggtgggggcgctgggcggcggccagcagctgcagctcggcctctgctgcctgccggtgctcttcgtggctctgggcatggcctcggaccccatcttcacgctggcgcccccgctgcattgccactacggggccttcccccctaatgcctctggctgggagcagcctcccaatgccagcggcgtcagcgtcgccagcgctgccctagcagccagcgccgccagccgtgtcgccaccagtaccgacccctcgtgcagcggcttcgccccgccggacttcaaccattgcctcaaggattgggactataatggccttcctgtgctcaccaccaacgccatcggccagtgggatctggtgtgtgacctgggctggcaggtgatcctggagcagatcctcttcatcttgggctttgcctccggctacctgttcctgggttaccccgcagacagatttggccgtcgcgggattgtgctgctgaccttggggctggtgggcccctgtggagtaggaggggctgctgcaggctcctccacaggcgtcatggccctccgattcctcttgggctttctgcttgccggtgttgacctgggtgtctacctgatgcgcctggagctgtgcgacccaacccagaggcttcgggtggccctggcaggggagttggtgggggtgggagggcacttcctgttcctgggcctggcccttgtctctaaggattggcgattcctacagcgaatgatcaccgctccctgcatcctcttcctgttttatggctggcctggtttgttcctggagtccgcacggtggctgatagtgaagcggcagattgaggaggctcagtctgtgctgaggatcctggctgagcgaaaccggccccatgggcagatgctgggggaggaggcccaggaggccctgcaggacctggagaatacctgccctctccctgcaacatcctccttttcctttgcttccctcctcaactaccgcaacatctggaaaaatctgcttatcctgggcttcaccaacttcattgcccatgccattcgccactgctaccagcctgtgggaggaggagggagcccatcggacttctacctgtgctctctgctggccagcggcaccgcagccctggcctgtgtcttcctgggggtcaccgtggaccgatttggccgccggggcatccttcttctctccatgacccttaccggcattgcttccctggtcctgctgggcctgtgggattatctgaacgaggctgccatcaccactttctctgtccttgggctcttctcctcccaagctgccgccatcctcagcaccgtgcggactccaggaacaaaccaggccagccataaaacaggaagaggatgcagggcgctga

SEQ ID NO: 457446 - DNA, 2175 bp, Homo sapiens
acatattcagcagggttagcttgtccctcccctccctcttcagcttcccagacactgattctggaatgaaaattcacctgcctctgagttggctcctaatgggggtgggagtgttacttcggttcccaggttggaagattatctcacccggccccagctatataagctgaccggtgtggaggggcccagcagggccaactccagggattccttccacgacagaaaaacatacaagactccttcagccaacatgatggtactgaaagtagaggaactggtcactggaaagaagaatggcaatggggaggcaggggaattccttcctgaggatttcagagatggagagtatgaagctgctgttactttagagaagcaggaggatctgaagacacttctagcccaccctgtgaccctgggggagcaacagtggaaaagcgagaaacaacgagaggcagagctcaaaaagaaaaaactagaacaaagatcaaagcttgaaaatttagaagaccttgaaataatcattcaactgaagaaaaggaaaaaatacaggaaaactaaagttccagttgtaaaggaaccagaacctgaaatcattacggaacctgtggatgtgcctacgtttctgaaggctgctctggagaataaactgccagtagtagaaaaattcttgtcagacaagaacaatccagatgtttgtgatgagtataaacggacagctcttcatagagcatgcttggaaggacatttggcaattgtggagaagttaatggaagctggagcccagatcgaattccgtgatatgcttgaatccacagccatccactgggcaagccgtggaggaaacctggatgttttaaaattgttgctgaataaaggagcaaaaattagcgcccgagataagttgctcagcacagcgctgcatgtggcggtgaggactggccactatgagtgcgcggagcatcttatcgcctgtgaggcagacctcaacgccaaagacagagaaggagataccccgttgcatgatgcggtgagactgaaccgctataagatgatccgactcctgattatgtatggcgcggatctcaacatcaagaactgtgctgggaagacgccgatggatctggtgctacactggcagaatggaaccaaagcaatattcgacagcctcagagagaactcctacaagacctctcgcatagctacattctgaggcaaacgacagactcttaatcagtaaatgttcactggcattttgaaggcatggcccaagagaagagacactagccataaaatctagtttctatttatcaacgtgttgtgaagatgtacctaatgaagttttgagaaagcacagggttataggtgtttaaatttcctttagtgaaactcttatttatttttatgtattcctgtttatttatttactgccacgctactgatattcagaccttcatgatcatccatctggtgagcagagcttcatttgtatataacactttcagagccttcccacccataggtagttcttaaaccaggtgaaagagcaaagttcaagtgcctacttatgtgtcattcgctcatgtaagagtttttaagagagggctgattatcacagccctcttttctcctgaatttttaatgcagaagtttgaatgaagcaagggaaggcatgtagggacaggaaaggaaacaatggaaggaaagtgattctgtgaaaaggacagtgaagccagctattttacccccaggctggattttttttttttttttttttttttttttttttaccgagtacacagagtacccaagtgaagagaacgtcatgagtgtaagtgcaaatcagtggaaggagcggcaaactgggacatgcagaattgaatttgctcaaaaaagatgaaaggaaatgcaaactgtaaatgtataaatgtatattgtattgtatgtacattttatattcataataaaggcaatcaaactctaaacctctaagtccttctataagtgtggtggaaatgtcctatgtgaaaaaaaaagctatataggagggttttttttttccattgttttccaagttttgcagattagaaatgtcccgtacaacagcactcccagtatttaatatgtatacagatcacctggggatctggttaaaatgcagatttctgattcagctgg

SEQ ID NO: 457447 - DNA, 2067 bp, Homo sapiens
acatattcagcagggttagcttgtccctcccctccctcttcagcttcccagacactgattctggaatgaaaattcacctgcctctgagttggctcctaatgggggtgggagtgttacttcggttcccaggttggaagattatctcacccggccccagctatataagctgaccggtgtggaggggcccagcagggccaactccagggattccttccacgacagaaaaacatacaagactccttcagccaacatgatggtactgaaagtagaggaactggtcactggaaagaagaatggcaatggggaggcaggggaattccttcctgaggatttcagagatggagagtatgaagctgctgttactttagagaagcaggaggatctgaagacacttctagcccaccctgtgaccctgggggagcaacagtggaaaagcgagaaacaacgagaggcagagctcaaaaagaaaaaactagaacaaagatcaaagcttgaaaatttagaagaccttgaaataatcattcaactgaagaaaaggaaaaaatacaggaaaactaaagttccagttgtaaaggaaccagaacctgaaatcatttataaacggacagctcttcatagagcatgcttggaaggacatttggcaattgtggagaagttaatggaagctggagcccagatcgaattccgtgatatgcttgaatccacagccatccactgggcaagccgtggaggaaacctggatgttttaaaattgttgctgaataaaggagcaaaaattagcgcccgagataagttgctcagcacagcgctgcatgtggcggtgaggactggccactatgagtgcgcggagcatcttatcgcctgtgaggcagacctcaacgccaaagacagagaaggagataccccgttgcatgatgcggtgagactgaaccgctataagatgatccgactcctgattatgtatggcgcggatctcaacatcaagaactgtgctgggaagacgccgatggatctggtgctacactggcagaatggaaccaaagcaatattcgacagcctcagagagaactcctacaagacctctcgcatagctacattctgaggcaaacgacagactcttaatcagtaaatgttcactggcattttgaaggcatggcccaagagaagagacactagccataaaatctagtttctatttatcaacgtgttgtgaagatgtacctaatgaagttttgagaaagcacagggttataggtgtttaaatttcctttagtgaaactcttatttatttttatgtattcctgtttatttatttactgccacgctactgatattcagaccttcatgatcatccatctggtgagcagagcttcatttgtatataacactttcagagccttcccacccataggtagttcttaaaccaggtgaaagagcaaagttcaagtgcctacttatgtgtcattcgctcatgtaagagtttttaagagagggctgattatcacagccctcttttctcctgaatttttaatgcagaagtttgaatgaagcaagggaaggcatgtagggacaggaaaggaaacaatggaaggaaagtgattctgtgaaaaggacagtgaagccagctattttacccccaggctggattttttttttttttttttttttttttttttttaccgagtacacagagtacccaagtgaagagaacgtcatgagtgtaagtgcaaatcagtggaaggagcggcaaactgggacatgcagaattgaatttgctcaaaaaagatgaaaggaaatgcaaactgtaaatgtataaatgtatattgtattgtatgtacattttatattcataataaaggcaatcaaactctaaacctctaagtccttctataagtgtggtggaaatgtcctatgtgaaaaaaaaagctatataggagggttttttttttccattgttttccaagttttgcagattagaaatgtcccgtacaacagcactcccagtatttaatatgtatacagatcacctggggatctggttaaaatgcagatttctgattcagctgg

SEQ ID NO: 457448 - DNA, 638 bp, Homo sapiens
acatattcagcagggttagcttgtccctcccctccctcttcagcttcccagacactgattctggaatgaaaattcacctgcctctgagttggctcctaatgggggtgggagtgttacttcggttcccaggttggaagattatctcacccggccccagctatataagctgaccggtgtggaggggcccagcagggccaactccagggattccttccacgacagaaaaacatacaagactccttcagccaacatgatggtactgaaagtagaggaactggtcactggaaagaagaatggcaatggggaggcaggggaattccttcctgaggatttcagagatggagagtatgaagctgctgttactttagagaagcaggaggatctgaagacacttctagcccaccctgtgaccctgggggagcaacagtggaaaagcgagaaacaacgagaggcagagctcaaaaagaaaaaactagaacaaagatcaaagcttgaaaatttagaagaccttgaaataacatgggaagatgctgataataaggaatttaagaaaaaagcgggatacaaaagtataaacacatacagtatgagctcaactgtggcttaattttaaggcaaagtctctgtctctgcatagc

SEQ ID NO: 457449 - DNA, 1428 bp, Homo sapiens
tcccacctccgggagtccattccacaggatactggaagatgtatggagacattttataaatttcaaaatgacttgaggtgctcttgacacatagtgtctagggacaagggattttaccaatacctgggatggtcccacgtgaaaaagatttttgctctaaaatggcaaaagcatccctctgagaaacagtgaaggactggtttgagtataaactgcagatcactcctggtggaaaccataaaacactgttataacatatacctaatccttacctcatgaaacacacacagagaatgtgaatttacagatgtcacccacctgaaagtcaactttccttatctcatttgattaggctgggaagacgccgatggatctggtgctacactggcagaatggaaccaaagcaatattcgacagcctcagagagaactcctacaagacctctcgcatagctacattctgaggcaaacgacagactcttaatcagtaaatgttcactggcattttgaaggcatggcccaagagaagagacactagccataaaatctagtttctatttatcaacgtgttgtgaagatgtacctaatgaagttttgagaaagcacagggttataggtgtttaaatttcctttagtgaaactcttatttatttttatgtattcctgtttatttatttactgccacgctactgatattcagaccttcatgatcatccatctggtgagcagagcttcatttgtatataacactttcagagccttcccacccataggtagttcttaaaccaggtgaaagagcaaagttcaagtgcctacttatgtgtcattcgctcatgtaagagtttttaagagagggctgattatcacagccctcttttctcctgaatttttaatgcagaagtttgaatgaagcaagggaaggcatgtagggacaggaaaggaaacaatggaaggaaagtgattctgtgaaaaggacagtgaagccagctattttacccccaggctggattttttttttttttttttttttttttttttttaccgagtacacagagtacccaagtgaagagaacgtcatgagtgtaagtgcaaatcagtggaaggagcggcaaactgggacatgcagaattgaatttgctcaaaaaagatgaaaggaaatgcaaactgtaaatgtataaatgtatattgtattgtatgtacattttatattcataataaaggcaatcaaactctaaacctctaagtccttctataagtgtggtggaaatgtcctatgtgaaaaaaaaagctatataggagggttttttttttccattgttttccaagttttgcagattagaaatgtcccgtacaacagcactcccagtatttaatatgtatacagatcacctggggatctggttaaaatgcagatttctgattcagctgg

SEQ ID NO: 457450 - DNA, 424 bp, Homo sapiens
cagcagggccaactccagggattccttccacgacagaaaaacatacaagactccttcagccaacatgatggtactgaaagtagaggaactggtatgtaagatgcattaattttataaaatgaaaactggttcatcttggtttttatttgaaaattgaaatgccctttgctttcaggtgtaatgcaagggaactctgaaaatgtcatatatggaaaaaggttgatgtgatgaaacaagtgaaattggaaaaaaaaaatggagctaccagtaatgaattctctgcatatttcctatttaatatcttctcctttggttttattactacagtgtggaatcacgtgtagttatcaaaatgtcttagggaagaagtgttattgaaagaatgtaagcccggaaactttacaataaggcgaaactcatcaaa

SEQ ID NO: 457451 - DNA, 2013 bp, Homo sapiens
acatattcagcagggttagcttgtccctcccctccctcttcagcttcccagacactgattctggaatgaaaattcacctgcctctgagttggctcctaatgggggtgggagtgttacttcggttcccaggttggaagattatctcacccggccccagctatataagctgaccggtgtggaggggcccagcagggccaactccagggattccttccacgacagaaaaacatacaagactccttcagccaacatgatggtactgaaagtagaggaactggtcactggaaagaagaatggcaatggggaggcaggggaattccttcctgaggatttcagagatggagagtatgaagctgctgttactttagagaagcaggaggatctgaagacacttctagcccaccctgtgaccctgggggagcaacagtggaaaagcgagaaacaacgagaggcagagctcaaaaagaaaaaactagaacaaagatcaaagcttgaaaatttagaagaccttgaaataatcattcaactgaagaaaaggaaaaaatacaggaaaactaaagttccagttgtaaaggaaccagaacctgaaatcattacggaacctgtggatgtgcctacgtttctgaaggctgctctggagaataaactgccagtagtagaaaaattcttgtcagacaagaacaatccagatgtttgtgatgagtataaacggacagctcttcatagagcatgcttggaaggacatttggcaattgtggagaagttaatggaagctggagcccagatcgaattccgtgatatgcttgaatccacagccatccactgggcaagccgtggaggaaacctggatgttttaaaattgttgctgaataaaggagcaaaaattagcgcccgagataagttgctcagcacagcgctgcatgtggcggtgaggactggccactatgagtgcgcggagcatcttatcgcctgtgaggcagacctcaacgccaaagacagagaaggagataccccgttgcatgatgcggtgagactgaaccgctataagatgatccgactcctgattatgtatggcgcggatctcaacatcaagaactgtgctgggaagacgccgatggatctggtgctacactggcagaatggaaccaaagcaatattcgacagcctcagagagaactcctacaagacctctcgcatagctacattctgaggcaaacgacagactcttaatcagtaaatgttcactggcattttgaaggcatggcccaagagaagagacactagccataaaatctagtttctatttatcaacgtgttgtgaagatgtacctaatgaagttttgagaaagcacagggttataggtgtttaaatttcctttagtgaaactcttatttatttttatgtattcctgtttatttatttactgccacgctactgatattcagaccttcatgatcatccatctggtgagcagagcttcatttgtatataacactttcagagccttcccacccataggtagttcttaaaccaggtgaaagagcaaagttcaagtgcctacttatgtgtcattcgctcatgtaagagtttttaagagagggctgattatcacagccctcttttctcctgaatttttaatgcagaagtttgaatgaagcaagggaaggcatgtagggacaggaaaggaaacaatggaaggaaagtgattctgtgaaaaggacagtgaagccagctattttacccccaggctggattttttttttttttttttttttttttttttttttaagggggtaggggtccccaggggaaaaaaaggggggggggtggggaatggggggaggggagccggcaccagcggggcctgtgcccacaatgggactcgccgcccaacaacaggactggaagagaacggcccacgctggaagcgtgcttaaaacggtggtcaaggcggcgggggatcggacactctaatcccccaaagaaaaggggacgcaaaacctcaaaaaaaa

SEQ ID NO: 457452 - DNA, 940 bp, Homo sapiens
acatattcagcagggttagcttgtccctcccctccctcttcagcttcccagacactgattctggaatgaaaattcacctgcctctgagttggctcctaatgggggtgggagtgttacttcggttcccaggttggaagattatctcacccggccccagctatataagctgaccggtgtggaggggcccagcagggccaactccagggattccttccacgacagaaaaacatacaagactccttcagccaacatgatggtactgaaagtagaggaactggtcactggaaagaagaatggcaatggggaggcaggggaattccttcctgaggatttcagagatggagagtatgaagctgctgttactttagagaagcaggaggatctgaagacacttctagcccaccctgtgaccctgggggagcaacagtggaaaagcgagaaacaacgagaggcagagctcaaaaagaaaaaactagaacaaagatcaaagcttgaaaatttagaagaccttgaaataatcattcaactgaagaaaaggaaaaaatacaggaaaactaaagttccagttgtaaaggaaccagaacctgaaatcattacggaacctgtggatgtgcctacgtttctgaaggctgctctggagaataaactgccagtagtagaaaaattcttgtcagacaagaacaatccagatgtttgtgatgagtataaacggacagctcttcatagagcatgcttggaaggacatttggattgttcaaattgtttctacttcttgggcatccattgtgctagtgtgtgtcagtatagtagtaagtatgagtgaaatgatatataacactaaagagctgattaagaatacgattattaaggtgtgatcgtgaaagtgtaggagttcttctataatgggtgaagtggcgtcttggaagcctaagttgaaagg

SEQ ID NO: 457453 - DNA, 1490 bp, Homo sapiens
aaaggagaccgcagaagtaaagaagtggggagtttaggaaagtgcctggtttgggtaatcgaaagcacccagtgatgtatttgatgacttttaagctttcatatgccgttatttaatacctgtcacttccaaatgagagatgtaagggcaacggccgttagcgttctgttttggatcaggctctggagtggacgcccctagcttaggggtccttctaggcagccagaaacctgcggaaaatggtagcgatggcggctgggccgagtgggtgtctggtgccggcgtttgggctacggttgttgttggcgactgtgcttcaagcggtgtctgcttttggggcagagttttcatcggaggcatgcagagagttaggcttttctagcaacttgctttgcagctcttgtgatcttctcggacagttcaacctgcttcagctggatcctgattgcagaggatgctgtcaggaggaagcacaatttgaaaccaaaaagctgtatgcaggagctattcttgaagtttgtggatgaaaattgggaaggttccctcaagtccaagcttttgttaggagtgataaacccaaactgttcagaggactgcaaatcaagtatgtccgtggttcagaccctgtattaaagcttttggacgacaatgggaacattgctgaagaactgagcattctcaaatggaacacagacagtgtagaagaattcctgagtgaaaagttggaacgcatataaatcttgcttaaattttgtcctatccttttgttaccttatcaaatgaaatattacagcacctagaaaataatttagttttgcttgcttccattgatcagtcttttacttgaggcattaaatatctaattaaatcgtgaaatggcagtatagtccatgatatctaaggagttggcaagcttaacaaaacccattttttataaatgtccatcctcctgcatttgttgataccactaacaaaatgctttgtaacagacttgcggttaattatgcaaatgatagtttgtgataattggtccagttttacgaacaacagatttttaaattagagaggttaacaagacagatgattactatgcctcatgtgctgtgtgctctttgaaaggaatgacagcagactacaaagcaaataagatatactgagcctcaacagattgcctgctcctcagagtctctcctatttttgtattacccagctttctttttaatacaaatgttatttatagtttacaatgaatgcactgcataaaaactttgtagcttcattattgtaaaacatattcaagatcctacagtaagagtgaaacattcacaaagatttgcgttaatgaagactacacagaaaacctttctaaggatttgtgtggatcagatacatacttggcaaatttttgagttttacattcttacagaaaagtccatttaaaagtgatcatttgtaagaccaaaatataaataaaaagtttcaaaaatcta

SEQ ID NO: 457454 - DNA, 532 bp, Homo sapiens
aaaggagaccgcagaagtaaagaagtggggagtttaggaaagtgcctggtttgggtaatcgaaagcacccagtgatgtatttgatgacttttaagctttcatatgccgttatttaatacctgtcacttccaaatgagagatgtaagggcaacggccgttagcgttctgttttggatcaggctctggagtggacgcccctagcttaggggtccttctaggcagccagaaacctgcggaaaatggtagcgatggcggctgggccgagtgggtgtctggtgccggcgtttgggctacggttgttgttggcgactgtgcttcaagcggtgtctgcttttggggcagagttttcatcggaggcatgcagagagttaggcttttctagcaacttgctttgcagctcttgtgatcttctcggacagttcaacctgcttcagctggatcctgattgcagaggatgctgtcaggaggaagcacaatttgaaaccaaaaagtattcatccattgtttctaagcaagaatgccatcactcaaa

SEQ ID NO: 457455 - DNA, 1047 bp, Homo sapiens
  misc_feature (28)..(28): n is a, c, g, or t
agagttagtgtgtaagcaaagaatggtnataagcacccaaaaatttcactgtatgcaggagctattcttgaagtttgtggatgaaaattgggaaggttccctcaagtccaagcttttgttaggagtgataaacccaaactgttcagaggactgcaaatcaagtatgtccgtggttcagaccctgtattaaagcttttggacgacaatgggaacattgctgaagaactgagcattctcaaatggaacacagacagtgtagaagaattcctgagtgaaaagttggaacgcatataaatcttgcttaaattttgtcctatccttttgttaccttatcaaatgaaatattacagcacctagaaaataatttagttttgcttgcttccattgatcagtcttttacttgaggcattaaatatctaattaaatcgtgaaatggcagtatagtccatgatatctaaggagttggcaagcttaacaaaacccattttttataaatgtccatcctcctgcatttgttgataccactaacaaaatgctttgtaacagacttgcggttaattatgcaaatgatagtttgtgataattggtccagttttacgaacaacagatttttaaattagagaggttaacaagacagatgattactatgcctcatgtgctgtgtgctctttgaaaggaatgacagcagactacaaagcaaataagatatactgagcctcaacagattgcctgctcctcagagtctctcctatttttgtattacccagctttctttttaatacaaatgttatttatagtttacaatgaatgcactgcataaaaactttgtagcttcattattgtaaaacatattcaagatcctacagtaagagtgaaacattcacaaagatttgcgttaatgaagactacacagaaaacctttctaaggatttgtgtggatcagatacatacttggcaaatttttgagttttacattcttacagaaaagtccatttaaaagtgatcatttgtaagaccaaaatataaataaaaagtttcaaaaatcta

SEQ ID NO: 457456 - DNA, 1440 bp, Homo sapiens
aaaggagaccgcagaagtaaagaagtggggagtttaggaaagtgcctggtttgggtaatcgaaagcacccagtgatgtatttgatgacttttaagctttcatatgccgttatttaatacctgtcacttccaaatgagagatgtaagggcaacggccgttagcgttctgttttggatcaggctctggagtggacgcccctagcttaggggtccttctaggcagccagaaacctgcggaaaatggtagcgatggcggctgggccgagtgggtgtctggtgccggcgtttgggctacggttgttgttggcgactgtgcttcaagcggtgtctgcttttggggcagagttttcatcggaggcatgcagagagttaggcttttctagcaacttgctttgcagctcttgtgatcttctcggacagttcaacctgcttcagctggatcctgattgcagaggatgctgtcaggaggaagcacaatttgaaaccaaaaagctgtatgcaggagctattcttgaagtttgtggatgaaaattgggaaggttccctcaagtccaagtatgtccgtggttcagaccctgtattaaagcttttggacgacaatgggaacattgctgaagaactgagcattctcaaatggaacacagacagtgtagaagaattcctgagtgaaaagttggaacgcatataaatcttgcttaaattttgtcctatccttttgttaccttatcaaatgaaatattacagcacctagaaaataatttagttttgcttgcttccattgatcagtcttttacttgaggcattaaatatctaattaaatcgtgaaatggcagtatagtccatgatatctaaggagttggcaagcttaacaaaacccattttttataaatgtccatcctcctgcatttgttgataccactaacaaaatgctttgtaacagacttgcggttaattatgcaaatgatagtttgtgataattggtccagttttacgaacaacagatttttaaattagagaggttaacaagacagatgattactatgcctcatgtgctgtgtgctctttgaaaggaatgacagcagactacaaagcaaataagatatactgagcctcaacagattgcctgctcctcagagtctctcctatttttgtattacccagctttctttttaatacaaatgttatttatagtttacaatgaatgcactgcataaaaactttgtagcttcattattgtaaaacatattcaagatcctacagtaagagtgaaacattcacaaagatttgcgttaatgaagactacacagaaaacctttctaaggatttgtgtggatcagatacatacttggcaaatttttgagttttacattcttacagaaaagtccatttaaaagtgatcatttgtaagaccaaaatataaataaaaagtttcaaaaatcta

SEQ ID NO: 457457 - DNA, 1115 bp, Homo sapiens
  misc_feature (28)..(28): n is a, c, g, or t
agagttagtgtgtaagcaaagaatggtnataagcacccaaaaatttcactgtatgcaggagctattcttgaagtttgtggatgaaaattgggaaggttccctcaagtccaagagtctcactgtcgcccacactggagtgcagtggcgcaacttcagctcaccgcaacctctgcctcccagcttttgttaggagtgataaacccaaactgttcagaggactgcaaatcaagtatgtccgtggttcagaccctgtattaaagcttttggacgacaatgggaacattgctgaagaactgagcattctcaaatggaacacagacagtgtagaagaattcctgagtgaaaagttggaacgcatataaatcttgcttaaattttgtcctatccttttgttaccttatcaaatgaaatattacagcacctagaaaataatttagttttgcttgcttccattgatcagtcttttacttgaggcattaaatatctaattaaatcgtgaaatggcagtatagtccatgatatctaaggagttggcaagcttaacaaaacccattttttataaatgtccatcctcctgcatttgttgataccactaacaaaatgctttgtaacagacttgcggttaattatgcaaatgatagtttgtgataattggtccagttttacgaacaacagatttttaaattagagaggttaacaagacagatgattactatgcctcatgtgctgtgtgctctttgaaaggaatgacagcagactacaaagcaaataagatatactgagcctcaacagattgcctgctcctcagagtctctcctatttttgtattacccagctttctttttaatacaaatgttatttatagtttacaatgaatgcactgcataaaaactttgtagcttcattattgtaaaacatattcaagatcctacagtaagagtgaaacattcacaaagatttgcgttaatgaagactacacagaaaacctttctaaggatttgtgtggatcagatacatacttggcaaatttttgagttttacattcttacagaaaagtccatttaaaagtgatcatttgtaagaccaaaatataaataaaaagtttcaaaaatcta

SEQ ID NO: 457458 - DNA, 988 bp, Homo sapiens
atttatataatttatgattatgatgattaggttgtattatattcttaattcactgtttgttaggcagtgttatcccaaactgttcagaggactgcaaatcaagtatgtccgtggttcagaccctgtattaaagcttttggacgacaatgggaacattgctgaagaactgagcattctcaaatggaacacagacagtgtagaagaattcctgagtgaaaagttggaacgcatataaatcttgcttaaattttgtcctatccttttgttaccttatcaaatgaaatattacagcacctagaaaataatttagttttgcttgcttccattgatcagtcttttacttgaggcattaaatatctaattaaatcgtgaaatggcagtatagtccatgatatctaaggagttggcaagcttaacaaaacccattttttataaatgtccatcctcctgcatttgttgataccactaacaaaatgctttgtaacagacttgcggttaattatgcaaatgatagtttgtgataattggtccagttttacgaacaacagatttttaaattagagaggttaacaagacagatgattactatgcctcatgtgctgtgtgctctttgaaaggaatgacagcagactacaaagcaaataagatatactgagcctcaacagattgcctgctcctcagagtctctcctatttttgtattacccagctttctttttaatacaaatgttatttatagtttacaatgaatgcactgcataaaaactttgtagcttcattattgtaaaacatattcaagatcctacagtaagagtgaaacattcacaaagatttgcgttaatgaagactacacagaaaacctttctaaggatttgtgtggatcagatacatacttggcaaatttttgagttttacattcttacagaaaagtccatttaaaagtgatcatttgtaagaccaaaatataaataaaaagtttcaaaaatcta

SEQ ID NO: 457459 - DNA, 1764 bp, Homo sapiens
aaaggagaccgcagaagtaaagaagtggggagtttaggaaagtgcctggtttgggtaatcgaaagcacccagtgatgtatttgatgacttttaagctttcatatgccgttatttaatacctgtcacttccaaatgagagatgtaagggcaacggccgttagcgttctgttttggatcaggctctggagtggacgcccctagcttaggggtccttctaggcagccagaaacctgcggaaaatggtagcgatggcggctgggccgagtgggtgtctggtgccggcgtttgggctacggttgttgttggcgactgtgcttcaagcggtgtctgcttttggggcagagttttcatcggaggcatgcagagagttaggcttttctagcaacttgctttgcagctcttgtgatcttctcggacagttcaacctgcttcagctggatcctgattgcagaggatgctgtcaggaggaagcacaatttgaaaccaaaaagctgtatgcaggagctattcttgaagtttgtggatgaaaattgggaaggttccctcaagtccaagcttttgttaggagtgataaacccaaactgttcagaggactgcaaatcaagtatgtccgtggttcagaccctgtattaaagcttttggacgacaatgggaacattgctgaagaactgagcattctcaaatggaacacagacagtgtagaagaattcctgagtgaaaagttggaacgcatataaatcttgcttaaattttgtcctatccttttgttaccttatcaaatgaaatattacagcacctagaaaataatttagttttgcttgcttccattgatcagtcttttacttgaggcattaaatatctaattaaatcgtgaaatggcagtatagtccatgatatctaaggagttggcaagcttaacaaaacccattttttataaatgtccatcctcctgcatttgttgataccactaacaaaatgctttgtaacagacttgcggttaattatgcaaatgatagtttgtgataattggtccagttttacgaacaacagatttttaaattagagaggttaacaagacagatgattactatgcctcatgtgctgtgtgctctttgaaaggaatgacagcagactacaaagcaaataagatatactgagcctcaacagattgcctgctcctcagagtctctcctatttttgtattacccagctttctttttaatacaaatgttatttatagtttacaatgaatgcactgcataaaaactttgtagcttcattattgtaaaacatattcaagatcctacagtaagagtgaaacattcacaaagatttgcgttaatgaagactacacagaaaacctttctaaggatttgtgtggatcagatacatacttggcaaatttttgagttttacattcttacagaaaagtccatttaaaagtgatcatttgtaagaccaaaatataaataaaaagtttcaaaaatctatctgaatttggaattcttctggtttgttctttcatgtttaaaaatgatgtttttcaatgcatttttttcatgtaagccctttttttagccaaaatataaaaatggctgtaatatttaaaacttataacatcttattgttggtaatagtgctttatatttgtctgattttatttttcaaagttttttcatttatgaacacattttcattggtatattatttaaggaatatctcttgatatagaatttttatattaaaaatgatttttctttgctt

SEQ ID NO: 457460 - DNA, 1529 bp, Homo sapiens
aaaggagaccgcagaagtaaagaagtggggagtttaggaaagtgcctggtttgggtaatcgaaagcacccagtgatgtatttgatgacttttaagctttcatatgccgttatttaatacctgtcacttccaaatgagagatgtaagggcaacggccgttagcgttctgttttggatcaggctctggagtggacgcccctagcttaggggtccttctaggcagccagaaacctgcggaaaatggtagcgatggcggctgggccgagtgggtgtctggtgccggcgtttgggctacggttgttgttggcgactgtgcttcaagcggtgtctgcttttggggcagagttttcatcggaggcatgcagagagttaggcttttctagcaacttgctttgcagctcttgtgatcttctcggacagttcaacctgcttcagctggatcctgattgcagaggatgctgtcaggaggaagcacaatttgaaaccaaaaagctgtatgcaggagctattcttgaagtttgtggatgaaaattgggaaggttccctcaagtccaagcttttgttaggagtgataaacccaaactgttcagaggactgcaaatcaagtatgtccgtggttcagaccctgtattaaagcttttggacgacaatgggaacattgctgaagaactgagcattctcaaatggaacacagacagtgtagaagaattcctgagtgaaaagttggaacgcatataaatcttgcttaaattttgtcctatccttttgttaccttatcaaatgaaatattacagcacctagaaaataatttagttttgcttgcttccattgatcagtcttttacttgaggcattaaatatctaattaaatcgtgaaatggcagtatagtccatgatatctaaggagttggcaagcttaacaaaacccattttttataaatgtccatcctcctgcatttgttgataccactaacaaaatgctttgtaacagacttgcggttaattatgcaaatgatagtttgtgataattggtccagttttacgaacaacagatttttaaattagagaggttaacaagacagatgattactatgcctcatgtgctgtgtgctctttgaaaggaatgacagcagactacaaagcaaataagatatactgagcctcaacagattgcctgctcctcagagtctctcctatttttgtattacccagctttctttttaatacaaatgttatttatagtttacaatgaatgcactgcataaaaactttgtagcttcattattgtaaaacatattcaagatcctacagtaagagtgaaacattcacaaagatttgcgttaatgaagactacacagaaaacctttctaaggatttgtgtggatcagatacatacttggcaaatttttgagttttacattcttacagaaaagtccatttaaaagtgatcatttgtaagaccaaaatataaataaaaagtttcaaaaatctaaaaaacaccacaccacccccccaccccccacccccccca

SEQ ID NO: 457461 - DNA, 505 bp, Homo sapiens
cttcatcatactcctacctgagccatcttgcggtgattcataaaccactgagttggccctacatctgtagcccattagagacagcttggaagacagctacttcaggggagtaagttccaagttgctcttgcctcatccctcttcccatatctccctgctactggtcatagcaggaagggacccatgtggaaaagtcccagtcagcatctgtggagtccatccctgaagtgttagaggagtgcacgtcccctgccgaccactctgactctgcctctgtccatgacatggattacgtcaatccccggggcgtgcgctttacacagtcctcccagaaagaagctactcagcatagagcgactaaacctttatgctgcttccctgcgagtatgcttcctactgtttgagagcatgcgagagcacctcaagttccaaatggaggtgagtttcttgatgtggaaagaaaagggggaaaaaaaatagggagatatatggcatcttcagtggg

SEQ ID NO: 457462 - DNA, 5559 bp, Homo sapiens
accatgatccgattcgagctcggaccctcgggcattctggacttggggaccaacatgaagaagctgaaaatgagagccggaggcatgagtgattcatccaaatggaagaaacagaagagatcccctcggcccccacgccatatgaccaaagtcacaccaggttcagagctgcccactcccaatggaaccaccttatcatctaacctcactggtggcatgcccttcattgatgtgcccactcccatctcctctgcaagttcagaagctgcctcagcagtggtcagtccctctacagacagtggcctggaattctcctcccaaaccacttccaaggaagaccttactgatctagagcaacctggctctccagggtacagcacagctacagagcctggaagcagtgagctaggtgttcccgagcagcctgacctccaggaagggacccatgtggaaaagtcccagtcagcatctgtggagtccatccctgaagtgttagaggagtgcacgtcccctgccgaccactctgactctgcctctgtccatgacatggattacgtcaatccccggggcgtgcgctttacacagtcctcccagaaagaaggcacagctttggtcccctatggtcttccctgcatccgcgagctcttccgcttcctcatctccctcaccaatccacacgaccgccataactcagaggttatgattcacatgggactgcatttgctgacagtggcccttgagtcagcccctgtagcccagtgccagaccctcttgggcctcatcaaggatgagatgtgccgtcacttattccagctactcagcatagagcgactaaacctttatgctgcttccctgcgagtatgcttcctactgtttgagagcatgcgagagcacctcaagttccaaatggagatgtacatcaaaaagcttatggagatcatcactgtggagaaccccaagatgccttatgagatgaaggagatggcactggaggccattgtgcagctctggcgcatccccagctttgtcacagagctctacatcaactatgattgtgactactactgttccaacctctttgaggaactcacaaagctgctgtccaagaatgccttccctgtgtctggtcaactctatacaacacacctactatctcttgatgccctattgacagtgattgacagcaccgaggcccactgccaggctaaagtcctcaacagcctcacccagcaagagaagaaggagacagccagaccaagctgtgagatagtagatggcacccgagaagctagcaatactgagagaactgccagcgatgggaaagctgtaggcatggcctcagacatcccaggcctgcatctgccaggtggagggcggctgccaccagaacatgggaaatcaggatgcagtgatctggaggaagctgttgactctggggctgacaaaaagtttgcccggaagccaccccgattttcctgtctcctgccagatccacgggaactaattgaaattaaaaacaaaaagaagctgctaatcactggcacagagcagttcaatcagaaaccaaagaaggggattcagtttctgcaagagaaaggcctcctcaccatcccaatggacaacacagaggttgctcagtggctccgagagaaccctcggctggacaagaagatgattggagagtttgtgagtgaccgcaaaaacattgacctgttggagagctttgtgagcaccttcagttttcagggtctgcgactggacgaagccctccgcctctacctggaagccttccgtttgcctggggaagcaccagtcatccagaggttgctggaggcattcacagagcgttggatgaattgtaatggctccccatttgccaatagcgatgcctgcttttccctggcctatgctgtcatcatgcttaatactgaccagcacaaccacaatgttcgtaaacagaatgcacccatgaccctggaggagtttcgcaaaaatctgaaaggtgtgaatggaggcaaggactttgagcaagacatcctggaggacatgtaccatgccatcaagaatgaggaaattgtaatgcctgaggagcagacaggcttggttcgggagaactatgtgtggaatgtgctgcttcatcgaggtgccacccctgagggcatattcctgcgtgtgcctactgccagctatgatcttgacctcttcaccatgacctggggccccactattgctgctctctcttatgtctttgacaaaagccttgaggagacaatcatccagaaagccatctcaggcttcaggaagtgcgccatgatctccgcccactatggcctcagcgatgtgtttgacaatctcatcatctctctatgcaaattcacagctctcagcagtgagtctattgagaacctgcccagtgtatttggaagcaaccctaaagcccatattgcagccaagacagtattccatttggcccatcgtcatggtgacatcctgcgggagggctggaagaatatcatggaggccatgctgcagctcttccgagcccaactactgcccaaggctatgatagaggtagaagatttcgtggatcccaatggcaagatctctctacagcgggaagagacaccatcaaaccgaggagagtcaacagtgctgagctttgtgagctggctaacactgagtggtcctgagcagtctagtgttcggggcccatccactgaaaaccaagaggccaagagagtggccttagagtgtataaagcaatgtgacccagaaaaaatgatcacagaaagcaagttcctccagctggagtcactacaggagctcatgaaggctctggtctcagtgacaccagatgaagagacatatgatgaggaagatgctgctttctgcctagagatgctgctaaggattgtgttggagaacagggatcgtgtgggctgtgtgtggcagactgttcgagaccatctataccacctctgtgttcaggcacaagatttctgcttccttgtggagcgggcagtggtggggttgctacgcctggccattcggcttctccggagagaagagatcagtgctcaggtgctgctctccctgcgcattttgctactgatgaagcccagtgtgctatcccgagtcagccaccaggttgcgtatgggctccatgaactcctgaagaccaatgcagccaacatccactcaggtgatgactgggccacactcttcacactgctggagtgcatcggctcaggtgtgaagcctccagctgctctgcaggccacagccagggcagatgcacctgatgccggggcccagtcagatagtgagctcccatcctaccatcagaatgacgtgagcctggatcgagggtacacttccgactcagaggtctacactgaccatggcaggccgggcaagatacaccgatcagccacagatgccgatgtggtcaacagtggttggttagtggttgggaaggatgacgttgataactccaagccagggcccagccgcccaggcccttcacccctgatcaatcaatacagcctaacagtgggactggatttggggccacacgacactaagtctctgcttaagtgtgtggaatcgctgtccttcatcgtgcgtgatgctgcccacatcacacctgacaactttgagctctgcgtcaagactctccggatctttgtggaggccagtctgaatggcggatgcaagtcccaggagaaacgtggcaagagtcacaaatatgacagcaaagggaaccgcttcaagaagaaatccaaagagggatcaatgcttcgccggcctcgaacctccagccaacatgcctctcggggcgggcagagtgatgatgatgaggacgaaggcgtgcctgccagctaccatacggtgtctttacagtatcaggttgctagacctgatgcacaccctgcacacgcgggcagcctctatctacagctcatgggcggaggagcaacgccacctggagacaggtggccagaagattgaagctgattctcgcaccctctgggcccactgctggtgccctttactgcagggtattgcctgcctgtgctgcgatgcccggcgccaggtacggatgcaggcactgacctatctgcagcgagcactacttgtacatgatctgcaaaagctagatgccctggaatgggagtcctgttttaacaaggtgctgtttcctctacttaccaagctcttggagaacatcagccctgcagatgtgggtgggatggaggagacccggatgagggcttccacattgctctctaaggtcttcctgcagcacctgtctccactgctgtcactctctacctttgcggccctctggctcaccatcttggacttcatggacaagtacatgcacgcaggctccagcgacttactgtcagaggcgatccctgagtctctgaagaacatgcttctggtgatggacacagcggagattttccacagtgcagatgcacggggaggcggcccctcggccctctgggagatcacctgggaacgcattgactgttttctccctcacctacgagatgaactcttcaagcagaccgtcatccaggaccccatgcccatggagcctcaaggccaaaagcctctcgcctcagcccacctgacttccgctgctggcgacactaggacacctggccatccaccgcccccagagattccatctgagctgggggcctgtgactttgagaagcccgagagcccccgagccgccagcagcagctccccaggatcaccagtggcctcaagccccagcaggctgagccccacccccgacgggcctccacccttggctcagcccccactgatcctgcagcccttggcctccccactgcaggtgggcgtgccacctatgactctgcccatcatcctcaaccctgcgctcatcgaggccacctcaccagtgcccctcctggccacaccccgccccacagatcccatacccacctctgaggtcaactaaggcaggtcactcagagatcaggaccagtgcttcccaccaggctttccttgaccccacttctggctgtcctgcgggccacaagctcttcaggccaagtcagagctgctgttgctgccacttggatggggacctgaaaaagagaatgttgatagccccagctaagacccccaatcagctgtgggacctttttcctcctctgcgctccattcctgggggttcagcctgagagtgaactcagctgtcatctgcagcctctgcctccagcccggcagctctggggaggcatccgtgtgccggccctgcagtgcctgcccacggtcaggcattgaaaactaagcccaaccactctgcactttgtttcccactcccattagccctgggccacctcctccagttcttcctcttttactaattagttggtcagtttggagagttgactggcaccatggagggtaggcaggtgggggctgggtgggggactgcccacaggagcatgtacatatggaaaaacagaacaacagtggactttttatgatataataaatgtcttagtaccagca

SEQ ID NO: 457463 - DNA, 6360 bp, Homo sapiens
tagttaccacgtcagtgagctgacagggaaggtacccggctctactgcccgtcccggacgactcatcctggcggactgtgcagtcccaccctgacttcagcctcaatttccaggaaacaggctccttctcttctcccatctgctaccagagccgggagagctgctcggagacgcctccggggtgcgggctggacatgagcagcggctgccggtcctgggactaggccccgccattttggatccgctgacaggtttgccaagatggtggataagaatatttacatcattcaaggggagattaacattgtggttggggccatcaaacgaaatgcccgatggagcacccatacaccactggatgaagaacgggatcctctgctgcatagtttcggtcatctaaaggaggttttaaacagtataacagaactctcagaaattgagcccaatgtattccttcgaccttttctggaagtgattcgctctgaagataccactggccctatcactggactggcactcacctctgtcaacaagttcctgtcctatgcactcatagatcccacccatgagggcacagcagagggcatggagaacatggcagatgctgtcacccatgctcgttttgtgggcacggatcctgccagtgatgaagttgtcctgatgaaaatccttcaggttctacggactctgctgctaaccccagtgggtgcccacctaaccaatgaatctgtgtgtgagattatgcagtcttgcttccggatctgctttgaaatgaggctcagtgagttattgagaaaatccgcagagcacactctcgtagacatggtgcagctgctcttcacaaggttacctcagtttaaagaagaacccaagaactatgtggggaccaacatgaagaagctgaaaatgagagccggaggcatgagtgattcatccaaatggaagaaacagaagagatcccctcggcccccacgccatatgaccaaagtcacaccaggttcagagctgcccactcccaatggaaccaccttatcatctaacctcactggtggcatgcccttcattgatgtgcccactcccatctcctctgcaagttcagaagctgcctcagcagtggtcagtccctctacagacagtggcctggaattctcctcccaaaccacttccaaggaagaccttactgatctagagcaacctggctctccagggtacagcacagctacagagcctggaagcagtgagctaggtgttcccgagcagcctgacctccaggaagggacccatgtggaaaagtcccagtcagcatctgtggagtccatccctgaagtgttagaggagtgcacgtcccctgccgaccactctgactctgcctctgtccatgacatggattacgtcaatccccggggcgtgcgctttacacagtcctcccagaaagaaggcacagctttggtcccctatggtcttccctgcatccgcgagctcttccgcttcctcatctccctcaccaatccacacgaccgccataactcagaggttatgattcacatgggactgcatttgctgacagtggcccttgagtcagcccctgtagcccagtgccagaccctcttgggcctcatcaaggatgagatgtgccgtcacttattccagctactcagcatagagcgactaaacctttatgctgcttccctgcgagtatgcttcctactgtttgagagcatgcgagagcacctcaagttccaaatggagatgtacatcaaaaagcttatggagatcatcactgtggagaaccccaagatgccttatgagatgaaggagatggcactggaggccattgtgcagctctggcgcatccccagctttgtcacagagctctacatcaactatgattgtgactactactgttccaacctctttgaggaactcacaaagctgctgtccaagaatgccttccctgtgtctggtcaactctatacaacacacctactatctcttgatgccctattgacagtgattgacagcaccgaggcccactgccaggctaaagtcctcaacagcctcacccagcaagagaagaaggagacagccagaccaagctctgagagaactgccagcgatgggaaagctgtaggcatggcctcagacatcccaggcctgcatctgccaggtggagggcggctgccaccagaacatgggaaatcaggatgcagtgatctggaggaagctgttgactctggggctgacaaaaagtttgcccggaagccaccccgattttcctgtctcctgccagatccacgggaactaattgaaattaaaaacaaaaagaagctgctaatcactggcacagagcagttcaatcagaaaccaaagaaggggattcagtttctgcaagagaaaggcctcctcaccatcccaatggacaacacagaggttgctcagtggctccgagagaaccctcggctggacaagaagatgattggagagtttgtgagtgaccgcaaaaacattgacctgttggagagctttgtgagcaccttcagttttcagggtctgcgactggacgaagccctccgcctctacctggaagccttccgtttgcctggggaagcaccagtcatccagaggttgctggaggcattcacagagcgttggatgaattgtaatggctccccatttgccaatagcgatgcctgcttttccctggcctatgctgtcatcatgcttaatactgaccagcacaaccacaatgttcgtaaacagaatgcacccatgaccctggaggagtttcgcaaaaatctgaaaggtgtgaatggaggcaaggactttgagcaagacatcctggaggacatgtaccatgccatcaagaatgaggaaattgtaatgcctgaggagcagacaggcttggttcgggagaactatgtgtggaatgtgctgcttcatcgaggtgccacccctgagggcatattcctgcgtgtgcctactgccagctatgatcttgacctcttcaccatgacctggggccccactattgctgctctctcttatgtctttgacaaaagccttgaggagacaatcatccagaaagccatctcaggcttcaggaagtgcgccatgatctccgcccactatggcctcagcgatgtgtttgacaatctcatcatctctctatgcaaattcacagctctcagcagtgagtctattgagaacctgcccagtgtatttggaagcaaccctaaagcccatattgcagccaagacagtattccatttggcccatcgtcatggtgacatcctgcgggagggctggaagaatatcatggaggccatgctgcagctcttccgagcccaactactgcccaaggctatgatagaggtagaagatttcgtggatcccaatggcaagatctctctacagcgggaagagacaccatcaaaccgaggagagtcaacagtgctgagctttgtgagctggctaacactgagtggtcctgagcagtctagtgttcggggcccatccactgaaaaccaagaggccaagagagtggccttagagtgtataaagcaatgtgacccagaaaaaatgatcacagaaagcaagttcctccagctggagtcactacaggagctcatgaaggctctggtctcagtgacaccagatgaagagacatatgatgaggaagatgctgctttctgcctagagatgctgctaaggattgtgttggagaacagggatcgtgtgggctgtgtgtggcagactgttcgagaccatctataccacctctgtgttcaggcacaagatttctgcttccttgtggagcgggcagtggtggggttgctacgcctggccattcggcttctccggagagaagagatcagtgctcaggtgctgctctccctgcgcattttgctactgatgaagcccagtgtgctatcccgagtcagccaccaggttgcgtatgggctccatgaactcctgaagaccaatgcagccaacatccactcaggtgatgactgggccacactcttcacactgctggagtgcatcggctcaggtgtgaagcctccagctgctctgcaggccacagccagggcagatgcacctgatgccggggcccagtcagatagtgagctcccatcctaccatcagaatgacgtgagcctggatcgagggtacacttccgactcagaggtctacactgaccatggcaggccgggcaagatacaccgatcagccacagatgccgatgtggtcaacagtggttggttagtggttgggaaggatgacgttgataactccaagccagggcccagccgcccaggcccttcacccctgatcaatcaatacagcctaacagtgggactggatttggggccacacgacactaagtctctgcttaagtgtgtggaatcgctgtccttcatcgtgcgtgatgctgcccacatcacacctgacaactttgagctctgcgtcaagactctccggatctttgtggaggccagtctgaatggcggatgcaagtcccaggagaaacgtggcaagagtcacaaatatgacagcaaagggaaccgcttcaagaagaaatccaaagagggatcaatgcttcgccggcctcgaacctccagccaacatgcctctcggggcgggcagagtgatgatgatgaggacgaaggcgtgcctgccagctaccatacggtgtctttacagtatcaggttgctagacctgatgcacaccctgcacacgcgggcagcctctatctacagctcatgggcggaggagcaacgccacctggagacaggtggccagaagattgaagctgattctcgcaccctctgggcccactgctggtgccctttactgcagggtattgcctgcctgtgctgcgatgcccggcgccaggtacggatgcaggcactgacctatctgcagcgagcactacttgtacatgatctgcaaaagctagatgccctggaatgggagtcctgttttaacaaggtgctgtttcctctacttaccaagctcttggagaacatcagccctgcagatgtgggtgggatggaggagacccggatgagggcttccacattgctctctaaggtcttcctgcagcacctgtctccactgctgtcactctctacctttgcggccctctggctcaccatcttggacttcatggacaagtacatgcacgcaggctccagcgacttactgtcagaggcgatccctgagtctctgaagaacatgcttctggtgatggacacagcggagattttccacagtgcagatgcacggggaggcggcccctcggccctctgggagatcacctgggaacgcattgactgttttctccctcacctacgagatgaactcttcaagcagaccgtcatccaggaccccatgcccatggagcctcaaggccaaaagcctctcgcctcagcccacctgacttccgctgctggcgacactaggacacctggccatccaccgcccccagagattccatctgagctgggggcctgtgactttgagaagcccgagagcccccgagccgccagcagcagctccccaggatcaccagtggcctcaagccccagcaggctgagccccacccccgacgggcctccacccttggctcagcccccactgatcctgcagcccttggcctccccactgcaggtgggcgtgccacctatgactctgcccatcatcctcaaccctgcgctcatcgaggccacctcaccagtgcccctcctggccacaccccgccccacagatcccatacccacctctgaggtcaactaaggcaggtcactcagagatcaggaccagtgcttcccaccaggctttccttgaccccacttctggctgtcctgcgggccacaagctcttcaggccaagtcagagctgctgttgctgccacttggatggggacctgaaaaagagaatgttgatagccccagctaagacccccaatcagctgtgggacctttttcctcctctgcgctccattcctgggggttcagcctgagagtgaactcagctgtcatctgcagcctctgcctccagcccggcagctctggggaggcatccgtgtgccggccctgcagtgcctgcccacggtcaggcattgaaaactaagcccaaccactctgcactttgtttcccactcccattagccctgggccacctcctccagttcttcctcttttactaattagttggtcagtttggagagttgactggcaccatggagggtaggcaggtgggggctgggtgggggactgcccacaggagcatgtacatatggaaaaacagaacaacagtggactttttatgatataataaatgtcttagtaccagca

SEQ ID NO: 457464 - DNA, 3475 bp, Homo sapiens
ctgttcgctgaggatgacgtgcgctttgagagcaacttcagcatcgtctgggcgcctgagtggtaacctggatatgtttcgaaaagactcagttctcaacatactcattcagagcctagactgggagacctttgagcagtattgtgcctggcagctctctctggcccacaatattcccctggagacaatcatccagaaagccatctcaggcttcaggaagtgcgccatgatctccgcccactatggcctcagcgatgtgtttgacaatctcatcatctctctatgcaaattcacagctctcagcagtgagtctattgagaacctgcccagtgtatttggaagcaaccctaaagcccatattgcagccaagacagtattccatttggcccatcgtcatggtgacatcctgcgggagggctggaagaatatcatggaggccatgctgcagctcttccgagcccaactactgcccaaggctatgatagaggtagaagatttcgtggatcccaatggcaagatctctctacagcgggaagagacaccatcaaaccgaggagagtcaacagtgctgagctttgtgagctggctaacactgagtggtcctgagcagtctagtgttcggggcccatccactgaaaaccaagaggccaagagagtggccttagagtgtataaagcaatgtgacccagaaaaaatgatcacagaaagcaagttcctccagctggagtcactacaggagctcatgaaggctctggtctcagtgacaccagatgaagagacatatgatgaggaagatgctgctttctgcctagagatgctgctaaggattgtgttggagaacagggatcgtgtgggctgtgtgtggcagactgttcgagaccatctataccacctctgtgttcaggcacaagatttctgcttccttgtggagcgggcagtggtggggttgctacgcctggccattcggcttctccggagagaagagatcagtgctcaggtgctgctctccctgcgcattttgctactgatgaagcccagtgtgctatcccgagtcagccaccaggttgcgtatgggctccatgaactcctgaagaccaatgcagccaacatccactcaggtgatgactgggccacactcttcacactgctggagtgcatcggctcaggtgtgaagcctccagctgctctgcaggccacagccagggcagatgcacctgatgccggggcccagtcagatagtgagctcccatcctaccatcagaatgacgtgagcctggatcgagggtacacttccgactcagaggtctacactgaccatggcaggccgggcaagatacaccgatcagccacagatgccgatgtggtcaacagtggttggttagtggttgggaaggatgacgttgataactccaagccagggcccagccgcccaggcccttcacccctgatcaatcaatacagcctaacagtgggactggatttggggccacacgacactaagtctctgcttaagtgtgtggaatcgctgtccttcatcgtgcgtgatgctgcccacatcacacctgacaactttgagctctgcgtcaagactctccggatctttgtggaggccagtctgaatggcggatgcaagtcccaggagaaacgtggcaagagtcacaaatatgacagcaaagggaaccgcttcaagaagaaatccaaagagggatcaatgcttcgccggcctcgaacctccagccaacatgcctctcggggcgggcagagtgatgatgatgaggacgaaggcgtgcctgccagctaccatacggtgtctttacagtatcaggttgctagacctgatgcacaccctgcacacgcgggcagcctctatctacagctcatgggcggaggagcaacgccacctggagacaggtggccagaagattgaagctgattctcgcaccctctgggcccactgctggtgccctttactgcagggtattgcctgcctgtgctgcgatgcccggcgccaggtacggatgcaggcactgacctatctgcagcgagcactacttgtacatgatctgcaaaagctagatgccctggaatgggagtcctgttttaacaaggtgctgtttcctctacttaccaagctcttggagaacatcagccctgcagatgtgggtgggatggaggagacccggatgagggcttccacattgctctctaaggtcttcctgcagcacctgtctccactgctgtcactctctacctttgcggccctctggctcaccatcttggacttcatggacaagtacatgcacgcaggctccagcgacttactgtcagaggcgatccctgagtctctgaagaacatgcttctggtgatggacacagcggagattttccacagtgcagatgcacggggaggcggcccctcggccctctgggagatcacctgggaacgcattgactgttttctccctcacctacgagatgaactcttcaagcagaccgtcatccaggaccccatgcccatggagcctcaaggccaaaagcctctcgcctcagcccacctgacttccgctgctggcgacactaggacacctggccatccaccgcccccagagattccatctgagctgggggcctgtgactttgagaagcccgagagcccccgagccgccagcagcagctccccaggatcaccagtggcctcaagccccagcaggctgagccccacccccgacgggcctccacccttggctcagcccccactgatcctgcagcccttggcctccccactgcaggtgggcgtgccacctatgactctgcccatcatcctcaaccctgcgctcatcgaggccacctcaccagtgcccctcctggccacaccccgccccacagatcccatacccacctctgaggtcaactaaggcaggtcactcagagatcaggaccagtgcttcccaccaggctttccttgaccccacttctggctgtcctgcgggccacaagctcttcaggccaagtcagagctgctgttgctgccacttggatggggacctgaaaaagagaatgttgatagccccagctaagacccccaatcagctgtgggacctttttcctcctctgcgctccattcctgggggttcagcctgagagtgaactcagctgtcatctgcagcctctgcctccagcccggcagctctggggaggcatccgtgtgccggccctgcagtgcctgcccacggtcaggcattgaaaactaagcccaaccactctgcactttgtttcccactcccattagccctgggccacctcctccagttcttcctcttttactaattagttggtcagtttggagagttgactggcaccatggagggtaggcaggtgggggctgggtgggggactgcccacaggagcatgtacatatggaaaaacagaacaacagtggactttttatgatataataaatgtcttagtaccagca

SEQ ID NO: 457465 - DNA, 6523 bp, Homo sapiens
tagttaccacgtcagtgagctgacagggaaggtacccggctctactgcccgtcccggacgactcatcctggcggactgtgcagtcccaccctgacttcagcctcaatttccaggaaacaggctccttctcttctcccatctgctaccagagccgggagagctgctcggagacgcctccggggtgcgggctggacatgagcagcggctgccggtcctgggactaggccccgccattttggatccgctgacaggtttgccaagatggtggataagaatatttacatcattcaaggggagattaacattgtggttggggccatcaaacgaaatgcccgatggagcacccatacaccactggatgaagaacgggatcctctgctgcatagtttcggtcatctaaaggaggttttaaacagtataacagaactctcagaaattgagcccaatgtattccttcgaccttttctggaagtgattcgctctgaagataccactggccctatcactggactggcactcacctctgtcaacaagttcctgtcctatgcactcatagatcccacccatgagggcacagcagagggcatggagaacatggcagatgctgtcacccatgctcgttttgtgggcacggatcctgccagtgatgaagttgtcctgatgaaaatccttcaggttctacggactctgctgctaaccccagtgggtgcccacctaaccaatgaatctgtgtgtgagattatgcagtcttgcttccggatctgctttgaaatgaggctcagtgagttattgagaaaatccgcagagcacactctcgtagacatggtgcagctgctcttcacaaggttacctcagtttaaagaagaacccaagaactatgtggggaccaacatgaagaagctgaaaatgagagccggaggcatgagtgattcatccaaatggaagaaacagaagagatcccctcggcccccacgccatatgaccaaagtcacaccaggttcagagctgcccactcccaatggaaccaccttatcatctaacctcactggtggcatgcccttcattgatgtgcccactcccatctcctctgcaagttcagaagctgcctcagcagtggtcagtccctctacagacagtggcctggaattctcctcccaaaccacttccaaggaagaccttactgatctagagcaacctggctctccagggtacagcacagctacagagcctggaagcagtgagctaggtgttcccgagcagcctgacctccaggaagggacccatgtggaaaagtcccagtcagcatctgtggagtccatccctgaagtgttagaggagtgcacgtcccctgccgaccactctgactctgcctctgtccatgacatggattacgtcaatccccggggcgtgcgctttacacagtcctcccagaaagaaggcacagctttggtcccctatggtcttccctgcatccgcgagctcttccgcttcctcatctccctcaccaatccacacgaccgccataactcagaggttatgattcacatgggactgcatttgctgacagtggcccttgagtcagcccctgtagcccagtgccagaccctcttgggcctcatcaaggatgagatgtgccgtcacttattccagctactcagcatagagcgactaaacctttatgctgcttccctgcgagtatgcttcctactgtttgagagcatgcgagagcacctcaagttccaaatggagatgtacatcaaaaagcttatggagatcatcactgtggagaaccccaagatgccttatgagatgaaggagatggcactggaggccattgtgcagctctggcgcatccccagctttgtcacagagctctacatcaactatgattgtgactactactgttccaacctctttgaggaactcacaaagctgctgtccaagaatgccttccctgtgtctggtcaactctatacaacacacctactatctcttgatgccctattgacagtgattgacagcaccgaggcccactgccaggctaaagtcctcaacagcctcacccagcaagagaagaaggagacagccagaccaagctgtgagatagtagatggcacccgagaagctagcaatactgagagaactgccagcgatgggaaagctgtaggcatggcctcagacatcccaggcctgcatctgccaggtggagggcggctgccaccagaacatgggaaatcaggatgcagtgatctggaggaagctgttgactctggggctgacaaaaagtttgcccggaagccaccccgattttcctgtctcctgccagatccacgggaactaattgaaattaaaaacaaaaagaagctgctaatcactggcacagagcagttcaatcagaaaccaaagaaggggattcagtttctgcaagagaaaggcctcctcaccatcccaatggacaacacagaggttgctcagtggctccgagagaaccctcggctggacaagaagatgattggagagtttgtgagtgaccgcaaaaacattgacctgttggagagctttgtgagcaccttcagttttcagggtctgcgactggacgaagccctccgcctctacctggaagccttccgtttgcctggggaagcaccagtcatccagaggttgctggaggcattcacagagcgttggatgaattgtaatggctccccatttgccaatagcgatgcctgcttttccctggcctatgctgtcatcatgcttaatactgaccagcacaaccacaatgttcgtaaacagaatgcacccatgaccctggaggagtttcgcaaaaatctgaaaggtgtgaatggaggcaaggactttgagcaagacatcctggaggacatgtaccatgccatcaagaatgaggaaattgtaatgcctgaggagcagacaggcttggttcgggagaactatgtgtggaatgtgctgcttcatcgaggtgccacccctgagggcatattcctgcgtgtgcctactgccagctatgatcttgacctcttcaccatgacctggggccccactattgctgctctctcttatgtctttgacaaaagccttgaggagacaatcatccagaaagccatctcaggcttcaggaagtgcgccatgatctccgcccactatggcctcagcgatgtgtttgacaatctcatcatctctctatgcaaattcacagctctcagcagtgagtctattgagaacctgcccagtgtatttggaagcaaccctaaagcccatattgcagccaagacagtattccatttggcccatcgtcatggtgacatcctgcgggagggctggaagaatatcatggaggccatgctgcagctcttccgagcccaactactgcccaaggctatgatagaggtagaagatttcgtggatcccaatggcaagatctctctacagcgggaagagacaccatcaaaccgaggagagtcaacagtgctgagctttgtgagctggctaacactgagtggtcctgagcagtctagtgttcggggcccatccactgaaaaccaagaggccaagagagtggccttagagtgtataaagcaatgtgacccagaaaaaatgatcacagaaagcaagttcctccagctggagtcactacaggagctcatgaaggctctggtctcagtgacaccagatgaagagacatatgatgaggaagatgctgctttctgcctagagatgctgctaaggattgtgttggagaacagggatcgtgtgggctgtgtgtggcagactgttcgagaccatctataccacctctgtgttcaggcacaagatttctgcttccttgtggagcgggcagtggtggggttgctacgcctggccattcggcttctccggagagaagagatcagtgctcaggtgctgctctccctgcgcattttgctactgatgaagcccagtgtgctatcccgagtcagccaccaggttgcgtatgggctccatgaactcctgaagaccaatgcagccaacatccactcaggtgatgactgggccacactcttcacactgctggagtgcatcggctcaggtgtgaagcctccagctgctctgcaggccacagccagggcagatgcacctgatgccggggcccagtcagatagtgagctcccatcctaccatcagaatgacgtgagcctggatcgagggtacacttccgactcagaggtctacactgaccatggcaggccgggcaagatacaccgatcagccacagatgccgatgtggtcaacagtggttggttagtggtgagtgacaatatgggcagcaattgagtctctcctgcttgacctgtgggaagaattcctggtcctctgcaaggacattcacacaggggccaagcctgtgtccccagctcctctgtgtactttacaggttgggaaggatgacgttgataactccaagccagggcccagccgcccaggcccttcacccctgatcaatcaatacagcctaacagtgggactggatttggggccacacgacactaagtctctgcttaagtgtgtggaatcgctgtccttcatcgtgcgtgatgctgcccacatcacacctgacaactttgagctctgcgtcaagactctccggatctttgtggaggccagtctgaatggcggatgcaagtcccaggagaaacgtggcaagagtcacaaatatgacagcaaagggaaccgcttcaagaagaaatccaaagagggatcaatgcttcgccggcctcgaacctccagccaacatgcctctcggggcgggcagagtgatgatgatgaggacgaaggcgtgcctgccagctaccatacggtgtctttacagtatcaggttgctagacctgatgcacaccctgcacacgcgggcagcctctatctacagctcatgggcggaggagcaacgccacctggagacaggtggccagaagattgaagctgattctcgcaccctctgggcccactgctggtgccctttactgcagggtattgcctgcctgtgctgcgatgcccggcgccaggtacggatgcaggcactgacctatctgcagcgagcactacttgtacatgatctgcaaaagctagatgccctggaatgggagtcctgttttaacaaggtgctgtttcctctacttaccaagctcttggagaacatcagccctgcagatgtgggtgggatggaggagacccggatgagggcttccacattgctctctaaggtcttcctgcagcacctgtctccactgctgtcactctctacctttgcggccctctggctcaccatcttggacttcatggacaagtacatgcacgcaggctccagcgacttactgtcagaggcgatccctgagtctctgaagaacatgcttctggtgatggacacagcggagattttccacagtgcagatgcacggggaggcggcccctcggccctctgggagatcacctgggaacgcattgactgttttctccctcacctacgagatgaactcttcaagcagaccgtcatccaggaccccatgcccatggagcctcaaggccaaaagcctctcgcctcagcccacctgacttccgctgctggcgacactaggacacctggccatccaccgcccccagagattccatctgagctgggggcctgtgactttgagaagcccgagagcccccgagccgccagcagcagctccccaggatcaccagtggcctcaagccccagcaggctgagccccacccccgacgggcctccacccttggctcagcccccactgatcctgcagcccttggcctccccactgcaggtgggcgtgccacctatgactctgcccatcatcctcaaccctgcgctcatcgaggccacctcaccagtgcccctcctggccacaccccgccccacagatcccatacccacctctgaggtcaactaaggcaggtcactcagagatcaggaccagtgcttcccaccaggctttccttgaccccacttctggctgtcctgcgggccacaagctcttcaggccaagtcagagctgctgttgctgccacttggatggggacctgaaaaagagaatgttgatagccccagctaagacccccaatcagctgtgggacctttttcctcctctgcgctccattcctgggggttcagcctgagagtgaactcagctgtcatctgcagcctctgcctccagcccggcagctctggggaggcatccgtgtgccggccctgcagtgcctgcccacggtcaggcattgaaaactaagcccaaccactctgcactttgtttcccactcccattagccctgggccacctcctccagttcttcctcttttactaattagttggtcagtttggagagttgactggcaccatggagggtaggcaggtgggggctgggtgggggactgcccacaggagcatgtacatatggaaaaacagaacaacagtggactttttatgatataataaatgtcttagtaccagca

SEQ ID NO: 457466 - DNA, 6539 bp, Homo sapiens
tagttaccacgtcagtgagctgacagggaaggtacccggctctactgcccgtcccggacgactcatcctggcggactgtgcagtcccaccctgacttcagcctcaatttccaggaaacaggctccttctcttctcccatctgctaccagagccgggagagctgctcggagacgcctccggggtgcgggctggacatgagcagcggctgccggtcctgggactaggccccgccattttggatccgctgacaggtttgccaagatggtggataagaatatttacatcattcaaggggagattaacattgtggttggggccatcaaacgaaatgcccgatggagcacccatacaccactggatgaagaacgggatcctctgctgcatagtttcggtcatctaaaggaggttttaaacagtataacagaactctcagaaattgagcccaatgtattccttcgaccttttctggaagtgattcgctctgaagataccactggccctatcactggactggcactcacctctgtcaacaagttcctgtcctatgcactcatagatcccacccatgagggcacagcagagggcatggagaacatggcagatgctgtcacccatgctcgttttgtgggcacggatcctgccagtgatgaagttgtcctgatgaaaatccttcaggttctacggactctgctgctaaccccagtgggtgcccacctaaccaatgaatctgtgtgtgagattatgcagtcttgcttccggatctgctttgaaatgaggctcagtgagttattgagaaaatccgcagagcacactctcgtagacatggtgcagctgctcttcacaaggttacctcagtttaaagaagaacccaagaactatgtggggaccaacatgaagaagctgaaaatgagagccggaggcatgagtgattcatccaaatggaagaaacagaagagatcccctcggcccccacgccatatgaccaaagtcacaccaggttcagagctgcccactcccaatggaaccaccttatcatctaacctcactggtggcatgcccttcattgatgtgcccactcccatctcctctgcaagttcagaagctgcctcagcagtggtcagtccctctacagacagtggcctggaattctcctcccaaaccacttccaaggaagaccttactgatctagagcaacctggctctccagggtacagcacagctacagagcctggaagcagtgagctaggtgttcccgagcagcctgacctccaggaagggacccatgtggaaaagtcccagtcagcatctgtggagtccatccctgaagtgttagaggagtgcacgtcccctgccgaccactctgactctgcctctgtccatgacatggattacgtcaatccccggggcgtgcgctttacacagtcctcccagaaagaaggcacagctttggtcccctatggtcttccctgcatccgcgagctcttccgcttcctcatctccctcaccaatccacacgaccgccataactcagaggttatgattcacatgggactgcatttgctgacagtggcccttgagtcagcccctgtagcccagtgccagaccctcttgggcctcatcaaggatgagatgtgccgtcacttattccagctactcagcatagagcgactaaacctttatgctgcttccctgcgagtatgcttcctactgtttgagagcatgcgagagcacctcaagttccaaatggagatgtacatcaaaaagcttatggagatcatcactgtggagaaccccaagatgccttatgagatgaaggagatggcactggaggccattgtgcagctctggcgcatccccagctttgtcacagagctctacatcaactatgattgtgactactactgttccaacctctttgaggaactcacaaagctgctgtccaagaatgccttccctgtgtctggtcaactctatacaacacacctactatctcttgatgccctattgacagtgattgacagcaccgaggcccactgccaggctaaagtcctcaacagcctcacccagcaagagaagaaggagacagccagaccaagctgtgagatagtagatggcacccgagaagctagcaatactgagagaactgccagcgatgggaaagctgtaggcatggcctcagacatcccaggcctgcatctgccaggtggagggcggctgccaccagaacatgggaaatcaggatgcagtgatctggaggaagctgttgactctggggctgacaaaaagtttgcccggaagccaccccgattttcctgtctcctgccagatccacgggaactaattgaaattaaaaacaaaaagaagctgctaatcactggcacagagcagttcaatcagaaaccaaagaaggggattcagtttctgcaagagaaaggcctcctcaccatcccaatggacaacacagaggttgctcagtggctccgagagaaccctcggctggacaagaagatgattggagagtttgtgagtgaccgcaaaaacattgacctgttggagagctttgtgagcaccttcagttttcagggtctgcgactggacgaagccctccgcctctacctggaagccttccgtttgcctggggaagcaccagtcatccagaggttgctggaggcattcacagagcgttggatgaattgtaatggctccccatttgccaatagcgatgcctgcttttccctggcctatgctgtcatcatgcttaatactgaccagcacaaccacaatgttcgtaaacagaatgcacccatgaccctggaggagtttcgcaaaaatctgaaaggtgtgaatggaggcaaggactttgagcaagacatcctggaggacatgtaccatgccatcaagaatgaggaaattgtaatgcctgaggagcagacaggcttggttcgggagaactatgtgtggaatgtgctgcttcatcgaggtgccacccctgagggcatattcctgcgtgtgcctactgccagctatgatcttgacctcttcaccatgacctggggccccactattgctgctctctcttatgtctttgacaaaagccttgaggagacaatcatccagaaagccatctcaggcttcaggaagtgcgccatgatctccgcccactatggcctcagcgatgtgtttgacaatctcatcatctctctatgcaaattcacagctctcagcagtgagtctattgagaacctgcccagtgtatttggaagcaaccctaaagcccatattgcagccaagacagtattccatttggcccatcgtcatggtgacatcctgcgggagggctggaagaatatcatggaggccatgctgcagctcttccgagcccaactactgcccaaggctatgatagaggtagaagatttcgtggatcccaatggcaagatctctctacagcgggaagagacaccatcaaaccgaggagagtcaacagtgctgagctttgtgagctggctaacactgagtggtcctgagcagtctagtgttcggggcccatccactgaaaaccaagaggccaagagagtggccttagagtgtataaagcaatgtgacccagaaaaaatgatcacagaaagcaagttcctccagctggagtcactacaggagctcatgaaggctctggtctcagtgacaccagatgaagagacatatgatgaggaagatgctgctttctgcctagagatgctgctaaggattgtgttggagaacagggatcgtgtgggctgtgtgtggcagactgttcgagaccatctataccacctctgtgttcaggcacaagatttctgcttccttgtggagcgggcagtggtggggttgctacgcctggccattcggcttctccggagagaagagatcagtgctcaggtgctgctctccctgcgcattttgctactgatgaagcccagtgtgctatcccgagtcagccaccaggttgcgtatgggctccatgaactcctgaagaccaatgcagccaacatccactcaggtgatgactgggccacactcttcacactgctggagtgcatcggctcaggtgtgaagcctccagctgctctgcaggccacagccagggcagatgcacctgatgccggggcccagtcagatagtgagctcccatcctaccatcagaatgacgtgagcctggatcgagggtacacttccgactcagaggtctacactgaccatggcaggccgggcaagatacaccgatcagccacagatgccgatgtggtcaacagtggttggttagtggttgggaaggatgacgttgataactccaagccagggcccagccgcccaggcccttcacccctgatcaatcaatacagcctaacagtgggactggatttggggccacacgacactaagtctctgcttaagtgtgtggaatcgctgtccttcatcgtgcgtgatgctgcccacatcacacctgacaactttgagctctgcgtcaagactctccggatctttgtggaggccagtctgaatggcggatgcaagtcccaggagaaacgtggcaagagtcacaaatatgacagcaaagggaaccgcttcaagaagaaatccaaagagggatcaatgcttcgccggcctcgaacctccagccaacatgcctctcggggcgggcagagtgatgatgatgaggacgaaggcgtgcctgccagctaccatacggtgtctttacagtatcaggttgctagacctgatgcacaccctgcacacgcgggcagcctctatctacagctcatgggcggaggagcaacgccacctggagacaggtggccagaagattgaagctgattctcgcaccctctgggcccactgctggtgccctttactgcagggtattgcctgcctgtgctgcgatgcccggcgccaggtacggatgcaggcactgacctatctgcagcgagcactacttgtacatgatctgcaaaagctagatgccctggaatgggagtcctgttttaacaaggtgctgtttcctctacttaccaagctcttggagaacatcagccctgcagatgtgggtgggatggaggagacccggatgagggcttccacattgctctctaaggtcttcctgcagcacctgtctccactgctgtcactctctacctttgcggccctctggctcaccatcttggacttcatggacaagtacatgcacgcaggctccagcgacttactggtatgttctacctcagctctgctgcctgcctcctgtcccacctgttggaaggacttgccctttcccccttggtagctacctccctttaccatactcgccccatgccctctttcctattctcatggtcccactgccacctgcagtcagaggcgatccctgagtctctgaagaacatgcttctggtgatggacacagcggagattttccacagtgcagatgcacggggaggcggcccctcggccctctgggagatcacctgggaacgcattgactgttttctccctcacctacgagatgaactcttcaagcagaccgtcatccaggaccccatgcccatggagcctcaaggccaaaagcctctcgcctcagcccacctgacttccgctgctggcgacactaggacacctggccatccaccgcccccagagattccatctgagctgggggcctgtgactttgagaagcccgagagcccccgagccgccagcagcagctccccaggatcaccagtggcctcaagccccagcaggctgagccccacccccgacgggcctccacccttggctcagcccccactgatcctgcagcccttggcctccccactgcaggtgggcgtgccacctatgactctgcccatcatcctcaaccctgcgctcatcgaggccacctcaccagtgcccctcctggccacaccccgccccacagatcccatacccacctctgaggtcaactaaggcaggtcactcagagatcaggaccagtgcttcccaccaggctttccttgaccccacttctggctgtcctgcgggccacaagctcttcaggccaagtcagagctgctgttgctgccacttggatggggacctgaaaaagagaatgttgatagccccagctaagacccccaatcagctgtgggacctttttcctcctctgcgctccattcctgggggttcagcctgagagtgaactcagctgtcatctgcagcctctgcctccagcccggcagctctggggaggcatccgtgtgccggccctgcagtgcctgcccacggtcaggcattgaaaactaagcccaaccactctgcactttgtttcccactcccattagccctgggccacctcctccagttcttcctcttttactaattagttggtcagtttggagagttgactggcaccatggagggtaggcaggtgggggctgggtgggggactgcccacaggagcatgtacatatggaaaaacagaacaacagtggactttttatgatataataaatgtcttagtaccagca

SEQ ID NO: 457467 - DNA, 6267 bp, Homo sapiens
tagttaccacgtcagtgagctgacagggaaggtacccggctctactgcccgtcccggacgactcatcctggcggactgtgcagtcccaccctgacttcagcctcaatttccaggaaacaggctccttctcttctcccatctgctaccagagccgggagagctgctcggagacgcctccggggtgcgggctggacatgagcagcggctgccggtcctgggactaggccccgccattttggatccgctgacaggtttgccaagatggtggataagaatatttacatcattcaaggggagattaacattgtggttggggccatcaaacgaaatgcccgatggagcacccatacaccactggatgaagaacgggatcctctgctgcatagtttcggtcatctaaaggaggttttaaacagtataacagaactctcagaaattgagcccaatgtattccttcgaccttttctggaagtgattcgctctgaagataccactggccctatcactggactggcactcacctctgtcaacaagttcctgtcctatgcactcatagatcccacccatgagggcacagcagagggcatggagaacatggcagatgctgtcacccatgctcgttttgtgggcacggatcctgccagtgatgaagttgtcctgatgaaaatccttcaggttctacggactctgctgctaaccccagtgggtgcccacctaaccaatgaatctgtgtgtgagattatgcagtcttgcttccggatctgctttgaaatgaggctcagtgagttattgagaaaatccgcagagcacactctcgtagacatggtgcagctgctcttcacaaggttacctcagtttaaagaagaacccaagaactatgtggggaccaacatgaagaagctgaaaatgagagccggaggcatgagtgattcatccaaatggaagaaacagaagagatcccctcggcccccacgccatatgaccaaagtcacaccaggttcagagctgcccactcccaatggaaccaccttatcatctaacctcactggtggcatgcccttcattgatgtgcccactcccatctcctctgcaagttcagaagctgcctcagcagtggtcagtccctctacagacagtggcctggaattctcctcccaaaccacttccaaggaagaccttactgatctagagcaacctggctctccagggtacagcacagctacagagcctggaagcagtgagctaggtgttcccgagcagcctgacctccaggaagggacccatgtggaaaagtcccagtcagcatctgtggagtccatccctgaagtgttagaggagtgcacgtcccctgccgaccactctgactctgcctctgtccatgacatggattacgtcaatccccggggcgtgcgctttacacagtcctcccagaaagaaggcacagctttggtcccctatggtcttccctgcatccgcgagctcttccgcttcctcatctccctcaccaatccacacgaccgccataactcagaggttatgattcacatgggactgcatttgctgacagtggcccttgagtcagcccctgtagcccagtgccagaccctcttgggcctcatcaaggatgagatgtgccgtcacttattccagctactcagcatagagcgactaaacctttatgctgcttccctgcgagtatgcttcctactgtttgagagcatgcgagagcacctcaagttccaaatggagatgtacatcaaaaagcttatggagatcatcactgtggagaaccccaagatgccttatgagatgaaggagatggcactggaggccattgtgcagctctggcgcatccccagctttgtcacagagctctacatcaactatgattgtgactactactgttccaacctctttgaggaactcacaaagctgctgtccaagaatgccttccctgtgtctggtcaactctatacaacacacctactatctcttgatgccctattgacagtgattgacagcaccgaggcccactgccaggctaaagtcctcaacagcctcacccagcaagagaagaaggagacagccagaccaagctgtgagatagtagatggcacccgagaagctagcaatactgagagaactgccagcgatgggaaagctgtaggcatggcctcagacatcccaggcctgcatctgccaggtggagggcggctgccaccagaacatgggaaatcaggatgcagtgatctggaggaagctgttgactctggggctgacaaaaagtttgcccggaagccaccccgattttcctgtctcctgccagatccacgggaactaattgaaattaaaaacaaaaagaagctgctaatcactggcacagagcagttcaatcagaaaccaaagaaggggattcagtttctgcaagagaaaggcctcctcaccatcccaatggacaacacagaggttgctcagtggctccgagagaaccctcggctggacaagaagatgattggagagtttgtgagtgaccgcaaaaacattgacctgttggagagctttgtgagcaccttcagttttcagggtctgcgactggacgaagccctccgcctctacctggaagccttccgtttgcctggggaagcaccagtcatccagaggttgctggaggcattcacagagcgttggatgaattgtaatggctccccatttgccaatagcgatgcctgcttttccctggcctatgctgtcatcatgcttaatactgaccagcacaaccacaatgttcgtaaacagaatgcacccatgaccctggaggagtttcgcaaaaatctgaaaggtgtgaatggaggcaaggactttgagcaagacatcctggaggacatgtaccatgccatcaagaatgaggaaattgtaatgcctgaggagcagacaggcttggttcgggagaactatgtgtggaatgtgctgcttcatcgaggtgccacccctgagggcatattcctgcgtgtgcctactgccagctatgatcttgacctcttcaccatgacctggggccccactattgctgctctctcttatgtctttgacaaaagccttgaggagacaatcatccagaaagccatctcaggcttcaggaagtgcgccatgatctccgcccactatggcctcagcgatgtgtttgacaatctcatcatctctctatgcaaattcacagctctcagcagtgagtctattgagaacctgcccagtgtatttggaagcaaccctaaagcccatattgcagccaagacagtattccatttggcccatcgtcatggtgacatcctgcgggagggctggaagaatatcatggaggccatgctgcagctcttccgagcccaactactgcccaaggctatgatagaggtagaagatttcgtggatcccaatggcaagatctctctacagcgggaagagacaccatcaaaccgaggagagtcaacagtgctgagctttgtgagctggctaacactgagtggtcctgagcagtctagtgttcggggcccatccactgaaaaccaagaggccaagagagtggccttagagtgtataaagcaatgtgacccagaaaaaatgatcacagaaagcaagttcctccagctggagtcactacaggagctcatgaaggctctggtctcagtgacaccagatgaagagacatatgatgaggaagatgctgctttctgcctagagatgctgctaaggattgtgttggagaacagggatcgtgtgggctgtgtgtggcagactgttcgagaccatctataccacctctgtgttcaggcacaagatttctgcttccttgtggagcgggcagtggtggggttgctacgcctggccattcggcttctccggagagaagagatcagtgctcaggtgctgctctccctgcgcattttgctactgatgaagcccagtgtgctatcccgagtcagccaccaggttgcgtatgggctccatgaactcctgaagaccaatgcagccaacatccactcaggtgatgactgggccacactcttcacactgctggagtgcatcggctcaggtgtgaagcctccagctgctctgcaggccacagccagggcagatgcacctgatgccggggcccagtcagatagtgagctcccatcctaccatcagaatgacgtgagcctggatcgagggtacacttccgactcagaggtctacactgaccatggcaggccgggcaagatacaccgatcagccacagatgccgatgtggtcaacagtggttggttagtggttgggaaggatgacgttgataactccaagccagggcccagccgcccaggcccttcacccctgatcaatcaatacagcctaacagtgggactggatttggggccacacgacactaagtctctgcttaagtgtgtggaatcgctgtccttcatcgtgcgtgatgctgcccacatcacacctgacaactttgagctctgcgtcaagactctccggatctttgtggaggccagtctgaatggcggatgcaagtcccaggagaaacgtggcaagagtcacaaatatgacagcaaagggaaccgcttcaagaagaaatccaaagagggatcaatgcttcgccggcctcgaacctccagccaacatgcctctcggggcgggcagagtgatgatgatgaggacgaaggcgtgcctgccagctaccatacggtgtctttacagtatcaggttgctagacctgatgcacaccctgcacacgcgggcagcctctatctacagctcatgggcggaggagcaacgccacctggagacaggtggccagaagattgaagctgattctcgcaccctctgggcccactgctggtgccctttactgcagggtattgcctgcctgtgctgcgatgcccggcgccaggtacggatgcaggcactgacctatctgcagcgagcactacttgtacatgatctgcaaaagctagatgccctggaatgggagtcctgttttaacaaggtgctgtttcctctacttaccaagctcttggagaacatcagccctgcagatgtgggtgggatggaggagacccggatgagggcttccacattgctctctaaggtcttcctgcagcacctgtctccactgctgtcactctctacctttgcggccctctggctcaccatcttggacttcatggacaagtacatgcacgcaggctccagcgacttactgtcagaggcgatccctgagtctctgaagaacatgcttctggtgatggacacagcggagattttccacagtgcagatgcacggggaggcggcccctcggccctctgggagatcacctgggaacgcattgactgttttctccctcacctacgagatgaactcttcaagcagaccgtcatccaggactttgagaagcccgagagcccccgagccgccagcagcagctccccaggatcaccagtggcctcaagccccagcaggctgagccccacccccgacgggcctccacccttggctcagcccccactgatcctgcagcccttggcctccccactgcaggtgggcgtgccacctatgactctgcccatcatcctcaaccctgcgctcatcgaggccacctcaccagtgcccctcctggccacaccccgccccacagatcccatacccacctctgaggtcaactaaggcaggtcactcagagatcaggaccagtgcttcccaccaggctttccttgaccccacttctggctgtcctgcgggccacaagctcttcaggccaagtcagagctgctgttgctgccacttggatggggacctgaaaaagagaatgttgatagccccagctaagacccccaatcagctgtgggacctttttcctcctctgcgctccattcctgggggttcagcctgagagtgaactcagctgtcatctgcagcctctgcctccagcccggcagctctggggaggcatccgtgtgccggccctgcagtgcctgcccacggtcaggcattgaaaactaagcccaaccactctgcactttgtttcccactcccattagccctgggccacctcctccagttcttcctcttttactaattagttggtcagtttggagagttgactggcaccatggagggtaggcaggtgggggctgggtgggggactgcccacaggagcatgtacatatggaaaaacagaacaacagtggactttttatgatataataaatgtcttagtaccagca

SEQ ID NO: 457468 - DNA, 2641 bp, Homo sapiens
cccgcttccccgctccctgccctaaccccactccaggtgctgctctccctgcgcattttgctactgatgaagcccagtgtgctatcccgagtcagccaccaggttgcgtatgggctccatgaactcctgaagaccaatgcagccaacatccactcaggtgatgactgggccacactcttcacactgctggagtgcatcggctcaggtgtgaagcctccagctgctctgcaggccacagccagggcagatgcacctgatgccggggcccagtcagatagtgagctcccatcctaccatcagaatgacgtgagcctggatcgagggtacacttccgactcagaggtctacactgaccatggcaggccgggcaagatacaccgatcagccacagatgccgatgtggtcaacagtggttggttagtggtgagtgacaatatgggcagcaattgagtctctcctgcttgacctgtgggaagaattcctggtcctctgcaaggacattcacacaggggccaagcctgtgtccccagctcctctgtgtactttacaggttgggaaggatgacgttgataactccaagccagggcccagccgcccaggcccttcacccctgatcaatcaatacagcctaacagtgggactggatttggggccacacgacactaagtctctgcttaagtgtgtggaatcgctgtccttcatcgtgcgtgatgctgcccacatcacacctgacaactttgagctctgcgtcaagactctccggatctttgtggaggccagtctgaatggcggatgcaagtcccaggagaaacgtggcaagagtcacaaatatgacagcaaagggaaccgcttcaagaagaaatccaaagagggatcaatgcttcgccggcctcgaacctccagccaacatgcctctcggggcgggcagagtgatgatgatgaggacgaaggcgtgcctgccagctaccatacggtgtctttacagtatcaggttgctagacctgatgcacaccctgcacacgcgggcagcctctatctacagctcatgggcggaggagcaacgccacctggagacaggtggccagaagattgaagctgattctcgcaccctctgggcccactgctggtgccctttactgcagggtattgcctgcctgtgctgcgatgcccggcgccaggtacggatgcaggcactgacctatctgcagcgagcactacttgtacatgatctgcaaaagctagatgccctggaatgggagtcctgttttaacaaggtgctgtttcctctacttaccaagctcttggagaacatcagccctgcagatgtgggtgggatggaggagacccggatgagggcttccacattgctctctaaggtcttcctgcagcacctgtctccactgctgtcactctctacctttgcggccctctggctcaccatcttggacttcatggacaagtacatgcacgcaggctccagcgacttactgtcagaggcgatccctgagtctctgaagaacatgcttctggtgatggacacagcggagattttccacagtgcagatgcacggggaggcggcccctcggccctctgggagatcacctgggaacgcattgactgttttctccctcacctacgagatgaactcttcaagcagaccgtcatccaggaccccatgcccatggagcctcaaggccaaaagcctctcgcctcagcccacctgacttccgctgctggcgacactaggacacctggccatccaccgcccccagagattccatctgagctgggggcctgtgactttgagaagcccgagagcccccgagccgccagcagcagctccccaggatcaccagtggcctcaagccccagcaggctgagccccacccccgacgggcctccacccttggctcagcccccactgatcctgcagcccttggcctccccactgcaggtgggcgtgccacctatgactctgcccatcatcctcaaccctgcgctcatcgaggccacctcaccagtgcccctcctggccacaccccgccccacagatcccatacccacctctgaggtcaactaaggcaggtcactcagagatcaggaccagtgcttcccaccaggctttccttgaccccacttctggctgtcctgcgggccacaagctcttcaggccaagtcagagctgctgttgctgccacttggatggggacctgaaaaagagaatgttgatagccccagctaagacccccaatcagctgtgggacctttttcctcctctgcgctccattcctgggggttcagcctgagagtgaactcagctgtcatctgcagcctctgcctccagcccggcagctctggggaggcatccgtgtgccggccctgcagtgcctgcccacggtcaggcattgaaaactaagcccaaccactctgcactttgtttcccactcccattagccctgggccacctcctccagttcttcctcttttactaattagttggtcagtttggagagttgactggcaccatggagggtaggcaggtgggggctgggtgggggactgcccacaggagcatgtacatatggaaaaacagaacaacagtggactttttatgatataataaatgtcttagtaccagca

SEQ ID NO: 457469 - DNA, 1584 bp, Homo sapiens
aattctggactcggggcattctggactcggggcaattcttggactctcgcaccctctgggcccactgctggtgccctttactgcaggtattgcctgcctgtgctgcgatgcccggcgccaggtacggatgcaggcactgacctatctgcagcgagcactacttgtacatgatctgcaaaagctagatgccctggaatgggagtcctgttttaacaaggtgctgtttcctctacttaccaagctcttggagaacatcagccctgcagatgtgggtgggatggaggagacccggatgagggcttccacattgctctctaaggtcttcctgcagcacctgtctccactgctgtcactctctacctttgcggccctctggctcaccatcttggacttcatggacaagtacatgcacgcaggctccagcgacttactgtcagaggcgatccctgagtctctgaagaacatgcttctggtgatggacacagcggagattttccacagtgcagatgcacggggaggcggcccctcggccctctgggagatcacctgggaacgcattgactgttttctccctcacctacgagatgaactcttcaagcagaccgtcatccaggaccccatgcccatggagcctcaaggccaaaagcctctcgcctcagcccacctgacttccgctgctggcgacactaggacacctggccatccaccgcccccagagattccatctgagctgggggcctgtgactttgagaagcccgagagcccccgagccgccagcagcagctccccaggatcaccagtggcctcaagccccagcaggctgagccccacccccgacgggcctccacccttggctcagcccccactgatcctgcagcccttggcctccccactgcaggtgggcgtgccacctatgactctgcccatcatcctcaaccctgcgctcatcgaggccacctcaccagtgcccctcctggccacaccccgccccacagatcccatacccacctctgaggtcaactaaggcaggtcactcagagatcaggaccagtgcttcccaccaggctttccttgaccccacttctggctgtcctgcgggccacaagctcttcaggccaagtcagagctgctgttgctgccacttggatggggacctgaaaaagagaatgttgatagccccagctaagacccccaatcagctgtgggacctttttcctcctctgcgctccattcctgggggttcagcctgagagtgaactcagctgtcatctgcagcctctgcctccagcccggcagctctggggaggcatccgtgtgccggccctgcagtgcctgcccacggtcaggcattgaaaactaagcccaaccactctgcactttgtttcccactcccattagccctgggccacctcctccagttcttcctcttttactaattagttggtcagtttggagagttgactggcaccatggagggtaggcaggtgggggctgggtgggggactgcccacaggagcatgtacatatggaaaaacagaacaacagtggactttttatgatataataaatgtcttagtaccagca

SEQ ID NO: 457470 - DNA, 5819 bp, Homo sapiens
tagttaccacgtcagtgagctgacagggaaggtacccggctctactgcccgtcccggacgactcatcctggcggactgtgcagtcccaccctgacttcagcctcaatttccaggaaacaggctccttctcttctcccatctgctaccagagccgggagagctgctcggagacgcctccggggtgcgggctggacatgagcagcggctgccggtcctgggactaggccccgccattttggatccgctgacaggtttgccaagatggtggataagaatatttacatcattcaaggggagattaacattgtggttggggccatcaaacgaaatgcccgatggagcacccatacaccactggatgaagaacgggatcctctgctgcatagtttcggtcatctaaaggaggttttaaacagtataacagaactctcagaaattgagcccaatgtattccttcgaccttttctggaagtgattcgctctgaagataccactggccctatcactggactggcactcacctctgtcaacaagttcctgtcctatgcactcatagatcccacccatgagggcacagcagagggcatggagaacatggcagatgctgtcacccatgctcgttttgtgggcacggatcctgccagtgatgaagttgtcctgatgaaaatccttcaggttctacggactctgctgctaaccccagtgggtgcccacctaaccaatgaatctgtgtgtgagattatgcagtcttgcttccggatctgctttgaaatgaggctcagtgagttattgagaaaatccgcagagcacactctcgtagacatggtgcagctgctcttcacaaggttacctcagtttaaagaagaacccaagaactatgtggggaccaacatgaagaagctgaaaatgagagccggaggcatgagtgattcatccaaatggaagaaacagaagagatcccctcggcccccacgccatatgaccaaagtcacaccaggttcagagctgcccactcccaatggaaccaccttatcatctaacctcactggtggcatgcccttcattgatgtgcccactcccatctcctctgcaagttcagaagctgcctcagcagtggtcagtccctctacagacagtggcctggaattctcctcccaaaccacttccaaggaagaccttactgatctagagcaacctggctctccagggtacagcacagctacagagcctggaagcagtgagctaggtgttcccgagcagcctgacctccaggaagggacccatgtggaaaagtcccagtcagcatctgtggagtccatccctgaagtgttagaggagtgcacgtcccctgccgaccactctgactctgcctctgtccatgacatggattacgtcaatccccggggcgtgcgctttacacagtcctcccagaaagaaggcacagctttggtcccctatggtcttccctgcatccgcgagctcttccgcttcctcatctccctcaccaatccacacgaccgccataactcagaggttatgattcacatgggactgcatttgctgacagtggcccttgagtcagcccctgtagcccagtgccagaccctcttgggcctcatcaaggatgagatgtgccgtcacttattccagctactcagcatagagcgactaaacctttatgctgcttccctgcgagtatgcttcctactgtttgagagcatgcgagagcacctcaagttccaaatggagatgtacatcaaaaagcttatggagatcatcactgtggagaaccccaagatgccttatgagatgaaggagatggcactggaggccattgtgcagctctggcgcatccccagctttgtcacagagctctacatcaactatgattgtgactactactgttccaacctctttgaggaactcacaaagctgctgtccaagaatgccttccctgtgtctggtcaactctatacaacacacctactatctcttgatgccctattgacagtgattgacagcaccgaggcccactgccaggctaaagtcctcaacagcctcacccagcaagagaagaaggagacagccagaccaagctgtgagatagtagatggcacccgagaagctagcaatactgagagaactgccagcgatgggaaagctgtaggcatggcctcagacatcccaggcctgcatctgccaggtggagggcggctgccaccagaacatgggaaatcaggatgcagtgatctggaggaagctgttgactctggggctgacaaaaagtttgcccggaagccaccccgattttcctgtctcctgccagatccacgggaactaattgaaattaaaaacaaaaagaagctgctaatcactggcacagagcagttcaatcagaaaccaaagaaggggattcagtttctgcaagagaaaggcctcctcaccatcccaatggacaacacagaggttgctcagtggctccgagagaaccctcggctggacaagaagatgattggagagtttgtgagtgaccgcaaaaacattgacctgttggagagctttgtgagcaccttcagttttcagggtctgcgactggacgaagccctccgcctctacctggaagccttccgtttgcctggggaagcaccagtcatccagaggttgctggaggcattcacagagcgttggatgaattgtaatggctccccatttgccaatagcgatgcctgcttttccctggcctatgctgtcatcatgcttaatactgaccagcacaaccacaatgttcgtaaacagaatgcacccatgaccctggaggagtttcgcaaaaatctgaaaggtgtgaatggaggcaaggactttgagcaagacatcctggaggacatgtaccatgccatcaagaatgaggaaattgtaatgcctgaggagcagacaggcttggttcgggagaactatgtgtggaatgtgctgcttcatcgaggtgccacccctgagggcatattcctgcgtgtgcctactgccagctatgatcttgacctcttcaccatgacctggggccccactattgctgctctctcttatgtctttgacaaaagccttgaggagacaatcatccagaaagccatctcaggcttcaggaagtgcgccatgatctccgcccactatggcctcagcgatgtgtttgacaatctcatcatctctctatgcaaattcacagctctcagcagtgagtctattgagaacctgcccagtgtatttggaagcaaccctaaagcccatattgcagccaagacagtattccatttggcccatcgtcatggtgacatcctgcgggagggctggaagaatatcatggaggccatgctgcagctcttccgagcccaactactgcccaaggctatgatagaggtagaagatttcgtggatcccaatggcaagatctctctacagcgggaagagacaccatcaaaccgaggagagtcaacagtgctgagctttgtgagctggctaacactgagtggtcctgagcagtctagtgttcggggcccatccactgaaaaccaagaggccaagagagtggccttagagtgtataaagcaatgtgacccagaaaaaatgatcacagaaagcaagttcctccagctggagtcactacaggagctcatgaaggctctggtctcagtgacaccagatgaagagacatatgatgaggaagatgctgctttctgcctagagatgctgctaaggattgtgttggagaacagggatcgtgtgggctgtgtgtggcagactgttcgagaccatctataccacctctgtgttcaggcacaagatttctgcttccttgtggagcgggcagtggtggggttgctacgcctggccattcggcttctccggagagaagagatcagtgctcaggtgctgctctccctgcgcattttgctactgatgaagcccagtgtgctatcccgagtcagccaccaggttgcgtatgggctccatgaactcctgaagaccaatgcagccaacatccactcaggtgatgactgggccacactcttcacactgctggagtgcatcggctcaggtgtgaagcctccagctgctctgcaggccacagccagggcagatgcacctgatgccggggcccagtcagatagtgagctcccatcctaccatcagaatgacgtgagcctggatcgagggtacacttccgactcagaggtctacactgaccatggcaggccgggcaagatacaccgatcagccacagatgccgatgtggtcaacagtggttggttagtggttgggaaggatgacgttgataactccaagccagggcccagccgcccaggcccttcacccctgatcaatcaatacagcctaacagtgggactggatttggggccacacgacactaagtctctgcttaagtgtgtggaatcgctgtccttcatcgtgcgtgatgctgcccacatcacacctgacaactttgagctctgcgtcaagactctccggatctttgtggaggccagtctgaatggcggatgcaagtcccaggagaaacgtggcaagagtcacaaatatgacagcaaagggaaccgcttcaagaagaaatccaaagagggatcaatgcttcgccggcctcgaacctccagccaacatgcctctcggggcgggcagagtgatgatgatgaggacgaaggcgtgcctgccagctaccatacggtgtctttacagtatcaggttgctagacctgatgcacaccctgcacacgcgggcagcctctatctacagctcatgggcggaggagcaacgccacctggagacaggtggccagaagattgaagctgattctcgcaccctctgggcccactgctggtgccctttactgcagggtattgcctgcctgtgctgcgatgcccggcgccaggtacggatgcaggcactgacctatctgcagcgagcactacttgtacatgatctgcaaaagctagatgccctggaatgggagtcctgttttaacaaggtgctgtttcctctacttaccaagctcttggagaacatcagccctgcagatgtgggtgggatggaggagacccggatgagggcttccacattgctctctaaggtcttcctgcagcacctgtctccactgctgtcactctctacctttgcggccctctggctcaccatcttggacttcatggacaagtacatgcacgcaggctccagcgacttactgtcagaggcgatccctgagtctctgaagaacatgcttctggtgatggacacagcggagattttccacagtgcagatgcacggggaggcggcccctcggccctctgggagatcacctgggaacgcattgactgttttctccctcacctacgagatgaactcttcaagcagaccgtcatccaggaccccatgcccatggagcctcaaggccaaaagcctctcgcctcagcccacctgacttccgctgctggcgacactaggacacctggccatccaccgcccccagagattccatctgagctgggggcctgtgactttgagaagcccgagagcccccgagccgccagcagcagctccccaggatcaccagtggcctcaagccccagcaggctgagccccacccccgacgggcctccacccttggctcagcccatgtctgagccttggctccatgaggggggtgccactatgattgcatatctaactggtatgagcactaacatggctctggaaaccgcaagtcctacacttgggaaggggccgaacggcggtccccggttttcccttgggtgggcat

SEQ ID NO: 457471 - DNA, 5148 bp, Homo sapiens
tagttaccacgtcagtgagctgacagggaaggtacccggctctactgcccgtcccggacgactcatcctggcggactgtgcagtcccaccctgacttcagcctcaatttccaggaaacaggctccttctcttctcccatctgctaccagagccgggagagctgctcggagacgcctccggggtgcgggctggacatgagcagcggctgccggtcctgggactaggccccgccattttggatccgctgacaggtttgccaagatggtggataagaatatttacatcattcaaggggagattaacattgtggttggggccatcaaacgaaatgcccgatggagcacccatacaccactggatgaagaacgggatcctctgctgcatagtttcggtcatctaaaggaggttttaaacagtataacagaactctcagaaattgagcccaatgtattccttcgaccttttctggaagtgattcgctctgaagataccactggccctatcactggactggcactcacctctgtcaacaagttcctgtcctatgcactcatagatcccacccatgagggcacagcagagggcatggagaacatggcagatgctgtcacccatgctcgttttgtgggcacggatcctgccagtgatgaagttgtcctgatgaaaatccttcaggttctacggactctgctgctaaccccagtgggtgcccacctaaccaatgaatctgtgtgtgagattatgcagtcttgcttccggatctgctttgaaatgaggctcagtgagttattgagaaaatccgcagagcacactctcgtagacatggtgcagctgctcttcacaaggttacctcagtttaaagaagaacccaagaactatgtggggaccaacatgaagaagctgaaaatgagagccggaggcatgagtgattcatccaaatggaagaaacagaagagatcccctcggcccccacgccatatgaccaaagtcacaccaggttcagagctgcccactcccaatggaaccaccttatcatctaacctcactggtggcatgcccttcattgatgtgcccactcccatctcctctgcaagttcagaagctgcctcagcagtggtcagtccctctacagacagtggcctggaattctcctcccaaaccacttccaaggaagaccttactgatctagagcaacctggctctccagggtacagcacagctacagagcctggaagcagtgagctaggtgttcccgagcagcctgacctccaggaagggacccatgtggaaaagtcccagtcagcatctgtggagtccatccctgaagtgttagaggagtgcacgtcccctgccgaccactctgactctgcctctgtccatgacatggattacgtcaatccccggggcgtgcgctttacacagtcctcccagaaagaaggcacagctttggtcccctatggtcttccctgcatccgcgagctcttccgcttcctcatctccctcaccaatccacacgaccgccataactcagaggttatgattcacatgggactgcatttgctgacagtggcccttgagtcagcccctgtagcccagtgccagaccctcttgggcctcatcaaggatgagatgtgccgtcacttattccagctactcagcatagagcgactaaacctttatgctgcttccctgcgagtatgcttcctactgtttgagagcatgcgagagcacctcaagttccaaatggagatgtacatcaaaaagcttatggagatcatcactgtggagaaccccaagatgccttatgagatgaaggagatggcactggaggccattgtgcagctctggcgcatccccagctttgtcacagagctctacatcaactatgattgtgactactactgttccaacctctttgaggaactcacaaagctgctgtccaagaatgccttccctgtgtctggtcaactctatacaacacacctactatctcttgatgccctattgacagtgattgacagcaccgaggcccactgccaggctaaagtcctcaacagcctcacccagcaagagaagaaggagacagccagaccaagctgtgagatagtagatggcacccgagaagctagcaatactgagagaactgccagcgatgggaaagctgtaggcatggcctcagacatcccaggcctgcatctgccaggtggagggcggctgccaccagaacatgggaaatcaggatgcagtgatctggaggaagctgttgactctggggctgacaaaaagtttgcccggaagccaccccgattttcctgtctcctgccagatccacgggaactaattgaaattaaaaacaaaaagaagctgctaatcactggcacagagcagttcaatcagaaaccaaagaaggggattcagtttctgcaagagaaaggcctcctcaccatcccaatggacaacacagaggttgctcagtggctccgagagaaccctcggctggacaagaagatgattggagagtttgtgagtgaccgcaaaaacattgacctgttggagagctttgtgagcaccttcagttttcagggtctgcgactggacgaagccctccgcctctacctggaagccttccgtttgcctggggaagcaccagtcatccagaggttgctggaggcattcacagagcgttggatgaattgtaatggctccccatttgccaatagcgatgcctgcttttccctggcctatgctgtcatcatgcttaatactgaccagcacaaccacaatgttcgtaaacagaatgcacccatgaccctggaggagtttcgcaaaaatctgaaaggtgtgaatggaggcaaggactttgagcaagacatcctggaggacatgtaccatgccatcaagaatgaggaaattgtaatgcctgaggagcagacaggcttggttcgggagaactatgtgtggaatgtgctgcttcatcgaggtgccacccctgagggcatattcctgcgtgtgcctactgccagctatgatcttgacctcttcaccatgacctggggccccactattgctgctctctcttatgtctttgacaaaagccttgaggagacaatcatccagaaagccatctcaggcttcaggaagtgcgccatgatctccgcccactatggcctcagcgatgtgtttgacaatctcatcatctctctatgcaaattcacagctctcagcagtgagtctattgagaacctgcccagtgtatttggaagcaaccctaaagcccatattgcagccaagacagtattccatttggcccatcgtcatggtgacatcctgcgggagggctggaagaatatcatggaggccatgctgcagctcttccgagcccaactactgcccaaggctatgatagaggtagaagatttcgtggatcccaatggcaagatctctctacagcgggaagagacaccatcaaaccgaggagagtcaacagtgctgagctttgtgagctggctaacactgagtggtcctgagcagtctagtgttcggggcccatccactgaaaaccaagaggccaagagagtggccttagagtgtataaagcaatgtgacccagaaaaaatgatcacagaaagcaagttcctccagctggagtcactacaggagctcatgaaggctctggtctcagtgacaccagatgaagagacatatgatgaggaagatgctgctttctgcctagagatgctgctaaggattgtgttggagaacagggatcgtgtgggctgtgtgtggcagactgttcgagaccatctataccacctctgtgttcaggcacaagatttctgcttccttgtggagcgggcagtggtggggttgctacgcctggccattcggcttctccggagagaagagatcagtgctcaggtgctgctctccctgcgcattttgctactgatgaagcccagtgtgctatcccgagtcagccaccaggttgcgtatgggctccatgaactcctgaagaccaatgcagccaacatccactcaggtgatgactgggccacactcttcacactgctggagtgcatcggctcaggtgtgaagcctccagctgctctgcaggccacagccagggcagatgcacctgatgccggggcccagtcagatagtgagctcccatcctaccatcagaatgacgtgagcctggatcgagggtacacttccgactcagaggtctacactgaccatggcaggccgggcaagatacaccgatcagccacagatgccgatgtggtcaacagtggttggttagtggttgggaaggatgacgttgataactccaagccagggcccagccgcccaggcccttcacccctgatcaatcaatacagcctaacagtgggactggatttggggccacacgacactaagtctctgcttaagtgtgtggaatcgctgtccttcatcgtgcgtgatgctgcccacatcacacctgacaactttgagctctgcgtcaagactctccggatctttgtggaggccagtctgaatggcggatgcaagtcccaggagaaacgtggcaagagtcacaaatatgacagcaaagggaaccgcttcaagaagaaatccaaagagggatcaatgcttcgccggcctcgaacctccagccaacatgcctctcggggcgggcagagtgatgatgatgaggacgaaggcgtgcctgccagctaccatacggtgtctttacagtatcaggttgctagacctgatgcacaccctgcacacgcgggcagcctctatctacagctcatgggcggaggagcaacgccacctggagacaggtggccagaagattgaagctgattctcgcaccctctgggcccactgctggtgccctttactgcagggtattgcctgcctgtgctgcgatgcccggcgccaggtacggatgcaggcactgacctatctgcagcgagcactacttgtacatgatctgcaaaagctagatgccctggaatgggagtcctgttttaacaaggtgctgtttcctctacttaccaagctcttggagaacatctgcccacaggagcatgtacatatggaaaaacagaacaacagtggactttttatgatataataaatgtcttagtaccagca

SEQ ID NO: 457472 - DNA, 4123 bp, Homo sapiens
tagttaccacgtcagtgagctgacagggaaggtacccggctctactgcccgtcccggacgactcatcctggcggactgtgcagtcccaccctgacttcagcctcaatttccaggaaacaggctccttctcttctcccatctgctaccagagccgggagagctgctcggagacgcctccggggtgcgggctggacatgagcagcggctgccggtcctgggactaggccccgccattttggatccgctgacaggtttgccaagatggtggataagaatatttacatcattcaaggggagattaacattgtggttggggccatcaaacgaaatgcccgatggagcacccatacaccactggatgaagaacgggatcctctgctgcatagtttcggtcatctaaaggaggttttaaacagtataacagaactctcagaaattgagcccaatgtattccttcgaccttttctggaagtgattcgctctgaagataccactggccctatcactggactggcactcacctctgtcaacaagttcctgtcctatgcactcatagatcccacccatgagggcacagcagagggcatggagaacatggcagatgctgtcacccatgctcgttttgtgggcacggatcctgccagtgatgaagttgtcctgatgaaaatccttcaggttctacggactctgctgctaaccccagtgggtgcccacctaaccaatgaatctgtgtgtgagattatgcagtcttgcttccggatctgctttgaaatgaggctcagtgagttattgagaaaatccgcagagcacactctcgtagacatggtgcagctgctcttcacaaggttacctcagtttaaagaagaacccaagaactatgtggggaccaacatgaagaagctgaaaatgagagccggaggcatgagtgattcatccaaatggaagaaacagaagagatcccctcggcccccacgccatatgaccaaagtcacaccaggttcagagctgcccactcccaatggaaccaccttatcatctaacctcactggtggcatgcccttcattgatgtgcccactcccatctcctctgcaagttcagaagctgcctcagcagtggtcagtccctctacagacagtggcctggaattctcctcccaaaccacttccaaggaagaccttactgatctagagcaacctggctctccagggtacagcacagctacagagcctggaagcagtgagctaggtgttcccgagcagcctgacctccaggaagggacccatgtggaaaagtcccagtcagcatctgtggagtccatccctgaagtgttagaggagtgcacgtcccctgccgaccactctgactctgcctctgtccatgacatggattacgtcaatccccggggcgtgcgctttacacagtcctcccagaaagaaggcacagctttggtcccctatggtcttccctgcatccgcgagctcttccgcttcctcatctccctcaccaatccacacgaccgccataactcagaggttatgattcacatgggactgcatttgctgacagtggcccttgagtcagcccctgtagcccagtgccagaccctcttgggcctcatcaaggatgagatgtgccgtcacttattccagctactcagcatagagcgactaaacctttatgctgcttccctgcgagtatgcttcctactgtttgagagcatgcgagagcacctcaagttccaaatggagatgtacatcaaaaagcttatggagatcatcactgtggagaaccccaagatgccttatgagatgaaggagatggcactggaggccattgtgcagctctggcgcatccccagctttgtcacagagctctacatcaactatgattgtgactactactgttccaacctctttgaggaactcacaaagctgctgtccaagaatgccttccctgtgtctggtcaactctatacaacacacctactatctcttgatgccctattgacagtgattgacagcaccgaggcccactgccaggctaaagtcctcaacagcctcacccagcaagagaagaaggagacagccagaccaagctgtgagatagtagatggcacccgagaagctagcaatactgagagaactgccagcgatgggaaagctgtaggcatggcctcagacatcccaggcctgcatctgccaggtggagggcggctgccaccagaacatgggaaatcaggatgcagtgatctggaggaagctgttgactctggggctgacaaaaagtttgcccggaagccaccccgattttcctgtctcctgccagatccacgggaactaattgaaattaaaaacaaaaagaagctgctaatcactggcacagagcagttcaatcagaaaccaaagaaggggattcagtttctgcaagagaaaggcctcctcaccatcccaatggacaacacagaggttgctcagtggctccgagagaaccctcggctggacaagaagatgattggagagtttgtgagtgaccgcaaaaacattgacctgttggagagctttgtgagcaccttcagttttcagggtctgcgactggacgaagccctccgcctctacctggaagccttccgtttgcctggggaagcaccagtcatccagaggttgctggaggcattcacagagcgttggatgaattgtaatggctccccatttgccaatagcgatgcctgcttttccctggcctatgctgtcatcatgcttaatactgaccagcacaaccacaatgttcgtaaacagaatgcacccatgaccctggaggagtttcgcaaaaatctgaaaggtgtgaatggaggcaaggactttgagcaagacatcctggaggacatgtaccatgccatcaagaatgaggaaattgtaatgcctgaggagcagacaggcttggttcgggagaactatgtgtggaatgtgctgcttcatcgaggtgccacccctgagggcatattcctgcgtgtgcctactgccagctatgatcttgacctcttcaccatgacctggggccccactattgctgctctctcttatgtctttgacaaaagccttgaggagacaatcatccagaaagccatctcaggcttcaggaagtgcgccatgatctccgcccactatggcctcagcgatgtgtttgacaatctcatcatctctctatgcaaattcacagctctcagcagtgagtctattgagaacctgcccagtgtatttggaagcaaccctaaagcccatattgcagccaagacagtattccatttggcccatcgtcatggtgacatcctgcgggagggctggaagaatatcatggaggccatgctgcagctcttccgagcccaactactgcccaaggctatgatagaggtagaagatttcgtggatcccaatggcaagatctctctacagcgggaagagacaccatcaaaccgaggagagtcaacagtgctgagctttgtgagctggctaacactgagtggtcctgagcagtctagtgttcggggcccatccactgaaaaccaagaggccaagagagtggccttagagtgtataaagcaatgtgacccagaaaaaatgatcacagaaagcaagttcctccagctggagtcactacaggagctcatgaaggctctggtctcagtgacaccagatgaagagacatatgatgaggaagatgctgctttctgcctagagatgctgctaaggattgtgttggagaacagggatcgtgtgggctgtgtgtggcagactgttcgagaccatctataccacctctgtgttcaggcacaagatttctgcttccttgtggagcgggcagtggtggggttgctacgcctggccattcggcttctccggagagaagagatcagtgctcaggtgctgcctctccctgcagcattttgggctactggattgaagccacagtcgttgacgtattcccgcggagttcaagccgaccaaggggtttcgcggttattcggggcttccccattgacacctcccttggaaaagaacccaaaatttgcaaaggcccaaacaattcccacttccaaggggttggatttgaaccttggggggccca

SEQ ID NO: 457473 - DNA, 510 bp, Homo sapiens
ctctccacatcacttaatctttcctttttcgctggagcagatcccacccatgagggcacagcagagggcatggagaacatggcagatgctgtcacccatgctcgttttgtgggcacggatcctgccagtgatgaagttgtcctgatgaaaatccttcaggtaagcgagagggaaatagcaattaggctaatggccaggggctggtgccgcagactctacttactctgcccacagcatgaaactgtgttttgactccactggggcttaggggagctactttgtttccagacaagcagctggggtacccaaagtaaaagctttttctaaggaaaatcagtaaaagctttatatgaagtgatgtcaaataccagaagccttaaatacacttgtacctctggccgactgtatttgtgccgtccatctcttgggctcatgggctagggctagaatcagttctgaaatatgtcagggtcataaaaagtgaagaaacaattccaaggacaagcttct

SEQ ID NO: 457474 - DNA, 382 bp, Homo sapiens
attcatccaaatggaagaaacagaagagatcccctcggcccccacgccatatgaccaaagtcacaccaggttcagagctgcccactcccaatggaaccaccttatcatctaacctcactggtgagtgccctggactacttcctctgattagacaaaagaagagctcctttctctcttagggattttgaaattgaagaccaaccaactgaggggctttggtcttggcgctgagaacaaaaagggaaactccaggtcaaatcagagtgtgaccattcagcaactatgcagtgacttaaggttgttctctgacaactttagagaccaatatatgcaaagataagcatgtaatctgggaaacagagaccctagtaccatagagggt

SEQ ID NO: 457475 - DNA, 530 bp, Homo sapiens
aggctggctatcaacaaatgtcagggatggatataaaactggagagaagaattacctagtttctttcttctacttttcccccaatcctaagttagagaagaggaactgttttatgtatcttgagcactcaggaaaggagtaaaaaagagctcgtaagccaattcaattagacatgaagatgggggaagctaaggccattatgatctagccttagttctgtaatcactaagaaccacatcctaggagctttttagctgaccaactgtgggtgggctatggtggactccaggctggccttgtctaatttagaggcaaagtagcttctatacctctagtttttctcatgcagctgctaatcactggcacagagcagttcaatcagaaaccaaagaaggggattcagtttctgcaagagaaaggcctcctcaccatcccaatggacaacacagaggttgctcagtggctccgagagaaccctcggctggacaagaagatgattggagagtttgtgagtgaccgcaaaaacattg

SEQ ID NO: 457476 - DNA, 347 bp, Homo sapiens
ggacataggatttccagtgggcatgatggatggggttctgtccaagggaatcaggaagggctggccaacctagaaaagggactggggtggggaagtgggttttttcgcttaccttttcctaagtcctatttactgaaaacccaggagttccttaggtggggcttcagtgttgacacaaggggaaaaaacttactggcctgtctctaggagtttcgcaaaaatctgaaaggtgtgaatggaggcaaggactttgagcaagacatcctggaggacatgtaccatgccatcaagtgagtatacatagagaatagtgcagtatctctgttaagaagaagcacattgcttcc

SEQ ID NO: 457477 - DNA, 393 bp, Homo sapiens
ggagtttggggagcatcaggatcaagatgcctgaaggatcctgaccctgctcttgctctcaggtattgcctgcctgtgctgcgatgcccggcgccaggtacggatgcaggcactgacctatctgcagcgagcactacttgtacatgatctgcaaaagctagatgccctggaatgggagtcctgttttaacaaggtgggacttcctactggtcttaagataaagttcaaatcctaagaaaaggaaagccaggcagcctgaagagcccctaatgtgagtcttcagcctgcatcataccttcccttcagctctatgcccatccagttcctggcttccttggggcaaggctgcctagctgaacctcatagggagacattgcacatttacccccacca

SEQ ID NO: 457478 - DNA, 6396 bp, Homo sapiens
tagttaccacgtcagtgagctgacagggaaggtacccggctctactgcccgtcccggacgactcatcctggcggactgtgcagtcccaccctgacttcagcctcaatttccaggaaacaggctccttctcttctcccatctgctaccagagccgggagagctgctcggagacgcctccggggtgcgggctggacatgagcagcggctgccggtcctgggactaggccccgccattttggatccgctgacaggtttgccaagatggtggataagaatatttacatcattcaaggggagattaacattgtggttggggccatcaaacgaaatgcccgatggagcacccatacaccactggatgaagaacgggatcctctgctgcatagtttcggtcatctaaaggaggttttaaacagtataacagaactctcagaaattgagcccaatgtattccttcgaccttttctggaagtgattcgctctgaagataccactggccctatcactggactggcactcacctctgtcaacaagttcctgtcctatgcactcatagatcccacccatgagggcacagcagagggcatggagaacatggcagatgctgtcacccatgctcgttttgtgggcacggatcctgccagtgatgaagttgtcctgatgaaaatccttcaggttctacggactctgctgctaaccccagtgggtgcccacctaaccaatgaatctgtgtgtgagattatgcagtcttgcttccggatctgctttgaaatgaggctcagtgagttattgagaaaatccgcagagcacactctcgtagacatggtgcagctgctcttcacaaggttacctcagtttaaagaagaacccaagaactatgtggggaccaacatgaagaagctgaaaatgagagccggaggcatgagtgattcatccaaatggaagaaacagaagagatcccctcggcccccacgccatatgaccaaagtcacaccaggttcagagctgcccactcccaatggaaccaccttatcatctaacctcactggtggcatgcccttcattgatgtgcccactcccatctcctctgcaagttcagaagctgcctcagcagtggtcagtccctctacagacagtggcctggaattctcctcccaaaccacttccaaggaagaccttactgatctagagcaacctggctctccagggtacagcacagctacagagcctggaagcagtgagctaggtgttcccgagcagcctgacctccaggaagggacccatgtggaaaagtcccagtcagcatctgtggagtccatccctgaagtgttagaggagtgcacgtcccctgccgaccactctgactctgcctctgtccatgacatggattacgtcaatccccggggcgtgcgctttacacagtcctcccagaaagaaggcacagctttggtcccctatggtcttccctgcatccgcgagctcttccgcttcctcatctccctcaccaatccacacgaccgccataactcagaggttatgattcacatgggactgcatttgctgacagtggcccttgagtcagcccctgtagcccagtgccagaccctcttgggcctcatcaaggatgagatgtgccgtcacttattccagctactcagcatagagcgactaaacctttatgctgcttccctgcgagtatgcttcctactgtttgagagcatgcgagagcacctcaagttccaaatggagatgtacatcaaaaagcttatggagatcatcactgtggagaaccccaagatgccttatgagatgaaggagatggcactggaggccattgtgcagctctggcgcatccccagctttgtcacagagctctacatcaactatgattgtgactactactgttccaacctctttgaggaactcacaaagctgctgtccaagaatgccttccctgtgtctggtcaactctatacaacacacctactatctcttgatgccctattgacagtgattgacagcaccgaggcccactgccaggctaaagtcctcaacagcctcacccagcaagagaagaaggagacagccagaccaagctgtgagatagtagatggcacccgagaagctagcaatactgagagaactgccagcgatgggaaagctgtaggcatggcctcagacatcccaggcctgcatctgccaggtggagggcggctgccaccagaacatgggaaatcaggatgcagtgatctggaggaagctgttgactctggggctgacaaaaagtttgcccggaagccaccccgattttcctgtctcctgccagatccacgggaactaattgaaattaaaaacaaaaagaagctgctaatcactggcacagagcagttcaatcagaaaccaaagaaggggattcagtttctgcaagagaaaggcctcctcaccatcccaatggacaacacagaggttgctcagtggctccgagagaaccctcggctggacaagaagatgattggagagtttgtgagtgaccgcaaaaacattgacctgttggagagctttgtgagcaccttcagttttcagggtctgcgactggacgaagccctccgcctctacctggaagccttccgtttgcctggggaagcaccagtcatccagaggttgctggaggcattcacagagcgttggatgaattgtaatggctccccatttgccaatagcgatgcctgcttttccctggcctatgctgtcatcatgcttaatactgaccagcacaaccacaatgttcgtaaacagaatgcacccatgaccctggaggagtttcgcaaaaatctgaaaggtgtgaatggaggcaaggactttgagcaagacatcctggaggacatgtaccatgccatcaagaatgaggaaattgtaatgcctgaggagcagacaggcttggttcgggagaactatgtgtggaatgtgctgcttcatcgaggtgccacccctgagggcatattcctgcgtgtgcctactgccagctatgatcttgacctcttcaccatgacctggggccccactattgctgctctctcttatgtctttgacaaaagccttgaggagacaatcatccagaaagccatctcaggcttcaggaagtgcgccatgatctccgcccactatggcctcagcgatgtgtttgacaatctcatcatctctctatgcaaattcacagctctcagcagtgagtctattgagaacctgcccagtgtatttggaagcaaccctaaagcccatattgcagccaagacagtattccatttggcccatcgtcatggtgacatcctgcgggagggctggaagaatatcatggaggccatgctgcagctcttccgagcccaactactgcccaaggctatgatagaggtagaagatttcgtggatcccaatggcaagatctctctacagcgggaagagacaccatcaaaccgaggagagtcaacagtgctgagctttgtgagctggctaacactgagtggtcctgagcagtctagtgttcggggcccatccactgaaaaccaagaggccaagagagtggccttagagtgtataaagcaatgtgacccagaaaaaatgatcacagaaagcaagttcctccagctggagtcactacaggagctcatgaaggctctggtctcagtgacaccagatgaagagacatatgatgaggaagatgctgctttctgcctagagatgctgctaaggattgtgttggagaacagggatcgtgtgggctgtgtgtggcagactgttcgagaccatctataccacctctgtgttcaggcacaagatttctgcttccttgtggagcgggcagtggtggggttgctacgcctggccattcggcttctccggagagaagagatcagtgctcaggtgctgctctccctgcgcattttgctactgatgaagcccagtgtgctatcccgagtcagccaccaggttgcgtatgggctccatgaactcctgaagaccaatgcagccaacatccactcaggtgatgactgggccacactcttcacactgctggagtgcatcggctcaggtgtgaagcctccagctgctctgcaggccacagccagggcagatgcacctgatgccggggcccagtcagatagtgagctcccatcctaccatcagaatgacgtgagcctggatcgagggtacacttccgactcagaggtctacactgaccatggcaggccgggcaagatacaccgatcagccacagatgccgatgtggtcaacagtggttggttagtggttgggaaggatgacgttgataactccaagccagggcccagccgcccaggcccttcacccctgatcaatcaatacagcctaacagtgggactggatttggggccacacgacactaagtctctgcttaagtgtgtggaatcgctgtccttcatcgtgcgtgatgctgcccacatcacacctgacaactttgagctctgcgtcaagactctccggatctttgtggaggccagtctgaatggcggatgcaagtcccaggagaaacgtggcaagagtcacaaatatgacagcaaagggaaccgcttcaagaagaaatccaaagagggatcaatgcttcgccggcctcgaacctccagccaacatgcctctcggggcgggcagagtgatgatgatgaggacgaaggcgtgcctgccagctaccatacggtgtctttacagtatcaggttgctagacctgatgcacaccctgcacacgcgggcagcctctatctacagctcatgggcggaggagcaacgccacctggagacaggtggccagaagattgaagctgattctcgcaccctctgggcccactgctggtgccctttactgcagggtattgcctgcctgtgctgcgatgcccggcgccaggtacggatgcaggcactgacctatctgcagcgagcactacttgtacatgatctgcaaaagctagatgccctggaatgggagtcctgttttaacaaggtgctgtttcctctacttaccaagctcttggagaacatcagccctgcagatgtgggtgggatggaggagacccggatgagggcttccacattgctctctaaggtcttcctgcagcacctgtctccactgctgtcactctctacctttgcggccctctggctcaccatcttggacttcatggacaagtacatgcacgcaggctccagcgacttactgtcagaggcgatccctgagtctctgaagaacatgcttctggtgatggacacagcggagattttccacagtgcagatgcacggggaggcggcccctcggccctctgggagatcacctgggaacgcattgactgttttctccctcacctacgagatgaactcttcaagcagaccgtcatccaggaccccatgcccatggagcctcaaggccaaaagcctctcgcctcagcccacctgacttccgctgctggcgacactaggacacctggccatccaccgcccccagagattccatctgagctgggggcctgtgactttgagaagcccgagagcccccgagccgccagcagcagctccccaggatcaccagtggcctcaagccccagcaggctgagccccacccccgacgggcctccacccttggctcagcccccactgatcctgcagcccttggcctccccactgcaggtgggcgtgccacctatgactctgcccatcatcctcaaccctgcgctcatcgaggccacctcaccagtgcccctcctggccacaccccgccccacagatcccatacccacctctgaggtcaactaaggcaggtcactcagagatcaggaccagtgcttcccaccaggctttccttgaccccacttctggctgtcctgcgggccacaagctcttcaggccaagtcagagctgctgttgctgccacttggatggggacctgaaaaagagaatgttgatagccccagctaagacccccaatcagctgtgggacctttttcctcctctgcgctccattcctgggggttcagcctgagagtgaactcagctgtcatctgcagcctctgcctccagcccggcagctctggggaggcatccgtgtgccggccctgcagtgcctgcccacggtcaggcattgaaaactaagcccaaccactctgcactttgtttcccactcccattagccctgggccacctcctccagttcttcctcttttactaattagttggtcagtttggagagttgactggcaccatggagggtaggcaggtgggggctgggtgggggactgcccacaggagcatgtacatatggaaaaacagaacaacagtggactttttatgatataataaatgtcttagtaccagca

SEQ ID NO: 457479 - DNA, 5504 bp, Homo sapiens
tgtgaatcataactcgagttatggcggtcgtgtggatggtgagggagatgaggaagcggaagagatcccctcggcccccacgccatatgaccaaagtcacaccaggttcagagctgcccactcccaatggaaccaccttatcatctaacctcactggtggcatgcccttcattgatgtgcccactcccatctcctctgcaagttcagaagctgcctcagcagtggtcagtccctctacagacagtggcctggaattctcctcccaaaccacttccaaggaagaccttactgatctagagcaacctggctctccagggtacagcacagctacagagcctggaagcagtgagctaggtgttcccgagcagcctgacctccaggaagggacccatgtggaaaagtcccagtcagcatctgtggagtccatccctgaagtgttagaggagtgcacgtcccctgccgaccactctgactctgcctctgtccatgacatggattacgtcaatccccggggcgtgcgctttacacagtcctcccagaaagaaggcacagctttggtcccctatggtcttccctgcatccgcgagctcttccgcttcctcatctccctcaccaatccacacgaccgccataactcagaggttatgattcacatgggactgcatttgctgacagtggcccttgagtcagcccctgtagcccagtgccagaccctcttgggcctcatcaaggatgagatgtgccgtcacttattccagctactcagcatagagcgactaaacctttatgctgcttccctgcgagtatgcttcctactgtttgagagcatgcgagagcacctcaagttccaaatggagatgtacatcaaaaagcttatggagatcatcactgtggagaaccccaagatgccttatgagatgaaggagatggcactggaggccattgtgcagctctggcgcatccccagctttgtcacagagctctacatcaactatgattgtgactactactgttccaacctctttgaggaactcacaaagctgctgtccaagaatgccttccctgtgtctggtcaactctatacaacacacctactatctcttgatgccctattgacagtgattgacagcaccgaggcccactgccaggctaaagtcctcaacagcctcacccagcaagagaagaaggagacagccagaccaagctgtgagatagtagatggcacccgagaagctagcaatactgagagaactgccagcgatgggaaagctgtaggcatggcctcagacatcccaggcctgcatctgccaggtggagggcggctgccaccagaacatgggaaatcaggatgcagtgatctggaggaagctgttgactctggggctgacaaaaagtttgcccggaagccaccccgattttcctgtctcctgccagatccacgggaactaattgaaattaaaaacaaaaagaagctgctaatcactggcacagagcagttcaatcagaaaccaaagaaggggattcagtttctgcaagagaaaggcctcctcaccatcccaatggacaacacagaggttgctcagtggctccgagagaaccctcggctggacaagaagatgattggagagtttgtgagtgaccgcaaaaacattgacctgttggagagctttgtgagcaccttcagttttcagggtctgcgactggacgaagccctccgcctctacctggaagccttccgtttgcctggggaagcaccagtcatccagaggttgctggaggcattcacagagcgttggatgaattgtaatggctccccatttgccaatagcgatgcctgcttttccctggcctatgctgtcatcatgcttaatactgaccagcacaaccacaatgttcgtaaacagaatgcacccatgaccctggaggagtttcgcaaaaatctgaaaggtgtgaatggaggcaaggactttgagcaagacatcctggaggacatgtaccatgccatcaagaatgaggaaattgtaatgcctgaggagcagacaggcttggttcgggagaactatgtgtggaatgtgctgcttcatcgaggtgccacccctgagggcatattcctgcgtgtgcctactgccagctatgatcttgacctcttcaccatgacctggggccccactattgctgctctctcttatgtctttgacaaaagccttgaggagacaatcatccagaaagccatctcaggcttcaggaagtgcgccatgatctccgcccactatggcctcagcgatgtgtttgacaatctcatcatctctctatgcaaattcacagctctcagcagtgagtctattgagaacctgcccagtgtatttggaagcaaccctaaagcccatattgcagccaagacagtattccatttggcccatcgtcatggtgacatcctgcgggagggctggaagaatatcatggaggccatgctgcagctcttccgagcccaactactgcccaaggctatgatagaggtagaagatttcgtggatcccaatggcaagatctctctacagcgggaagagacaccatcaaaccgaggagagtcaacagtgctgagctttgtgagctggctaacactgagtggtcctgagcagtctagtgttcggggcccatccactgaaaaccaagaggccaagagagtggccttagagtgtataaagcaatgtgacccagaaaaaatgatcacagaaagcaagttcctccagctggagtcactacaggagctcatgaaggctctggtctcagtgacaccagatgaagagacatatgatgaggaagatgctgctttctgcctagagatgctgctaaggattgtgttggagaacagggatcgtgtgggctgtgtgtggcagactgttcgagaccatctataccacctctgtgttcaggcacaagatttctgcttccttgtggagcgggcagtggtggggttgctacgcctggccattcggcttctccggagagaagagatcagtgctcaggtgctgctctccctgcgcattttgctactgatgaagcccagtgtgctatcccgagtcagccaccaggttgcgtatgggctccatgaactcctgaagaccaatgcagccaacatccactcaggtgatgactgggccacactcttcacactgctggagtgcatcggctcaggtgtgaagcctccagctgctctgcaggccacagccagggcagatgcacctgatgccggggcccagtcagatagtgagctcccatcctaccatcagaatgacgtgagcctggatcgagggtacacttccgactcagaggtctacactgaccatggcaggccgggcaagatacaccgatcagccacagatgccgatgtggtcaacagtggttggttagtggttgggaaggatgacgttgataactccaagccagggcccagccgcccaggcccttcacccctgatcaatcaatacagcctaacagtgggactggatttggggccacacgacactaagtctctgcttaagtgtgtggaatcgctgtccttcatcgtgcgtgatgctgcccacatcacacctgacaactttgagctctgcgtcaagactctccggatctttgtggaggccagtctgaatggcggatgcaagtcccaggagaaacgtggcaagagtcacaaatatgacagcaaagggaaccgcttcaagaagaaatccaaagagggatcaatgcttcgccggcctcgaacctccagccaacatgcctctcggggcgggcagagtgatgatgatgaggacgaaggcgtgcctgccagctaccatacggtgtctttacagtatcaggttgctagacctgatgcacaccctgcacacgcgggcagcctctatctacagctcatgggcggaggagcaacgccacctggagacaggtggccagaagattgaagctgattctcgcaccctctgggcccactgctggtgccctttactgcagggtattgcctgcctgtgctgcgatgcccggcgccaggtacggatgcaggcactgacctatctgcagcgagcactacttgtacatgatctgcaaaagctagatgccctggaatgggagtcctgttttaacaaggtgctgtttcctctacttaccaagctcttggagaacatcagccctgcagatgtgggtgggatggaggagacccggatgagggcttccacattgctctctaaggtcttcctgcagcacctgtctccactgctgtcactctctacctttgcggccctctggctcaccatcttggacttcatggacaagtacatgcacgcaggctccagcgacttactgtcagaggcgatccctgagtctctgaagaacatgcttctggtgatggacacagcggagattttccacagtgcagatgcacggggaggcggcccctcggccctctgggagatcacctgggaacgcattgactgttttctccctcacctacgagatgaactcttcaagcagaccgtcatccaggaccccatgcccatggagcctcaaggccaaaagcctctcgcctcagcccacctgacttccgctgctggcgacactaggacacctggccatccaccgcccccagagattccatctgagctgggggcctgtgactttgagaagcccgagagcccccgagccgccagcagcagctccccaggatcaccagtggcctcaagccccagcaggctgagccccacccccgacgggcctccacccttggctcagcccccactgatcctgcagcccttggcctccccactgcaggtgggcgtgccacctatgactctgcccatcatcctcaaccctgcgctcatcgaggccacctcaccagtgcccctcctggccacaccccgccccacagatcccatacccacctctgaggtcaactaaggcaggtcactcagagatcaggaccagtgcttcccaccaggctttccttgaccccacttctggctgtcctgcgggccacaagctcttcaggccaagtcagagctgctgttgctgccacttggatggggacctgaaaaagagaatgttgatagccccagctaagacccccaatcagctgtgggacctttttcctcctctgcgctccattcctgggggttcagcctgagagtgaactcagctgtcatctgcagcctctgcctccagcccggcagctctggggaggcatccgtgtgccggccctgcagtgcctgcccacggtcaggcattgaaaactaagcccaaccactctgcactttgtttcccactcccattagccctgggccacctcctccagttcttcctcttttactaattagttggtcagtttggagagttgactggcaccatggagggtaggcaggtgggggctgggtgggggactgcccacaggagcatgtacatatggaaaaacagaacaacagtggactttttatgatataataaatgtcttagtaccagca

SEQ ID NO: 457480 - DNA, 5012 bp, Homo sapiens
attctttgtgctagaggaaaagttttccaagtcccctcccatcccagaaagaaggcacagctttggtcccctatggtcttccctgcatccgcgagctcttccgcttcctcatctccctcaccaatccacacgaccgccataactcagaggttatgattcacatgggactgcatttgctgacagtggcccttgagtcagcccctgtagcccagtgccagaccctcttgggcctcatcaaggatgagatgtgccgtcacttattccagctactcagcatagagcgactaaacctttatgctgcttccctgcgagtatgcttcctactgtttgagagcatgcgagagcacctcaagttccaaatggagatgtacatcaaaaagcttatggagatcatcactgtggagaaccccaagatgccttatgagatgaaggagatggcactggaggccattgtgcagctctggcgcatccccagctttgtcacagagctctacatcaactatgattgtgactactactgttccaacctctttgaggaactcacaaagctgctgtccaagaatgccttccctgtgtctggtcaactctatacaacacacctactatctcttgatgccctattgacagtgattgacagcaccgaggcccactgccaggctaaagtcctcaacagcctcacccagcaagagaagaaggagacagccagaccaagctgtgagatagtagatggcacccgagaagctagcaatactgagagaactgccagcgatgggaaagctgtaggcatggcctcagacatcccaggcctgcatctgccaggtggagggcggctgccaccagaacatgggaaatcaggatgcagtgatctggaggaagctgttgactctggggctgacaaaaagtttgcccggaagccaccccgattttcctgtctcctgccagatccacgggaactaattgaaattaaaaacaaaaagaagctgctaatcactggcacagagcagttcaatcagaaaccaaagaaggggattcagtttctgcaagagaaaggcctcctcaccatcccaatggacaacacagaggttgctcagtggctccgagagaaccctcggctggacaagaagatgattggagagtttgtgagtgaccgcaaaaacattgacctgttggagagctttgtgagcaccttcagttttcagggtctgcgactggacgaagccctccgcctctacctggaagccttccgtttgcctggggaagcaccagtcatccagaggttgctggaggcattcacagagcgttggatgaattgtaatggctccccatttgccaatagcgatgcctgcttttccctggcctatgctgtcatcatgcttaatactgaccagcacaaccacaatgttcgtaaacagaatgcacccatgaccctggaggagtttcgcaaaaatctgaaaggtgtgaatggaggcaaggactttgagcaagacatcctggaggacatgtaccatgccatcaagaatgaggaaattgtaatgcctgaggagcagacaggcttggttcgggagaactatgtgtggaatgtgctgcttcatcgaggtgccacccctgagggcatattcctgcgtgtgcctactgccagctatgatcttgacctcttcaccatgacctggggccccactattgctgctctctcttatgtctttgacaaaagccttgaggagacaatcatccagaaagccatctcaggcttcaggaagtgcgccatgatctccgcccactatggcctcagcgatgtgtttgacaatctcatcatctctctatgcaaattcacagctctcagcagtgagtctattgagaacctgcccagtgtatttggaagcaaccctaaagcccatattgcagccaagacagtattccatttggcccatcgtcatggtgacatcctgcgggagggctggaagaatatcatggaggccatgctgcagctcttccgagcccaactactgcccaaggctatgatagaggtagaagatttcgtggatcccaatggcaagatctctctacagcgggaagagacaccatcaaaccgaggagagtcaacagtgctgagctttgtgagctggctaacactgagtggtcctgagcagtctagtgttcggggcccatccactgaaaaccaagaggccaagagagtggccttagagtgtataaagcaatgtgacccagaaaaaatgatcacagaaagcaagttcctccagctggagtcactacaggagctcatgaaggctctggtctcagtgacaccagatgaagagacatatgatgaggaagatgctgctttctgcctagagatgctgctaaggattgtgttggagaacagggatcgtgtgggctgtgtgtggcagactgttcgagaccatctataccacctctgtgttcaggcacaagatttctgcttccttgtggagcgggcagtggtggggttgctacgcctggccattcggcttctccggagagaagagatcagtgctcaggtgctgctctccctgcgcattttgctactgatgaagcccagtgtgctatcccgagtcagccaccaggttgcgtatgggctccatgaactcctgaagaccaatgcagccaacatccactcaggtgatgactgggccacactcttcacactgctggagtgcatcggctcaggtgtgaagcctccagctgctctgcaggccacagccagggcagatgcacctgatgccggggcccagtcagatagtgagctcccatcctaccatcagaatgacgtgagcctggatcgagggtacacttccgactcagaggtctacactgaccatggcaggccgggcaagatacaccgatcagccacagatgccgatgtggtcaacagtggttggttagtggttgggaaggatgacgttgataactccaagccagggcccagccgcccaggcccttcacccctgatcaatcaatacagcctaacagtgggactggatttggggccacacgacactaagtctctgcttaagtgtgtggaatcgctgtccttcatcgtgcgtgatgctgcccacatcacacctgacaactttgagctctgcgtcaagactctccggatctttgtggaggccagtctgaatggcggatgcaagtcccaggagaaacgtggcaagagtcacaaatatgacagcaaagggaaccgcttcaagaagaaatccaaagagggatcaatgcttcgccggcctcgaacctccagccaacatgcctctcggggcgggcagagtgatgatgatgaggacgaaggcgtgcctgccagctaccatacggtgtctttacagtatcaggttgctagacctgatgcacaccctgcacacgcgggcagcctctatctacagctcatgggcggaggagcaacgccacctggagacaggtggccagaagattgaagctgattctcgcaccctctgggcccactgctggtgccctttactgcagggtattgcctgcctgtgctgcgatgcccggcgccaggtacggatgcaggcactgacctatctgcagcgagcactacttgtacatgatctgcaaaagctagatgccctggaatgggagtcctgttttaacaaggtgctgtttcctctacttaccaagctcttggagaacatcagccctgcagatgtgggtgggatggaggagacccggatgagggcttccacattgctctctaaggtcttcctgcagcacctgtctccactgctgtcactctctacctttgcggccctctggctcaccatcttggacttcatggacaagtacatgcacgcaggctccagcgacttactgtcagaggcgatccctgagtctctgaagaacatgcttctggtgatggacacagcggagattttccacagtgcagatgcacggggaggcggcccctcggccctctgggagatcacctgggaacgcattgactgttttctccctcacctacgagatgaactcttcaagcagaccgtcatccaggaccccatgcccatggagcctcaaggccaaaagcctctcgcctcagcccacctgacttccgctgctggcgacactaggacacctggccatccaccgcccccagagattccatctgagctgggggcctgtgactttgagaagcccgagagcccccgagccgccagcagcagctccccaggatcaccagtggcctcaagccccagcaggctgagccccacccccgacgggcctccacccttggctcagcccccactgatcctgcagcccttggcctccccactgcaggtgggcgtgccacctatgactctgcccatcatcctcaaccctgcgctcatcgaggccacctcaccagtgcccctcctggccacaccccgccccacagatcccatacccacctctgaggtcaactaaggcaggtcactcagagatcaggaccagtgcttcccaccaggctttccttgaccccacttctggctgtcctgcgggccacaagctcttcaggccaagtcagagctgctgttgctgccacttggatggggacctgaaaaagagaatgttgatagccccagctaagacccccaatcagctgtgggacctttttcctcctctgcgctccattcctgggggttcagcctgagagtgaactcagctgtcatctgcagcctctgcctccagcccggcagctctggggaggcatccgtgtgccggccctgcagtgcctgcccacggtcaggcattgaaaactaagcccaaccactctgcactttgtttcccactcccattagccctgggccacctcctccagttcttcctcttttactaattagttggtcagtttggagagttgactggcaccatggagggtaggcaggtgggggctgggtgggggactgcccacaggagcatgtacatatggaaaaacagaacaacagtggactttttatgatataataaatgtcttagtaccagca

SEQ ID NO: 457481 - DNA, 2863 bp, Homo sapiens
atctagaggatcctgggaggcaggaactgaaaacaagatgggagagagtggcttagagtgtatacaatgtgacccagaaaaaatgatcacagaaagcaagttcctccagctggagtcactacaggagctcatgaaggctctggtctcagtgacaccagatgaagagacatatgatgaggaagatgctgctttctgcctagagatgctgctaaggattgtgttggagaacagggatcgtgtgggctgtgtgtggcagactgttcgagaccatctataccacctctgtgttcaggcacaagatttctgcttccttgtggagcgggcagtggtggggttgctacgcctggccattcggcttctccggagagaagagatcagtgctcaggtgctgctctccctgcgcattttgctactgatgaagcccagtgtgctatcccgagtcagccaccaggttgcgtatgggctccatgaactcctgaagaccaatgcagccaacatccactcaggtgatgactgggccacactcttcacactgctggagtgcatcggctcaggtgtgaagcctccagctgctctgcaggccacagccagggcagatgcacctgatgccggggcccagtcagatagtgagctcccatcctaccatcagaatgacgtgagcctggatcgagggtacacttccgactcagaggtctacactgaccatggcaggccgggcaagatacaccgatcagccacagatgccgatgtggtcaacagtggttggttagtggttgggaaggatgacgttgataactccaagccagggcccagccgcccaggcccttcacccctgatcaatcaatacagcctaacagtgggactggatttggggccacacgacactaagtctctgcttaagtgtgtggaatcgctgtccttcatcgtgcgtgatgctgcccacatcacacctgacaactttgagctctgcgtcaagactctccggatctttgtggaggccagtctgaatggcggatgcaagtcccaggagaaacgtggcaagagtcacaaatatgacagcaaagggaaccgcttcaagaagaaatccaaagagggatcaatgcttcgccggcctcgaacctccagccaacatgcctctcggggcgggcagagtgatgatgatgaggacgaaggcgtgcctgccagctaccatacggtgtctttacagtatcaggttgctagacctgatgcacaccctgcacacgcgggcagcctctatctacagctcatgggcggaggagcaacgccacctggagacaggtggccagaagattgaagctgattctcgcaccctctgggcccactgctggtgccctttactgcagggtattgcctgcctgtgctgcgatgcccggcgccaggtacggatgcaggcactgacctatctgcagcgagcactacttgtacatgatctgcaaaagctagatgccctggaatgggagtcctgttttaacaaggtgctgtttcctctacttaccaagctcttggagaacatcagccctgcagatgtgggtgggatggaggagacccggatgagggcttccacattgctctctaaggtcttcctgcagcacctgtctccactgctgtcactctctacctttgcggccctctggctcaccatcttggacttcatggacaagtacatgcacgcaggctccagcgacttactgtcagaggcgatccctgagtctctgaagaacatgcttctggtgatggacacagcggagattttccacagtgcagatgcacggggaggcggcccctcggccctctgggagatcacctgggaacgcattgactgttttctccctcacctacgagatgaactcttcaagcagaccgtcatccaggaccccatgcccatggagcctcaaggccaaaagcctctcgcctcagcccacctgacttccgctgctggcgacactaggacacctggccatccaccgcccccagagattccatctgagctgggggcctgtgactttgagaagcccgagagcccccgagccgccagcagcagctccccaggatcaccagtggcctcaagccccagcaggctgagccccacccccgacgggcctccacccttggctcagcccccactgatcctgcagcccttggcctccccactgcaggtgggcgtgccacctatgactctgcccatcatcctcaaccctgcgctcatcgaggccacctcaccagtgcccctcctggccacaccccgccccacagatcccatacccacctctgaggtcaactaaggcaggtcactcagagatcaggaccagtgcttcccaccaggctttccttgaccccacttctggctgtcctgcgggccacaagctcttcaggccaagtcagagctgctgttgctgccacttggatggggacctgaaaaagagaatgttgatagccccagctaagacccccaatcagctgtgggacctttttcctcctctgcgctccattcctgggggttcagcctgagagtgaactcagctgtcatctgcagcctctgcctccagcccggcagctctggggaggcatccgtgtgccggccctgcagtgcctgcccacggtcaggcattgaaaactaagcccaaccactctgcactttgtttcccactcccattagccctgggccacctcctccagttcttcctcttttactaattagttggtcagtttggagagttgactggcaccatggagggtaggcaggtgggggctgggtgggggactgcccacaggagcatgtacatatggaaaaacagaacaacagtggactttttatgatataataaatgtcttagtaccagca

SEQ ID NO: 457482 - DNA, 6690 bp, Homo sapiens
tagttaccacgtcagtgagctgacagggaaggtacccggctctactgcccgtcccggacgactcatcctggcggactgtgcagtcccaccctgacttcagcctcaatttccaggaaacaggctccttctcttctcccatctgctaccagagccgggagagctgctcggagacgcctccggggtgcgggctggacatgagcagcggctgccggtcctgggactaggccccgccattttggatccgctgacaggtttgccaagatggtggataagaatatttacatcattcaaggggagattaacattgtggttggggccatcaaacgaaatgcccgatggagcacccatacaccactggatgaagaacgggatcctctgctgcatagtttcggtcatctaaaggaggttttaaacagtataacagaactctcagaaattgagcccaatgtattccttcgaccttttctggaagtgattcgctctgaagataccactggccctatcactggactggcactcacctctgtcaacaagttcctgtcctatgcactcatagatcccacccatgagggcacagcagagggcatggagaacatggcagatgctgtcacccatgctcgttttgtgggcacggatcctgccagtgatgaagttgtcctgatgaaaatccttcaggttctacggactctgctgctaaccccagtgggtgcccacctaaccaatgaatctgtgtgtgagattatgcagtcttgcttccggatctgctttgaaatgaggctcagtgagttattgagaaaatccgcagagcacactctcgtagacatggtgcagctgctcttcacaaggttacctcagtttaaagaagaacccaagaactatgtggggaccaacatgaagaagctgaaaatgagagccggaggcatgagtgattcatccaaatggaagaaacagaagagatcccctcggcccccacgccatatgaccaaagtcacaccaggttcagagctgcccactcccaatggaaccaccttatcatctaacctcactggtggcatgcccttcattgatgtgcccactcccatctcctctgcaagttcagaagctgcctcagcagtggtcagtccctctacagacagtggcctggaattctcctcccaaaccacttccaaggaagaccttactgatctagagcaacctggctctccagggtacagcacagctacagagcctggaagcagtgagctaggtgttcccgagcagcctgacctccaggaagggacccatgtggaaaagtcccagtcagcatctgtggagtccatccctgaagtgttagaggagtgcacgtcccctgccgaccactctgactctgcctctgtccatgacatggattacgtcaatccccggggcgtgcgctttacacagtcctcccagaaagaaggcacagctttggtcccctatggtcttccctgcatccgcgagctcttccgcttcctcatctccctcaccaatccacacgaccgccataactcagaggttatgattcacatgggactgcatttgctgacagtggcccttgagtcagcccctgtagcccagtgccagaccctcttgggcctcatcaaggatgagatgtgccgtcacttattccagctactcagcatagagcgactaaacctttatgctgcttccctgcgagtatgcttcctactgtttgagagcatgcgagagcacctcaagttccaaatggagatgtacatcaaaaagcttatggagatcatcactgtggagaaccccaagatgccttatgagatgaaggagatggcactggaggccattgtgcagctctggcgcatccccagctttgtcacagagctctacatcaactatgattgtgactactactgttccaacctctttgaggaactcacaaagctgctgtccaagaatgccttccctgtgtctggtcaactctatacaacacacctactatctcttgatgccctattgacagtgattgacagcaccgaggcccactgccaggctaaagtcctcaacagcctcacccagcaagagaagaaggagacagccagaccaagctgtgagatagtagatggcacccgagaagctagcaatactgagagaactgccagcgatgggaaagctgtaggcatggcctcagacatcccaggcctgcatctgccaggtggagggcggctgccaccagaacatgggaaatcaggatgcagtgatctggaggaagctgttgactctggggctgacaaaaagtttgcccggaagccaccccgattttcctgtctcctgccagatccacgggaactaattgaaattaaaaacaaaaagaagctgctaatcactggcacagagcagttcaatcagaaaccaaagaaggggattcagtttctgcaagagaaaggcctcctcaccatcccaatggacaacacagaggttgctcagtggctccgagagaaccctcggctggacaagaagatgattggagagtttgtgagtgaccgcaaaaacattgacctgttggagagctttgtgagcaccttcagttttcagggtctgcgactggacgaagccctccgcctctacctggaagccttccgtttgcctggggaagcaccagtcatccagaggttgctggaggcattcacagagcgttggatgaattgtaatggctccccatttgccaatagcgatgcctgcttttccctggcctatgctgtcatcatgcttaatactgaccagcacaaccacaatgttcgtaaacagaatgcacccatgaccctggaggagtttcgcaaaaatctgaaaggtgtgaatggaggcaaggactttgagcaagacatcctggaggacatgtaccatgccatcaagaatgaggaaattgtaatgcctgaggagcagacaggcttggttcgggagaactatgtgtggaatgtgctgcttcatcgaggtgccacccctgagggcatattcctgcgtgtgcctactgccagctatgatcttgacctcttcaccatgacctggggccccactattgctgctctctcttatgtctttgacaaaagccttgaggagacaatcatccagaaagccatctcaggcttcaggaagtgcgccatgatctccgcccactatggcctcagcgatgtgtttgacaatctcatcatctctctatgcaaattcacagctctcagcagtgagtctattgagaacctgcccagtgtatttggaagcaaccctaaagcccatattgcagccaagacagtattccatttggcccatcgtcatggtgacatcctgcgggagggctggaagaatatcatggaggccatgctgcagctcttccgagcccaactactgcccaaggctatgatagaggtagaagatttcgtggatcccaatggcaagatctctctacagcgggaagagacaccatcaaaccgaggagagtcaacagtgctgagctttgtgagctggctaacactgagtggtcctgagcagtctagtgttcggggcccatccactgaaaaccaagaggccaagagagtggccttagagtgtataaagcaatgtgacccagaaaaaatgatcacagaaagcaagttcctccagctggagtcactacaggagctcatgaaggctctggtctcagtgacaccagatgaagagacatatgatgaggaagatgctgctttctgcctagagatgctgctaaggattgtgttggagaacagggatcgtgtgggctgtgtgtggcagactgttcgagaccatctataccacctctgtgttcaggcacaagatttctgcttccttgtggagcgggcagtggtggggttgctacgcctggccattcggcttctccggagagaagagatcagtgctcaggtgctgctctccctgcgcattttgctactgatgaagcccagtgtgctatcccgagtcagccaccaggttgcgtatgggctccatgaactcctgaagaccaatgcagccaacatccactcaggtgatgactgggccacactcttcacactgctggagtgcatcggctcaggtgtgaagcctccagctgctctgcaggccacagccagggcagatgcacctgatgccggggcccagtcagatagtgagctcccatcctaccatcagaatgacgtgagcctggatcgagggtacacttccgactcagaggtctacactgaccatggcaggccgggcaagatacaccgatcagccacagatgccgatgtggtcaacagtggttggttagtggttgggaaggatgacgttgataactccaagccagggcccagccgcccaggcccttcacccctgatcaatcaatacagcctaacagtgggactggatttggggccacacgacactaagtctctgcttaagtgtgtggaatcgctgtccttcatcgtgcgtgatgctgcccacatcacacctgacaactttgagctctgcgtcaagactctccggatctttgtggaggccagtctgaatggcggatgcaagtcccaggagaaacgtggcaagagtcacaaatatgacagcaaagggaaccgcttcaagaagaaatccaaagagggatcaatgcttcgccggcctcgaacctccagccaacatgcctctcggggcgggcagagtgatgatgatgaggacgaaggcgtgcctgccagctaccatacggtgtctttacagtatcaggttgctagacctgatgcacaccctgcacacgcgggcagcctctatctacagctcatgggcggaggagcaacgccacctggagacaggtggccagaagattgaagctgattctcgcaccctctgggcccactgctggtgccctttactgcagggtattgcctgcctgtgctgcgatgcccggcgccaggtacggatgcaggcactgacctatctgcagcgagcactacttgtacatgatctgcaaaagctagatgccctggaatgggagtcctgttttaacaaggtgctgtttcctctacttaccaagctcttggagaacatcagccctgcagatgtgggtgggatggaggagacccggatgagggcttccacattgctctctaaggtactgctcaccaccctatacccaccctctctcccatacctgccttttcccgaggagggaagccagggcttctggcaggacctagagatgcactgtaggtgctcacaaccccccagctatggacactaagcaggacctagggacctgagaggattctgaatcttaaatcagagattcctccatctctgatctaagattctcatgcaagataggacaggcttagctacccagcctcagagaggggtccagaggctcctacagtcccctcagctgaagggggctggtgggccataggtcttcctgcagcacctgtctccactgctgtcactctctacctttgcggccctctggctcaccatcttggacttcatggacaagtacatgcacgcaggctccagcgacttactgtcagaggcgatccctgagtctctgaagaacatgcttctggtgatggacacagcggagattttccacagtgcagatgcacggggaggcggcccctcggccctctgggagatcacctgggaacgcattgactgttttctccctcacctacgagatgaactcttcaagcagaccgtcatccaggaccccatgcccatggagcctcaaggccaaaagcctctcgcctcagcccacctgacttccgctgctggcgacactaggacacctggccatccaccgcccccagagattccatctgagctgggggcctgtgactttgagaagcccgagagcccccgagccgccagcagcagctccccaggatcaccagtggcctcaagccccagcaggctgagccccacccccgacgggcctccacccttggctcagcccccactgatcctgcagcccttggcctccccactgcaggtgggcgtgccacctatgactctgcccatcatcctcaaccctgcgctcatcgaggccacctcaccagtgcccctcctggccacaccccgccccacagatcccatacccacctctgaggtcaactaaggcaggtcactcagagatcaggaccagtgcttcccaccaggctttccttgaccccacttctggctgtcctgcgggccacaagctcttcaggccaagtcagagctgctgttgctgccacttggatggggacctgaaaaagagaatgttgatagccccagctaagacccccaatcagctgtgggacctttttcctcctctgcgctccattcctgggggttcagcctgagagtgaactcagctgtcatctgcagcctctgcctccagcccggcagctctggggaggcatccgtgtgccggccctgcagtgcctgcccacggtcaggcattgaaaactaagcccaaccactctgcactttgtttcccactcccattagccctgggccacctcctccagttcttcctcttttactaattagttggtcagtttggagagttgactggcaccatggagggtaggcaggtgggggctgggtgggggactgcccacaggagcatgtacatatggaaaaacagaacaacagtggactttttatgatataataaatgtcttagtaccagca

SEQ ID NO: 457483 - DNA, 6833 bp, Homo sapiens
tagttaccacgtcagtgagctgacagggaaggtacccggctctactgcccgtcccggacgactcatcctggcggactgtgcagtcccaccctgacttcagcctcaatttccaggaaacaggctccttctcttctcccatctgctaccagagccgggagagctgctcggagacgcctccggggtgcgggctggacatgagcagcggctgccggtcctgggactaggccccgccattttggatccgctgacaggtttgccaagatggtggataagaatatttacatcattcaaggggagattaacattgtggttggggccatcaaacgaaatgcccgatggagcacccatacaccactggatgaagaacgggatcctctgctgcatagtttcggtcatctaaaggaggttttaaacagtataacagaactctcagaaattgagcccaatgtattccttcgaccttttctggaagtgattcgctctgaagataccactggccctatcactggactggcactcacctctgtcaacaagttcctgtcctatgcactcatagatcccacccatgagggcacagcagagggcatggagaacatggcagatgctgtcacccatgctcgttttgtgggcacggatcctgccagtgatgaagttgtcctgatgaaaatccttcaggttctacggactctgctgctaaccccagtgggtgcccacctaaccaatgaatctgtgtgtgagattatgcagtcttgcttccggatctgctttgaaatgaggctcagtgagttattgagaaaatccgcagagcacactctcgtagacatggtgcagctgctcttcacaaggttacctcagtttaaagaagaacccaagaactatgtggggaccaacatgaagaagctgaaaatgagagccggaggcatgagtgattcatccaaatggaagaaacagaagagatcccctcggcccccacgccatatgaccaaagtcacaccaggttcagagctgcccactcccaatggaaccaccttatcatctaacctcactggtggcatgcccttcattgatgtgcccactcccatctcctctgcaagttcagaagctgcctcagcagtggtcagtccctctacagacagtggcctggaattctcctcccaaaccacttccaaggaagaccttactgatctagagcaacctggctctccagggtacagcacagctacagagcctggaagcagtgagctaggtgttcccgagcagcctgacctccaggaagggacccatgtggaaaagtcccagtcagcatctgtggagtccatccctgaagtgttagaggagtgcacgtcccctgccgaccactctgactctgcctctgtccatgacatggattacgtcaatccccggggcgtgcgctttacacagtcctcccagaaagaaggcacagctttggtcccctatggtcttccctgcatccgcgagctcttccgcttcctcatctccctcaccaatccacacgaccgccataactcagaggttatgattcacatgggactgcatttgctgacagtggcccttgagtcagcccctgtagcccagtgccagaccctcttgggcctcatcaaggatgagatgtgccgtcacttattccagctactcagcatagagcgactaaacctttatgctgcttccctgcgagtatgcttcctactgtttgagagcatgcgagagcacctcaagttccaaatggagatgtacatcaaaaagcttatggagatcatcactgtggagaaccccaagatgccttatgagatgaaggagatggcactggaggccattgtgcagctctggcgcatccccagctttgtcacagagctctacatcaactatgattgtgactactactgttccaacctctttgaggaactcacaaagctgctgtccaagaatgccttccctgtgtctggtcaactctatacaacacacctactatctcttgatgccctattgacagtgattgacagcaccgaggcccactgccaggctaaagtcctcaacagcctcacccagcaagagaagaaggagacagccagaccaagctgtgagatagtagatggcacccgagaagctagcaatactgagagaactgccagcgatgggaaagctgtaggcatggcctcagacatcccaggcctgcatctgccaggtggagggcggctgccaccagaacatgggaaatcaggatgcagtgatctggaggaagctgttgactctggggctgacaaaaagtttgcccggaagccaccccgattttcctgtctcctgccagatccacgggaactaattgaaattaaaaacaaaaagaagctgctaatcactggcacagagcagttcaatcagaaaccaaagaaggggattcagtttctgcaagagaaaggcctcctcaccatcccaatggacaacacagaggttgctcagtggctccgagagaaccctcggctggacaagaagatgattggagagtttgtgagtgaccgcaaaaacattgacctgttggagagctttgtgagcaccttcagttttcagggtctgcgactggacgaagccctccgcctctacctggaagccttccgtttgcctggggaagcaccagtcatccagaggttgctggaggcattcacagagcgttggatgaattgtaatggctccccatttgccaatagcgatgcctgcttttccctggcctatgctgtcatcatgcttaatactgaccagcacaaccacaatgttcgtaaacagaatgcacccatgaccctggaggagtttcgcaaaaatctgaaaggtgtgaatggaggcaaggactttgagcaagacatcctggaggacatgtaccatgccatcaagaatgaggaaattgtaatgcctgaggagcagacaggcttggttcgggagaactatgtgtggaatgtgctgcttcatcgaggtgccacccctgagggcatattcctgcgtgtgcctactgccagctatgatcttgacctcttcaccatgacctggggccccactattgctgctctctcttatgtctttgacaaaagccttgaggagacaatcatccagaaagccatctcaggcttcaggaagtgcgccatgatctccgcccactatggcctcagcgatgtgtttgacaatctcatcatctctctatgcaaattcacagctctcagcagtgagtctattgagaacctgcccagtgtatttggaagcaaccctaaagcccatattgcagccaagacagtattccatttggcccatcgtcatggtgacatcctgcgggagggctggaagaatatcatggaggccatgctgcagctcttccgagcccaactactgcccaaggctatgatagaggtagaagatttcgtggatcccaatggcaagatctctctacagcgggaagagacaccatcaaaccgaggagagtcaacagtgctgagctttgtgagctggctaacactgagtggtcctgagcagtctagtgttcggggcccatccactgaaaaccaagaggccaagagagtggccttagagtgtataaagcaatgtgacccagaaaaaatgatcacagaaagcaagttcctccagctggagtcactacaggagctcatgaaggctctggtctcagtgacaccagatgaagagacatatgatgaggaagatgctgctttctgcctagagatgctgctaaggattgtgttggagaacagggatcgtgtgggctgtgtgtggcagactgttcgagaccatctataccacctctgtgttcaggcacaagatttctgcttccttgtggagcgggcagtggtggggttgctacgcctggccattcggcttctccggagagaagagatcagtgctcaggtgctgctctccctgcgcattttgctactgatgaagcccagtgtgctatcccgagtcagccaccaggttgcgtatgggctccatgaactcctgaagaccaatgcagccaacatccactcaggtgatgactgggccacactcttcacactgctggagtgcatcggctcaggtgtgaagcctccagctgctctgcaggccacagccagggcagatgcacctgatgccggggcccagtcagatagtgagctcccatcctaccatcagaatgacgtgagcctggatcgagggtacacttccgactcagaggtctacactgaccatggcaggccgggcaagatacaccgatcagccacagatgccgatgtggtcaacagtggttggttagtggttgggaaggatgacgttgataactccaagccagggcccagccgcccaggcccttcacccctgatcaatcaatacagcctaacagtgggactggatttggggccacacgacactaagtctctgcttaagtgtgtggaatcgctgtccttcatcgtgcgtgatgctgcccacatcacacctgacaactttgagctctgcgtcaagactctccggatctttgtggaggccagtctgaatggcggatgcaagtcccaggagaaacgtggcaagagtcacaaatatgacagcaaagggaaccgcttcaagaagaaatccaaagagggatcaatgcttcgccggcctcgaacctccagccaacatgcctctcggggcgggcagagtgatgatgatgaggacgaaggcgtgcctgccagctaccatacggtgtctttacagtatcaggttgctagacctgatgcacaccctgcacacgcgggcagcctctatctacagctcatgggcggaggagcaacgccacctggagacaggtggccagaagattgaagctgattctcgcaccctctgggcccactgctggtgccctttactgcagggtattgcctgcctgtgctgcgatgcccggcgccaggtacggatgcaggcactgacctatctgcagcgagcactacttgtacatgatctgcaaaagctagatgccctggaatgggagtcctgttttaacaaggtgctgtttcctctacttaccaagctcttggagaacatcagccctgcagatgtgggtgggatggaggagacccggatgagggcttccacattgctctctaaggtactgctcaccaccctatacccaccctctctcccatacctgccttttcccgaggagggaagccagggcttctggcaggacctagagatgcactgtaggtgctcacaaccccccagctatggacactaagcaggacctagggacctgagaggattctgaatcttaaatcagagattcctccatctctgatctaagattctcatgcaagataggacaggcttagctacccagcctcagagaggggtccagaggctcctacagtcccctcagctgaagggggctggtgggccataggtcttcctgcagcacctgtctccactgctgtcactctctacctttgcggccctctggctcaccatcttggacttcatggacaagtacatgcacgcaggctccagcgacttactggtatgttctacctcagctctgctgcctgcctcctgtcccacctgttggaaggacttgccctttcccccttggtagctacctccctttaccatactcgccccatgccctctttcctattctcatggtcccactgccacctgcagtcagaggcgatccctgagtctctgaagaacatgcttctggtgatggacacagcggagattttccacagtgcagatgcacggggaggcggcccctcggccctctgggagatcacctgggaacgcattgactgttttctccctcacctacgagatgaactcttcaagcagaccgtcatccaggaccccatgcccatggagcctcaaggccaaaagcctctcgcctcagcccacctgacttccgctgctggcgacactaggacacctggccatccaccgcccccagagattccatctgagctgggggcctgtgactttgagaagcccgagagcccccgagccgccagcagcagctccccaggatcaccagtggcctcaagccccagcaggctgagccccacccccgacgggcctccacccttggctcagcccccactgatcctgcagcccttggcctccccactgcaggtgggcgtgccacctatgactctgcccatcatcctcaaccctgcgctcatcgaggccacctcaccagtgcccctcctggccacaccccgccccacagatcccatacccacctctgaggtcaactaaggcaggtcactcagagatcaggaccagtgcttcccaccaggctttccttgaccccacttctggctgtcctgcgggccacaagctcttcaggccaagtcagagctgctgttgctgccacttggatggggacctgaaaaagagaatgttgatagccccagctaagacccccaatcagctgtgggacctttttcctcctctgcgctccattcctgggggttcagcctgagagtgaactcagctgtcatctgcagcctctgcctccagcccggcagctctggggaggcatccgtgtgccggccctgcagtgcctgcccacggtcaggcattgaaaactaagcccaaccactctgcactttgtttcccactcccattagccctgggccacctcctccagttcttcctcttttactaattagttggtcagtttggagagttgactggcaccatggagggtaggcaggtgggggctgggtgggggactgcccacaggagcatgtacatatggaaaaacagaacaacagtggactttttatgatataataaatgtcttagtaccagca

SEQ ID NO: 457484 - DNA, 2063 bp, Homo sapiens
tacggctaggtacgaggcccggtgttaatcggccgaggaatcaatacagcctaacagtgggactggatttggggccacacgacactaagtctctgcttaagtgtgtggaatcgctgtccttcatcgtgcgtgatgctgcccacatcacacctgacaactttgagctctgcgtcaagactctccggatctttgtggaggccagtctgaatggcggatgcaagtcccaggagaaacgtggcaagagtcacaaatatgacagcaaagggaaccgcttcaagaagaaatccaaagagggatcaatgcttcgccggcctcgaacctccagccaacatgcctctcggggcgggcagagtgatgatgatgaggacgaaggcgtgcctgccagctaccatacggtgtctttacagtatcaggttgctagacctgatgcacaccctgcacacgcgggcagcctctatctacagctcatgggcggaggagcaacgccacctggagacaggtggccagaagattgaagctgattctcgcaccctctgggcccactgctggtgccctttactgcagggtattgcctgcctgtgctgcgatgcccggcgccaggtacggatgcaggcactgacctatctgcagcgagcactacttgtacatgatctgcaaaagctagatgccctggaatgggagtcctgttttaacaaggtgctgtttcctctacttaccaagctcttggagaacatcagccctgcagatgtgggtgggatggaggagacccggatgagggcttccacattgctctctaaggtcttcctgcagcacctgtctccactgctgtcactctctacctttgcggccctctggctcaccatcttggacttcatggacaagtacatgcacgcaggctccagcgacttactgtcagaggcgatccctgagtctctgaagaacatgcttctggtgatggacacagcggagattttccacagtgcagatgcacggggaggcggcccctcggccctctgggagatcacctgggaacgcattgactgttttctccctcacctacgagatgaactcttcaagcagaccgtcatccaggaccccatgcccatggagcctcaaggccaaaagcctctcgcctcagcccacctgacttccgctgctggcgacactaggacacctggccatccaccgcccccagagattccatctgagctgggggcctgtgactttgagaagcccgagagcccccgagccgccagcagcagctccccaggatcaccagtggcctcaagccccagcaggctgagccccacccccgacgggcctccacccttggctcagcccccactgatcctgcagcccttggcctccccactgcaggtgggcgtgccacctatgactctgcccatcatcctcaaccctgcgctcatcgaggccacctcaccagtgcccctcctggccacaccccgccccacagatcccatacccacctctgaggtcaactaaggcaggtcactcagagatcaggaccagtgcttcccaccaggctttccttgaccccacttctggctgtcctgcgggccacaagctcttcaggccaagtcagagctgctgttgctgccacttggatggggacctgaaaaagagaatgttgatagccccagctaagacccccaatcagctgtgggacctttttcctcctctgcgctccattcctgggggttcagcctgagagtgaactcagctgtcatctgcagcctctgcctccagcccggcagctctggggaggcatccgtgtgccggccctgcagtgcctgcccacggtcaggcattgaaaactaagcccaaccactctgcactttgtttcccactcccattagccctgggccacctcctccagttcttcctcttttactaattagttggtcagtttggagagttgactggcaccatggagggtaggcaggtgggggctgggtgggggactgcccacaggagcatgtacatatggaaaaacagaacaacagtggactttttatgatataataaatgtcttagtaccagca

SEQ ID NO: 457485 - DNA, 6190 bp, Homo sapiens
tagttaccacgtcagtgagctgacagggaaggtacccggctctactgcccgtcccggacgactcatcctggcggactgtgcagtcccaccctgacttcagcctcaatttccaggaaacaggctccttctcttctcccatctgctaccagagccgggagagctgctcggagacgcctccggggtgcgggctggacatgagcagcggctgccggtcctgggactaggccccgccattttggatccgctgacaggtttgccaagatggtggataagaatatttacatcattcaaggggagattaacattgtggttggggccatcaaacgaaatgcccgatggagcacccatacaccactggatgaagaacgggatcctctgctgcatagtttcggtcatctaaaggaggttttaaacagtataacagaactctcagaaattgagcccaatgtattccttcgaccttttctggaagtgattcgctctgaagataccactggccctatcactggactggcactcacctctgtcaacaagttcctgtcctatgcactcatagatcccacccatgagggcacagcagagggcatggagaacatggcagatgctgtcacccatgctcgttttgtgggcacggatcctgccagtgatgaagttgtcctgatgaaaatccttcaggttctacggactctgctgctaaccccagtgggtgcccacctaaccaatgaatctgtgtgtgagattatgcagtcttgcttccggatctgctttgaaatgaggctcagtgagttattgagaaaatccgcagagcacactctcgtagacatggtgcagctgctcttcacaaggttacctcagtttaaagaagaacccaagaactatgtggggaccaacatgaagaagctgaaaatgagagccggaggcatgagtgattcatccaaatggaagaaacagaagagatcccctcggcccccacgccatatgaccaaagtcacaccaggttcagagctgcccactcccaatggaaccaccttatcatctaacctcactggtggcatgcccttcattgatgtgcccactcccatctcctctgcaagttcagaagctgcctcagcagtggtcagtccctctacagacagtggcctggaattctcctcccaaaccacttccaaggaagaccttactgatctagagcaacctggctctccagggtacagcacagctacagagcctggaagcagtgagctaggtgttcccgagcagcctgacctccaggaagggacccatgtggaaaagtcccagtcagcatctgtggagtccatccctgaagtgttagaggagtgcacgtcccctgccgaccactctgactctgcctctgtccatgacatggattacgtcaatccccggggcgtgcgctttacacagtcctcccagaaagaaggcacagctttggtcccctatggtcttccctgcatccgcgagctcttccgcttcctcatctccctcaccaatccacacgaccgccataactcagaggttatgattcacatgggactgcatttgctgacagtggcccttgagtcagcccctgtagcccagtgccagaccctcttgggcctcatcaaggatgagatgtgccgtcacttattccagctactcagcatagagcgactaaacctttatgctgcttccctgcgagtatgcttcctactgtttgagagcatgcgagagcacctcaagttccaaatggagatgtacatcaaaaagcttatggagatcatcactgtggagaaccccaagatgccttatgagatgaaggagatggcactggaggccattgtgcagctctggcgcatccccagctttgtcacagagctctacatcaactatgattgtgactactactgttccaacctctttgaggaactcacaaagctgctgtccaagaatgccttccctgtgtctggtcaactctatacaacacacctactatctcttgatgccctattgacagtgattgacagcaccgaggcccactgccaggctaaagtcctcaacagcctcacccagcaagagaagaaggagacagccagaccaagctgtgagatagtagatggcacccgagaagctagcaatactgagagaactgccagcgatgggaaagctgtaggcatggcctcagacatcccaggcctgcatctgccaggtggagggcggctgccaccagaacatgggaaatcaggatgcagtgatctggaggaagctgttgactctggggctgacaaaaagtttgcccggaagccaccccgattttcctgtctcctgccagatccacgggaactaattgaaattaaaaacaaaaagaagctgctaatcactggcacagagcagttcaatcagaaaccaaagaaggggattcagtttctgcaagagaaaggcctcctcaccatcccaatggacaacacagaggttgctcagtggctccgagagaaccctcggctggacaagaagatgattggagagtttgtgagtgaccgcaaaaacattgacctgttggagagctttgtgagcaccttcagttttcagggtctgcgactggacgaagccctccgcctctacctggaagccttccgtttgcctggggaagcaccagtcatccagaggttgctggaggcattcacagagcgttggatgaattgtaatggctccccatttgccaatagcgatgcctgcttttccctggcctatgctgtcatcatgcttaatactgaccagcacaaccacaatgttcgtaaacagaatgcacccatgaccctggaggagtttcgcaaaaatctgaaaggtgtgaatggaggcaaggactttgagcaagacatcctggaggacatgtaccatgccatcaagaatgaggaaattgtaatgcctgaggagcagacaggcttggttcgggagaactatgtgtggaatgtgctgcttcatcgaggtgccacccctgagggcatattcctgcgtgtgcctactgccagctatgatcttgacctcttcaccatgacctggggccccactattgctgctctctcttatgtctttgacaaaagccttgaggagacaatcatccagaaagccatctcaggcttcaggaagtgcgccatgatctccgcccactatggcctcagcgatgtgtttgacaatctcatcatctctctatgcaaattcacagctctcagcagtgagtctattgagaacctgcccagtgtatttggaagcaaccctaaagcccatattgcagccaagacagtattccatttggcccatcgtcatggtgacatcctgcgggagggctggaagaatatcatggaggccatgctgcagctcttccgagcccaactactgcccaaggctatgatagaggtagaagatttcgtggatcccaatggcaagatctctctacagcgggaagagacaccatcaaaccgaggagagtcaacagtgctgagctttgtgagctggctaacactgagtggtcctgagcagtctagtgttcggggcccatccactgaaaaccaagaggccaagagagtggccttagagtgtataaagcaatgtgacccagaaaaaatgatcacagaaagcaagttcctccagctggagtcactacaggagctcatgaaggctctggtctcagtgacaccagatgaagagacatatgatgaggaagatgctgctttctgcctagagatgctgctaaggattgtgttggagaacagggatcgtgtgggctgtgtgtggcagactgttcgagaccatctataccacctctgtgttcaggcacaagatttctgcttccttgtggagcgggcagtggtggggttgctacgcctggccattcggcttctccggagagaagagatcagtgctcaggtgctgctctccctgcgcattttgctactgatgaagcccagtgtgctatcccgagtcagccaccaggttgcgtatgggctccatgaactcctgaagaccaatgcagccaacatccactcaggtgatgactgggccacactcttcacactgctggagtgcatcggctcaggtgtgaagcctccagctgctctgcaggccacagccagggcagatgcacctgatgccggggcccagtcagatagtgagctcccatcctaccatcagaatgacgtgagcctggatcgagggtacacttccgactcagaggtctacactgaccatggcaggccgggcaagatacaccgatcagccacagatgccgatgtggtcaacagtggttggttagtggttgggaaggatgacgttgataactccaagccagggcccagccgcccaggcccttcacccctgatcaatcaatacagcctaacagtgggactggatttggggccacacgacactaagtctctgcttaagtgtgtggaatcgctgtccttcatcgtgcgtgatgctgcccacatcacacctgacaactttgagctctgcgtcaagactctccggatctttgtggaggccagtctgaatggcggatgcaagtcccaggagaaacgtggcaagagtcacaaatatgacagcaaagggaaccgcttcaagaagaaatccaaagagggatcaatgcttcgccggcctcgaacctccagccaacatgcctctcggggcgggcagagtgatgatgatgaggacgaaggcgtgcctgccagctaccatacggtgtctttacagtatcaggttgctagacctgatgcacaccctgcacacgcgggcagcctctatctacagctcatgggcggaggagcaacgccacctggagacaggtggccagaagattgaagctgattctcgcaccctctgggcccactgctggtgccctttactgcagggtattgcctgcctgtgctgcgatgcccggcgccaggtacggatgcaggcactgacctatctgcagcgagcactacttgtacatgatctgcaaaagctagatgccctggaatgggagtcctgttttaacaaggtgctgtttcctctacttaccaagctcttggagaacatcagccctgcagatgtgggtgggatggaggagacccggatgagggcttccacattgctctctaaggtcttcctgcagcacctgtctccactgctgtcactctctacctttgcggccctctggctcaccatcttggacttcatggacaagtacatgcacgcaggctccagcgacttactgtcagaggcgatccctgagtctctgaagaacatgcttctggtgatggacacagcggagattttccacagtgcagatgcacggggaggcggcccctcggccctctgggagatcacctgggaacgcattgactgttttctccctcacctacgagatgaactcttcaagcagaccgtcatccaggaccccatgcccatggagcctcaaggccaaaagcctctcgcctcagcccacctgacttccgctgctggcgacactaggacacctggccatccaccgcccccagagattccatctgagctgggggcctgtgactttgagaagcccgagagcccccgagccgccagcagcagctccccaggatcaccagtggcctcaagccccagcaggctgagccccacccccgacgggcctccacccttggctcagcccccactgatcctgcagcccttggcctccccactgcaggtgggcgtgccacctatgactctgcccatcatcctcaaccctgcgctcatcgaggccacctcaccagtgcccctcctggccacaccccgccccacagatcccatacccacctctgaggtcaactaaggcaggtcactcagagatcaggaccagtgcttcccaccaggctttccttgaccccacttctggctgtcctgcgggccacaagctcttcaggccaagtcagagctgctgttgctgccacttggatggggacctgaaaaagagaatgttgatagccccagctaagacccccaatcagctgtgggacctttttcctcctcttttactaattagttggtcagtttggagagttgactggcaccatggagggtaggcaggtgggggctgggtgggggactgcccacaggagcatgtacatatggaaaaacagaacaacagtggactttttatgatataataaatgtcttagtaccagca

SEQ ID NO: 457486 - DNA, 5704 bp, Homo sapiens
tagttaccacgtcagtgagctgacagggaaggtacccggctctactgcccgtcccggacgactcatcctggcggactgtgcagtcccaccctgacttcagcctcaatttccaggaaacaggctccttctcttctcccatctgctaccagagccgggagagctgctcggagacgcctccggggtgcgggctggacatgagcagcggctgccggtcctgggactaggccccgccattttggatccgctgacaggtttgccaagatggtggataagaatatttacatcattcaaggggagattaacattgtggttggggccatcaaacgaaatgcccgatggagcacccatacaccactggatgaagaacgggatcctctgctgcatagtttcggtcatctaaaggaggttttaaacagtataacagaactctcagaaattgagcccaatgtattccttcgaccttttctggaagtgattcgctctgaagataccactggccctatcactggactggcactcacctctgtcaacaagttcctgtcctatgcactcatagatcccacccatgagggcacagcagagggcatggagaacatggcagatgctgtcacccatgctcgttttgtgggcacggatcctgccagtgatgaagttgtcctgatgaaaatccttcaggttctacggactctgctgctaaccccagtgggtgcccacctaaccaatgaatctgtgtgtgagattatgcagtcttgcttccggatctgctttgaaatgaggctcagtgagttattgagaaaatccgcagagcacactctcgtagacatggtgcagctgctcttcacaaggttacctcagtttaaagaagaacccaagaactatgtggggaccaacatgaagaagctgaaaatgagagccggaggcatgagtgattcatccaaatggaagaaacagaagagatcccctcggcccccacgccatatgaccaaagtcacaccaggttcagagctgcccactcccaatggaaccaccttatcatctaacctcactggtggcatgcccttcattgatgtgcccactcccatctcctctgcaagttcagaagctgcctcagcagtggtcagtccctctacagacagtggcctggaattctcctcccaaaccacttccaaggaagaccttactgatctagagcaacctggctctccagggtacagcacagctacagagcctggaagcagtgagctaggtgttcccgagcagcctgacctccaggaagggacccatgtggaaaagtcccagtcagcatctgtggagtccatccctgaagtgttagaggagtgcacgtcccctgccgaccactctgactctgcctctgtccatgacatggattacgtcaatccccggggcgtgcgctttacacagtcctcccagaaagaaggcacagctttggtcccctatggtcttccctgcatccgcgagctcttccgcttcctcatctccctcaccaatccacacgaccgccataactcagaggttatgattcacatgggactgcatttgctgacagtggcccttgagtcagcccctgtagcccagtgccagaccctcttgggcctcatcaaggatgagatgtgccgtcacttattccagctactcagcatagagcgactaaacctttatgctgcttccctgcgagtatgcttcctactgtttgagagcatgcgagagcacctcaagttccaaatggagatgtacatcaaaaagcttatggagatcatcactgtggagaaccccaagatgccttatgagatgaaggagatggcactggaggccattgtgcagctctggcgcatccccagctttgtcacagagctctacatcaactatgattgtgactactactgttccaacctctttgaggaactcacaaagctgctgtccaagaatgccttccctgtgtctggtcaactctatacaacacacctactatctcttgatgccctattgacagtgattgacagcaccgaggcccactgccaggctaaagtcctcaacagcctcacccagcaagagaagaaggagacagccagaccaagctgtgagatagtagatggcacccgagaagctagcaatactgagagaactgccagcgatgggaaagctgtaggcatggcctcagacatcccaggcctgcatctgccaggtggagggcggctgccaccagaacatgggaaatcaggatgcagtgatctggaggaagctgttgactctggggctgacaaaaagtttgcccggaagccaccccgattttcctgtctcctgccagatccacgggaactaattgaaattaaaaacaaaaagaagctgctaatcactggcacagagcagttcaatcagaaaccaaagaaggggattcagtttctgcaagagaaaggcctcctcaccatcccaatggacaacacagaggttgctcagtggctccgagagaaccctcggctggacaagaagatgattggagagtttgtgagtgaccgcaaaaacattgacctgttggagagctttgtgagcaccttcagttttcagggtctgcgactggacgaagccctccgcctctacctggaagccttccgtttgcctggggaagcaccagtcatccagaggttgctggaggcattcacagagcgttggatgaattgtaatggctccccatttgccaatagcgatgcctgcttttccctggcctatgctgtcatcatgcttaatactgaccagcacaaccacaatgttcgtaaacagaatgcacccatgaccctggaggagtttcgcaaaaatctgaaaggtgtgaatggaggcaaggactttgagcaagacatcctggaggacatgtaccatgccatcaagaatgaggaaattgtaatgcctgaggagcagacaggcttggttcgggagaactatgtgtggaatgtgctgcttcatcgaggtgccacccctgagggcatattcctgcgtgtgcctactgccagctatgatcttgacctcttcaccatgacctggggccccactattgctgctctctcttatgtctttgacaaaagccttgaggagacaatcatccagaaagccatctcaggcttcaggaagtgcgccatgatctccgcccactatggcctcagcgatgtgtttgacaatctcatcatctctctatgcaaattcacagctctcagcagtgagtctattgagaacctgcccagtgtatttggaagcaaccctaaagcccatattgcagccaagacagtattccatttggcccatcgtcatggtgacatcctgcgggagggctggaagaatatcatggaggccatgctgcagctcttccgagcccaactactgcccaaggctatgatagaggtagaagatttcgtggatcccaatggcaagatctctctacagcgggaagagacaccatcaaaccgaggagagtcaacagtgctgagctttgtgagctggctaacactgagtggtcctgagcagtctagtgttcggggcccatccactgaaaaccaagaggccaagagagtggccttagagtgtataaagcaatgtgacccagaaaaaatgatcacagaaagcaagttcctccagctggagtcactacaggagctcatgaaggctctggtctcagtgacaccagatgaagagacatatgatgaggaagatgctgctttctgcctagagatgctgctaaggattgtgttggagaacagggatcgtgtgggctgtgtgtggcagactgttcgagaccatctataccacctctgtgttcaggcacaagatttctgcttccttgtggagcgggcagtggtggggttgctacgcctggccattcggcttctccggagagaagagatcagtgctcaggtgctgctctccctgcgcattttgctactgatgaagcccagtgtgctatcccgagtcagccaccaggttgcgtatgggctccatgaactcctgaagaccaatgcagccaacatccactcaggtgatgactgggccacactcttcacactgctggagtgcatcggctcaggtgtgaagcctccagctgctctgcaggccacagccagggcagatgcacctgatgccggggcccagtcagatagtgagctcccatcctaccatcagaatgacgtgagcctggatcgagggtacacttccgactcagaggtctacactgaccatggcaggccgggcaagatacaccgatcagccacagatgccgatgtggtcaacagtggttggttagtggttgggaaggatgacgttgataactccaagccagggcccagccgcccaggcccttcacccctgatcaatcaatacagcctaacagtgggactggatttggggccacacgacactaagtctctgcttaagtgtgtggaatcgctgtccttcatcgtgcgtgatgctgcccacatcacacctgacaactttgagctctgcgtcaagactctccggatctttgtggaggccagtctgaatggcggatgcaagtcccaggagaaacgtggcaagagtcacaaatatgacagcaaagggaaccgcttcaagaagaaatccaaagagggatcaatgcttcgccggcctcgaacctccagccaacatgcctctcggggcgggcagagtgatgatgatgaggacgaaggcgtgcctgccagctaccatacggtgtctttacagtatcaggttgctagacctgatgcacaccctgcacacgcgggcagcctctatctacagctcatgggcggaggagcaacgccacctggagacaggtggccagaagattgaagctgattctcgcaccctctgggcccactgctggtgccctttactgcagggtattgcctgcctgtgctgcgatgcccggcgccaggtacggatgcaggcactgacctatctgcagcgagcactacttgtacatgatctgcaaaagctagatgccctggaatgggagtcctgttttaacaaggtgctgtttcctctacttaccaagctcttggagaacatcagccctgcagatgtgggtgggatggaggagacccggatgagggcttccacattgctctctaaggtcttcctgcagcacctgtctccactgctgtcactctctacctttgcggccctctggctcaccatcttggacttcatggacaagtacatgcacgcaggctccagcgacttactgtcagaggcgatccctgagtctctgaagaacatgcttctggtgatggacacagcggagattttccacagtgcagatgcacggggaggcggcccctcggccctctgggagatcacctgggaacgcattgactgttttctccctcacctacgagatgaactcttcaagcagaccgtcatccagggtagggggctcagcccagctttatcaaaaagagtctcctgcctgggcacaatggctcacacctctaatcccagcactttgagaggccgaggtgggtggatcacccgagggcaggaatttgagaccagcctgaccaacatagtgaaaccccatgtctacgaaaaatacaaaaattagcctatgtagctgggactacaggtgtgtgccaccacacccagctaagttttgtatttttagtagagacgaggtctcaccatgttggccaggctagtctcaaac

SEQ ID NO: 457487 - DNA, 4999 bp, Homo sapiens
tagttaccacgtcagtgagctgacagggaaggtacccggctctactgcccgtcccggacgactcatcctggcggactgtgcagtcccaccctgacttcagcctcaatttccaggaaacaggctccttctcttctcccatctgctaccagagccgggagagctgctcggagacgcctccggggtgcgggctggacatgagcagcggctgccggtcctgggactaggccccgccattttggatccgctgacaggtttgccaagatggtggataagaatatttacatcattcaaggggagattaacattgtggttggggccatcaaacgaaatgcccgatggagcacccatacaccactggatgaagaacgggatcctctgctgcatagtttcggtcatctaaaggaggttttaaacagtataacagaactctcagaaattgagcccaatgtattccttcgaccttttctggaagtgattcgctctgaagataccactggccctatcactggactggcactcacctctgtcaacaagttcctgtcctatgcactcatagatcccacccatgagggcacagcagagggcatggagaacatggcagatgctgtcacccatgctcgttttgtgggcacggatcctgccagtgatgaagttgtcctgatgaaaatccttcaggttctacggactctgctgctaaccccagtgggtgcccacctaaccaatgaatctgtgtgtgagattatgcagtcttgcttccggatctgctttgaaatgaggctcagtgagttattgagaaaatccgcagagcacactctcgtagacatggtgcagctgctcttcacaaggttacctcagtttaaagaagaacccaagaactatgtggggaccaacatgaagaagctgaaaatgagagccggaggcatgagtgattcatccaaatggaagaaacagaagagatcccctcggcccccacgccatatgaccaaagtcacaccaggttcagagctgcccactcccaatggaaccaccttatcatctaacctcactggtggcatgcccttcattgatgtgcccactcccatctcctctgcaagttcagaagctgcctcagcagtggtcagtccctctacagacagtggcctggaattctcctcccaaaccacttccaaggaagaccttactgatctagagcaacctggctctccagggtacagcacagctacagagcctggaagcagtgagctaggtgttcccgagcagcctgacctccaggaagggacccatgtggaaaagtcccagtcagcatctgtggagtccatccctgaagtgttagaggagtgcacgtcccctgccgaccactctgactctgcctctgtccatgacatggattacgtcaatccccggggcgtgcgctttacacagtcctcccagaaagaaggcacagctttggtcccctatggtcttccctgcatccgcgagctcttccgcttcctcatctccctcaccaatccacacgaccgccataactcagaggttatgattcacatgggactgcatttgctgacagtggcccttgagtcagcccctgtagcccagtgccagaccctcttgggcctcatcaaggatgagatgtgccgtcacttattccagctactcagcatagagcgactaaacctttatgctgcttccctgcgagtatgcttcctactgtttgagagcatgcgagagcacctcaagttccaaatggagatgtacatcaaaaagcttatggagatcatcactgtggagaaccccaagatgccttatgagatgaaggagatggcactggaggccattgtgcagctctggcgcatccccagctttgtcacagagctctacatcaactatgattgtgactactactgttccaacctctttgaggaactcacaaagctgctgtccaagaatgccttccctgtgtctggtcaactctatacaacacacctactatctcttgatgccctattgacagtgattgacagcaccgaggcccactgccaggctaaagtcctcaacagcctcacccagcaagagaagaaggagacagccagaccaagctgtgagatagtagatggcacccgagaagctagcaatactgagagaactgccagcgatgggaaagctgtaggcatggcctcagacatcccaggcctgcatctgccaggtggagggcggctgccaccagaacatgggaaatcaggatgcagtgatctggaggaagctgttgactctggggctgacaaaaagtttgcccggaagccaccccgattttcctgtctcctgccagatccacgggaactaattgaaattaaaaacaaaaagaagctgctaatcactggcacagagcagttcaatcagaaaccaaagaaggggattcagtttctgcaagagaaaggcctcctcaccatcccaatggacaacacagaggttgctcagtggctccgagagaaccctcggctggacaagaagatgattggagagtttgtgagtgaccgcaaaaacattgacctgttggagagctttgtgagcaccttcagttttcagggtctgcgactggacgaagccctccgcctctacctggaagccttccgtttgcctggggaagcaccagtcatccagaggttgctggaggcattcacagagcgttggatgaattgtaatggctccccatttgccaatagcgatgcctgcttttccctggcctatgctgtcatcatgcttaatactgaccagcacaaccacaatgttcgtaaacagaatgcacccatgaccctggaggagtttcgcaaaaatctgaaaggtgtgaatggaggcaaggactttgagcaagacatcctggaggacatgtaccatgccatcaagaatgaggaaattgtaatgcctgaggagcagacaggcttggttcgggagaactatgtgtggaatgtgctgcttcatcgaggtgccacccctgagggcatattcctgcgtgtgcctactgccagctatgatcttgacctcttcaccatgacctggggccccactattgctgctctctcttatgtctttgacaaaagccttgaggagacaatcatccagaaagccatctcaggcttcaggaagtgcgccatgatctccgcccactatggcctcagcgatgtgtttgacaatctcatcatctctctatgcaaattcacagctctcagcagtgagtctattgagaacctgcccagtgtatttggaagcaaccctaaagcccatattgcagccaagacagtattccatttggcccatcgtcatggtgacatcctgcgggagggctggaagaatatcatggaggccatgctgcagctcttccgagcccaactactgcccaaggctatgatagaggtagaagatttcgtggatcccaatggcaagatctctctacagcgggaagagacaccatcaaaccgaggagagtcaacagtgctgagctttgtgagctggctaacactgagtggtcctgagcagtctagtgttcggggcccatccactgaaaaccaagaggccaagagagtggccttagagtgtataaagcaatgtgacccagaaaaaatgatcacagaaagcaagttcctccagctggagtcactacaggagctcatgaaggctctggtctcagtgacaccagatgaagagacatatgatgaggaagatgctgctttctgcctagagatgctgctaaggattgtgttggagaacagggatcgtgtgggctgtgtgtggcagactgttcgagaccatctataccacctctgtgttcaggcacaagatttctgcttccttgtggagcgggcagtggtggggttgctacgcctggccattcggcttctccggagagaagagatcagtgctcaggtgctgctctccctgcgcattttgctactgatgaagcccagtgtgctatcccgagtcagccaccaggttgcgtatgggctccatgaactcctgaagaccaatgcagccaacatccactcaggtgatgactgggccacactcttcacactgctggagtgcatcggctcaggtgtgaagcctccagctgctctgcaggccacagccagggcagatgcacctgatgccggggcccagtcagatagtgagctcccatcctaccatcagaatgacgtgagcctggatcgagggtacacttccgactcagaggtctacactgaccatggcaggccgggcaagatacaccgatcagccacagatgccgatgtggtcaacagtggttggttagtggttgggaaggatgacgttgataactccaagccagggcccagccgcccaggcccttcacccctgatcaatcaatacagcctaacagtgggactggatttggggccacacgacactaagtctctgcttaagtgtgtggaatcgctgtccttcatcgtgcgtgatgctgcccacatcacacctgacaactttgagctctgcgtcaagactctccggatctttgtggaggccagtctgaatggcggatgcaagtcccaggagaaacgtggcaagagtcacaaatatgacagcaaagggaaccgcttcaagaagaaatccaaagagggatcaatgcttcgccggcctcgaacctccagccaacatgcctctcggggcgggcagagtgatgatgatgaggacgaaggcgtgcctgccagctaccatacggtgtctttacagtatcaggttgctagacctgatgcacaccctgcacacgcgggcagcctctatctacagctcatgggcggaggagcaacgccacctggagacaggtggccagaagattgaagctgattctcgcaccctctgggcccactgctggtgccctttactgcaggagattgtctgcttgtattgttatgcattgcccatcgtacaagtggtgtctgcgtacgctagggctctgctaggcgaggatcgtatactctagacccgaacg

SEQ ID NO: 457488 - DNA, 2374 bp, Homo sapiens
tagttaccacgtcagtgagctgacagggaaggtacccggctctactgcccgtcccggacgactcatcctggcggactgtgcagtcccaccctgacttcagcctcaatttccaggaaacaggctccttctcttctcccatctgctaccagagccgggagagctgctcggagacgcctccggggtgcgggctggacatgagcagcggctgccggtcctgggactaggccccgccattttggatccgctgacaggtttgccaagatggtggataagaatatttacatcattcaaggggagattaacattgtggttggggccatcaaacgaaatgcccgatggagcacccatacaccactggatgaagaacgggatcctctgctgcatagtttcggtcatctaaaggaggttttaaacagtataacagaactctcagaaattgagcccaatgtattccttcgaccttttctggaagtgattcgctctgaagataccactggccctatcactggactggcactcacctctgtcaacaagttcctgtcctatgcactcatagatcccacccatgagggcacagcagagggcatggagaacatggcagatgctgtcacccatgctcgttttgtgggcacggatcctgccagtgatgaagttgtcctgatgaaaatccttcaggttctacggactctgctgctaaccccagtgggtgcccacctaaccaatgaatctgtgtgtgagattatgcagtcttgcttccggatctgctttgaaatgaggctcagtgagttattgagaaaatccgcagagcacactctcgtagacatggtgcagctgctcttcacaaggttacctcagtttaaagaagaacccaagaactatgtggggaccaacatgaagaagctgaaaatgagagccggaggcatgagtgattcatccaaatggaagaaacagaagagatcccctcggcccccacgccatatgaccaaagtcacaccaggttcagagctgcccactcccaatggaaccaccttatcatctaacctcactggtggcatgcccttcattgatgtgcccactcccatctcctctgcaagttcagaagctgcctcagcagtggtcagtccctctacagacagtggcctggaattctcctcccaaaccacttccaaggaagaccttactgatctagagcaacctggctctccagggtacagcacagctacagagcctggaagcagtgagctaggtgttcccgagcagcctgacctccaggaagggacccatgtggaaaagtcccagtcagcatctgtggagtccatccctgaagtgttagaggagtgcacgtcccctgccgaccactctgactctgcctctgtccatgacatggattacgtcaatccccggggcgtgcgctttacacagtcctcccagaaagaaggcacagctttggtcccctatggtcttccctgcatccgcgagctcttccgcttcctcatctccctcaccaatccacacgaccgccataactcagaggttatgattcacatgggactgcatttgctgacagtggcccttgagtcagcccctgtagcccagtgccagaccctcttgggcctcatcaaggatgagatgtgccgtcacttattccagctactcagcatagagcgactaaacctttatgctgcttccctgcgagtatgcttcctactgtttgagagcatgcgagagcacctcaagttccaaatggagatgtacatcaaaaagcttatggagatcatcactgtggagaaccccaagatgccttatgagatgaaggagatggcactggaggccattgtgcagctctggcgcatccccagctttgtcacagagctctacatcaactatgattgtgactactactgttccaacctctttgaggaactcacaaagctgctgtccaagaatgccttccctgtgtctggtcaactctatacaacacacctactatctcttgatgccctattgacagtgattgacagcaccgaggcccactgccaggctaaagtcctcaacagcctcacccagcaagagaagaaggagacagccagaccaagctgtgagatagtagatggcacccgagaagctagcaatagtgagaggcatttctttctttgatgaacccagtgttctatgcttatcccttctctactctctgagtcgtttttcctgtccccatatcacttcccctgggatgctcccaattctgttccgactggcagctttaggatcacgcagtaacgcaggatgtagagacgcagcacagtcatcattttccctcatctttgtggacagaggcagatcctggtatgacccagggagtacttgacgtggg

SEQ ID NO: 457489 - DNA, 871 bp, Homo sapiens
attaataggaaagatgattgtatagatggtgggctattaactcagatcaggatgagaattgggagtgcctttacatgtgtggtacccaaatgggtggttggatataagagtaacaaaaggactgaaagggttaaaaaagaaagaaaaaaaaaaactccctggttgggagggtgttaagtatcgagtgtttttccaaaccattcctcctctgctcacctacccctaggtgattaaaggagataacttttaaaaaagaaagaattggctcaaaggtactgtaattctaggattatatacctttatataggttcattccctgatccctgtattatcaaggcacagataataataatccccaaccacccccacgccacatcaaaaattgtccctcttgagtctttttcccatttacatcacccattgatctgatttcagccaaatcaaaatgttttgagaaaaagaaaaaaaaagaagggctacttgaggtacttaaccccagtctcccctgggaaaagacctgggcatgccaccctgtacaccagccaggagtgccccatatggtggctgcagcttttgatacccaaagcccacagcagctctgtgaggccccacctcctacttttggggacctaaaatgggagaaatggtggttgagcagctggaaatgatgcagagctggcacacaccttgtgaagctcttctctgcctctttcttcattttttctgtttagaaatcccagggagacaatgagcattatttgacacttaaatgtttttgctcctctgataacccagaccatcaactaggatgctgctaaggaaaatggagggaagcaattaaaagggacactgaggggaacaaaagggaaag

SEQ ID NO: 457490 - DNA, 1008 bp, Homo sapiens
  misc_feature (462)..(462): n is a, c, g, or t
  misc_feature (503)..(503): n is a, c, g, or t
ctcgctgccccctccctgcctcctctggccctcctcagtgcccacgcaacccggttcgaaagagaggatgaccgtattctgcattttagaaaacaggctcttagcttcccccgcccccgtcctcactagagtggagaactgaaagcgaacgctataaagggcgccagtgagaggggctggcctcctcttgccacgaggtcagacggcgagttcttagagaaaaaggctgcttagctgctgcttatcatgtaacctcaaaaggaaactgatcgtctttctcatgctgtcacgtacttgggttattatcgctgattacagctggaaacaattgatttgctcttacgtatttgtgtgacttgactcttcaaacacaaaggtatatttttattatctgatattttattaaaatatcttaaatggtaagattttttttttctttttctttcctattcccatagtcanattcttaactttggagtcactctcttatgtttgagtagccntacttgctttggggcaaaatattgggggatagttttttggagaaagaaaatctgggatgtttttgtagtttagtaatagcaagaatcatgtctgtttgctttaaaggcccaggaaggactgagatactaatggaggagatcgatagaatgggtgatgaagtatcataaatctaatgtaacactatcttctgtcagtgacctagaactatgatatcccgaggcagaagtctcccaggagatttgatgtgtgggtttagaggagtactttcccaccaaccgtaggcatgaaactatatgggaaaatatatcagagtaaattgaaatactttatagcatgccctcattcattcttacagctgtaaaattaaaatgtatgaatggccattttatgaatgaggaaaacctgaaatttgatgatttggctggacccccagattcatgataatctgtatatgttaaggggttttgtttgaataaaagcacatttctaaatagaaaaaaaaaa

SEQ ID NO: 457491 - DNA, 180 bp, Homo sapiens
atacctcttgtataggggttttatgagtattaaaaataatagatttaagttgatcagtatggtgcttgacattcttctttttcttatttctgatagcctaacccatcctgttccaactggggtgtattatcaatgtagcagaaaagacaaattatgctttgtaatgtttcatttgagtgt

SEQ ID NO: 457492 - DNA, 4327 bp, Homo sapiens
gagccggtggcgcaggtgtcggggtcctcgagcgcccagcctgggagcatgattgtggacaagctgctggacgacagccgcggcggagaggggctgcgggacgcggcgggcggctgcggcctcatgaccagcccgctcaacctgagctacttctacggcgcgtcgccgcccgccgccgccccgggcgcctgcgacgccagctgctcggtcttgggcccctcggcgcccggctcgcccggctccgactcctccgacttctcctctgcctcgtcggtgtcctcctgcggcgccgtggagtcccggtcgagaggcggcgcccgcgccgagcgccagccagttgagccccatatgggggttggcaggcagcagagaggcccctttcaaggtgttcgggtaaagaactcagtgaaggaactcctgttgcacatccgaagtcataaacagaaggcttctggccaagctgtggatgattttaagacacaaggtgtgaacatagaacagttcagagaattgaagaacacagtatcatacagtgggaaaaggaaagggcccgattcgttgtctgatggacctgcttgcaaaaggccagctctgttgcattcccaatttttgacaccacctcaaacaccaacgcccggggagagcatggaagatgttcatctcaatgaacccaaacaggagagcagtgctgatctgcttcagaacattatcaacattaagaatgaatgcagccccgtttccctgaacacagttcaagttagctggctgaaccccgtggtggtccctcagagctcccccgcagagcagtgtcaggacttccatggagggcaggtcttttctccacctcagaaatgccaaccattccaagtcaggggctcccaacaaatgatagaccaggcttccctgtaccagtattctccacagaaccagcatgtagagcagcagccacactacacccacaaaccaactctggaatacagtccttttcccatacctccccagtcccccgcttatgaaccaaacctctttgatggtccagaatcacagttttgcccaaaccaaagcttagtttcccttcttggtgatcaaagggaatctgagaatattgctaatcccatgcagacttcctccagtgttcagcagcaaaatgatgctcacttgcacagcttcagcatgatgcccagcagcgcctgtgaggccatggtggggcacgagatggcctctgactcttcaaacacttcactgccattctcaaacatgggaaatccaatgaacaccacacagttagggaaatcactttttcagtggcaggtggagcaggaagaaagcaaattggcaaatatttcccaagaccagtttctttcaaaggatgcagatggtgacacgttccttcatattgctgttgcccaagggagaagggcactttcctatgttcttgcaagaaagatgaatgcacttcacatgctggatattaaagagcacaatggacagagtgcctttcaggtggcagtggctgccaatcagcatctcattgtgcaggatctggtgaacatcggggcacaggtgaacaccacagactgctggggaagaacacctctgcatgtgtgtgctgagaagggccactcccaggtgcttcaggtaagaggcagcaaaccaggcttccatcattgcaaggccagagagatagagttggatattagaagtcggatataggttgcctgttgcaatgatctattttgagttaacttattcatttcttggggattctaataggtatatgcgcagcttatgtagctaacagatgtctgtttttaaaatctgcaggcgattcagaagggagcagtgggaagtaatcagtttgtggatcttgaggcaactaactatgatggtaagcaactgaaactttattagattcagagccacttagggggaaccataaggtctaagggtgctaagtatactaagaaggaaggtaattaaagctaaaatattctgtaggtaaaattagacccaaaaagagacaatattcagattgccttactagttcttgtggagcccatttataggttaagttagaggccatcctcagcatttgtcattatagaaggaccaaaagacctgatgggatgcttgaccactgcttgattatacttttcttctaggcctgactccccttcactgtgcagtcatagcccacaatgctgtggtccatgaactccagagaaatcaacagcctcattcacctgaagttcaggagcttttactgaagaataagagtctggttgataccattaagtgcctaattcaaatgggagcagcggtggaagcgaaggatcgcaaaagtggccgcacagccctgcatttggcagctgaagaagcaaatctggaactcattcgcctctttttggagctgcccagttgcctgtcttttgtgaatgcaaaggcttacaatggcaacactgccctccatgttgctgccagcctgcagtatcggttgacacaattagatgctgtccgcctgttgatgaggaagggagcagacccaagtactcggaacttggagaacgaacagccagtgcatttggttcccgatggccctgtgggagaacagatccgacgtatcctgaagggaaagtccattcagcagagagctccaccgtattagctccattagcttggagcctggctagcaacactcactgtcagttaggcagtcctgatgtatctgtacatagaccatttgccttatattggcaaatgtaagttgtttctatgaaacaaacatatttagttcactattatatagtgggttatattaaaagaaaagaagaaaaatatctaatttctcttggcagatttgcatatttcatacccaggtatctgggatctagacatctgaatttgatctcaatggtaacattgccttcaattaacagtagcttttgagtaggaaaggactttgatttgtggcacaaaacattattaatatagctattgacagtttcaaagcaggtaaattgtaaatgtttctttaagaaaaagcatgtgaaaggaaaaaggtaaatacagcattgaggcttcatttggccttagtccctgggagttactggcgttggacaggcttcagtcattggactagatgaaaggtgtccatggttagaatttgatctttgcaaactgtatataattgttatttttgtccttaaaaatattgtacatacttggttgttaacatggtcatatttgaaatgtataagtccataaaatagaaaagaacaagtgaattgttgctatttaaaaaaattttacaattcttactaaggagtttttattgtgtaatcactaagtctttgtagataaagcagatggggagttacggagttgttcctttactggctgaaagatatattcgaattgtaaagatgctttttctcatgcattgaaattatacattatttgtagggaattgcatgcttttttttttttttctcccgagacagggtcttgctctggcgcccaggctggagtacagtggcatgatcttggctcacttcagccttgacttgggctcaagtgatcctcctacctgagccttctgagtaactgggactacaggtgtgcactcctcgcctggctaattttttattttttgtacaggcaggatcttgccaccttgcccaggctggtcttgaactcctgagctcatgccatctgcctgccttagtctcccaaaatgctgggattacaggagtgagccaccatgcccggctggcagttgcatggaagagaacacctctttatggcttaccctctagaatttctaatttatgtgttctgttgaaatttttgtttttttacctttattgaaacaacaaaaagtcagtattgaaacatatcttcctgttttctgttgtcaaatgatgataatgtgccatgatgttttatatatatcattcagaaaaagttttattttttaataacattctattaacattattttgcttgccgctggcatgcctgaggaatgtatttggctttgattacacactaagtttttgtaataaatttgactcattaaaaaccttttttttttaaaaaaaaaaaaaagaaaatctcattagtgaacttatctttgcagctgagtacttaaattctttttaaaaagataccctttggattgatcacattgtttgacccagtatgtcttgtagacacgttagttataatcaccttgtatctctaaatatggtgtgatatgaaccagtccattcacattggaaaaactgatggttttaaataaactaattcactaatattatttgtctta

SEQ ID NO: 457493 - DNA, 3633 bp, Homo sapiens
gagccggtggcgcaggtgtcggggtcctcgagcgcccagcctgggagcatgattgtggacaagctgctggacgacagccgcggcggagaggggctgcgggacgcggcgggcggctgcggcctcatgaccagcccgctcaacctgagctacttctacggcgcgtcgccgcccgccgccgccccgggcgcctgcgacgccagctgctcggtcttgggcccctcggcgcccggctcgcccggctccgactcctccgacttctcctctgcctcgtcggtgtcctcctgcggcgccgtggagtcccggtcgagaggcggcgcccgcgccgagcgccagccagttgagccccatatgggggttggcaggcagcagagaggcccctttcaaggtgttcgggtaaagaactcagtgaaggaactcctgttgcacatccgaagtcataaacagaaggcttctggccaagctgtggatgattttaagacacaaggtgtgaacatagaacagttcagagaattgaagaacacagtatcatacagtgggaaaaggaaagggcccgattcgttgtctgatggacctgcttgcaaaaggccagctctgttgcattcccaatttttgacaccacctcaaacaccaacgcccggggagagcatggaagatgttcatctcaatgaacccaaacaggagagcagtgctgatctgcttcagaacattatcaacattaagaatgaatgcagccccgtttccctgaacacagttcaagttagctggctgaaccccgtggtggtccctcagagctcccccgcagagcagtgtcaggacttccatggagggcaggtcttttctccacctcagaaatgccaaccattccaagtcaggggctcccaacaaatgatagaccaggcttccctgtaccagtattctccacagaaccagcatgtagagcagcagccacactacacccacaaaccaactctggaatacagtccttttcccatacctccccagtcccccgcttatgaaccaaacctctttgatggtccagaatcacagttttgcccaaaccaaagcttagtttcccttcttggtgatcaaagggaatctgagaatattgctaatcccatgcagacttcctccagtgttcagcagcaaaatgatgctcacttgcacagcttcagcatgatgcccagcagcgcctgtgaggccatggtggggcacgagatggcctctgactcttcaaacacttcactgccattctcaaacatgggaaatccaatgaacaccacacagttagggaaatcactttttcagtggcaggtggagcaggaagaaagcaaattggcaaatatttcccaagaccagtttctttcaaaggatgcagatggtgacacgttccttcatattgctgttgcccaagggagaagggcactttcctatgttcttgcaagaaagatgaatgcacttcacatgctggatattaaagagcacaatggacagagtgcctttcaggtggcagtggctgccaatcagcatctcattgtgcaggatctggtgaacatcggggcacaggtgaacaccacagactgctggggaagaacacctctgcatgtgtgtgctgagaagggccactcccaggtgcttcaggcgattcagaagggagcagtgggaagtaatcagtttgtggatcttgaggcaactaactatgatggcctgactccccttcactgtgcagtcatagcccacaatgctgtggtccatgaactccagagaaatcaacagcctcattcacctgaagttcaggagcttttactgaagaataagagtctggttgataccattaagtgcctaattcaaatgggagcagcggtggaagcgaaggatcgcaaaagtggccgcacagccctgcatttggcagctgaagaagcaaatctggaactcattcgcctctttttggagctgcccagttgcctgtcttttgtgaatgcaaaggcttacaatggcaacactgccctccatgttgctgccagcctgcagtatcggttgacacaattagatgctgtccgcctgttgatgaggaagggagcagacccaagtactcggaacttggagaacgaacagccagtgcatttggttcccgatggccctgtgggagaacagatccgacgtatcctgaagggaaagtccattcagcagagagctccaccgtattagctccattagcttggagcctggctagcaacactcactgtcagttaggcagtcctgatgtatctgtacatagaccatttgccttatattggcaaatgtaagttgtttctatgaaacaaacatatttagttcactattatatagtgggttatattaaaagaaaagaagaaaaatatctaatttctcttggcagatttgcatatttcatacccaggtatctgggatctagacatctgaatttgatctcaatggtaacattgccttcaattaacagtagcttttgagtaggaaaggactttgatttgtggcacaaaacattattaatatagctattgacagtttcaaagcaggtaaattgtaaatgtttctttaagaaaaagcatgtgaaaggaaaaaggtaaatacagcattgaggcttcatttggccttagtccctgggagttactggcgttggacaggcttcagtcattggactagatgaaaggtgtccatggttagaatttgatctttgcaaactgtatataattgttatttttgtccttaaaaatattgtacatacttggttgttaacatggtcatatttgaaatgtataagtccataaaatagaaaagaacaagtgaattgttgctatttaaaaaaattttacaattcttactaaggagtttttattgtgtaatcactaagtctttgtagataaagcagatggggagttacggagttgttcctttactggctgaaagatatattcgaattgtaaagatgctttttctcatgcattgaaattatacattatttgtagggaattgcatgcttttttttttttttctcccgagacagggtcttgctctggcgcccaggctggagtacagtggcatgatcttggctcacttcagccttgacttgggctcaagtgatcctcctacctgagccttctgagtaactgggactacaggtgtgcactcctcgcctggctaattttttattttttgtacaggcaggatcttgccaccttgcccaggctggtcttgaactcctgagctcatgccatctgcctgccttagtctcccaaaatgctgggattacaggagtgagccaccatgcccggctggcagttgcatggaagagaacacctctttatggcttaccctctagaatttctaatttatgtgttctgttgaaatttttgtttttttacctttattgaaacaacaaaaagtcagtattgaaacatatcttcctgttttctgttgtcaaatgatgataatgtgccatgatgttttatatatatcattcagaaaaagttttattttttaataacattctattaacattattttgcttgccgctggcatgcctgaggaatgtatttggctttgattacacactaagtttttgtaataaatttgactcattaaaaacctttttttttt

SEQ ID NO: 457494 - DNA, 3756 bp, Homo sapiens
gagccggtggcgcaggtgtcggggtcctcgagcgcccagcctgggagcatgattgtggacaagctgctggacgacagccgcggcggagaggggctgcgggacgcggcgggcggctgcggcctcatgaccagcccgctcaacctgagctacttctacggcgcgtcgccgcccgccgccgccccgggcgcctgcgacgccagctgctcggtcttgggcccctcggcgcccggctcgcccggctccgactcctccgacttctcctctgcctcgtcggtgtcctcctgcggcgccgtggagtcccggtcgagaggcggcgcccgcgccgagcgccagccagttgagccccatatgggggttggcaggcagcagagaggcccctttcaaggtgttcgggtaaagaactcagtgaaggaactcctgttgcacatccgaagtcataaacagaaggcttctggccaagctgtggatgattttaagacacaaggtgtgaacatagaacagttcagagaattgaagaacacagtatcatacagtgggaaaaggaaagggcccgattcgttgtctgatggacctgcttgcaaaaggccagctctgttgcattcccaatttttgacaccacctcaaacaccaacgcccggggagagcatggaagatgttcatctcaatgaacccaaacaggagagcagtgctgatctgcttcagaacattatcaacattaagaatgaatgcagccccgtttccctgaacacagttcaagttagctggctgaaccccgtggtggtccctcagagctcccccgcagagcagtgtcaggacttccatggagggcaggtcttttctccacctcagaaatgccaaccattccaagtcaggggctcccaacaaatgatagaccaggcttccctgtaccagtattctccacagaaccagcatgtagagcagcagccacactacacccacaaaccaactctggaatacagtccttttcccatacctccccagtcccccgcttatgaaccaaacctctttgatggtccagaatcacagttttgcccaaaccaaagcttagtttcccttcttggtgatcaaagggaatctgagaatattgctaatcccatgcagacttcctccagtgttcagcagcaaaatgatgctcacttgcacagcttcagcatgatgcccagcagcgcctgtgaggccatggtggggcacgagatggcctctgactcttcaaacacttcactgccattctcaaacatgggaaatccaatgaacaccacacagttagggaaatcactttttcagtggcaggtggagcaggaagaaagcaaattggcaaatatttcccaagaccagtttctttcaaaggatgcagatggtgacacgttccttcatattgctgttgcccaagggagaagggcactttcctatgttcttgcaagaaagatgaatgcacttcacatgctggatattaaagagcacaatggacagagtgcctttcaggtggcagtggctgccaatcagcatctcattgtgcaggatctggtgaacatcggggcacaggtgaacaccacagactgctggggaagaacacctctgcatgtgtgtgctgagaagggccactcccaggtgcttcaggcgattcagaagggagcagtgggaagtaatcagtttgtggatcttgaggcaactaactatgatggcctgactccccttcactgtgcagtcatagcccacaatgctgtggtccatgaactccagagaaatcaacagcctcattcacctgaagttcaggagcttttactgaagaataagagtctggttgataccattaagtgcctaattcaaatgggagcagcggtggaagcgaaggcttacaatggcaacactgccctccatgttgctgccagcctgcagtatcggttgacacaattagatgctgtccgcctgttgatgaggaagggagcagacccaagtactcggaacttggagaacgaacagccagtgcatttggttcccgatggccctgtgggagaacagatccgacgtatcctgaagggaaagtccattcagcagagagctccaccgtattagctccattagcttggagcctggctagcaacactcactgtcagttaggcagtcctgatgtatctgtacatagaccatttgccttatattggcaaatgtaagttgtttctatgaaacaaacatatttagttcactattatatagtgggttatattaaaagaaaagaagaaaaatatctaatttctcttggcagatttgcatatttcatacccaggtatctgggatctagacatctgaatttgatctcaatggtaacattgccttcaattaacagtagcttttgagtaggaaaggactttgatttgtggcacaaaacattattaatatagctattgacagtttcaaagcaggtaaattgtaaatgtttctttaagaaaaagcatgtgaaaggaaaaaggtaaatacagcattgaggcttcatttggccttagtccctgggagttactggcgttggacaggcttcagtcattggactagatgaaaggtgtccatggttagaatttgatctttgcaaactgtatataattgttatttttgtccttaaaaatattgtacatacttggttgttaacatggtcatatttgaaatgtataagtccataaaatagaaaagaacaagtgaattgttgctatttaaaaaaattttacaattcttactaaggagtttttattgtgtaatcactaagtctttgtagataaagcagatggggagttacggagttgttcctttactggctgaaagatatattcgaattgtaaagatgctttttctcatgcattgaaattatacattatttgtagggaattgcatgcttttttttttttttctcccgagacagggtcttgctctggcgcccaggctggagtacagtggcatgatcttggctcacttcagccttgacttgggctcaagtgatcctcctacctgagccttctgagtaactgggactacaggtgtgcactcctcgcctggctaattttttattttttgtacaggcaggatcttgccaccttgcccaggctggtcttgaactcctgagctcatgccatctgcctgccttagtctcccaaaatgctgggattacaggagtgagccaccatgcccggctggcagttgcatggaagagaacacctctttatggcttaccctctagaatttctaatttatgtgttctgttgaaatttttgtttttttacctttattgaaacaacaaaaagtcagtattgaaacatatcttcctgttttctgttgtcaaatgatgataatgtgccatgatgttttatatatatcattcagaaaaagttttattttttaataacattctattaacattattttgcttgccgctggcatgcctgaggaatgtatttggctttgattacacactaagtttttgtaataaatttgactcattaaaaaccttttttttttaaaaaaaaaaaaaagaaaatctcattagtgaacttatctttgcagctgagtacttaaattctttttaaaaagataccctttggattgatcacattgtttgacccagtatgtcttgtagacacgttagttataatcaccttgtatctctaaatatggtgtgatatgaaccagtccattcacattggaaaaactgatggttttaaataaactaattcactaatattatttgtctta

SEQ ID NO: 457495 - DNA, 2227 bp, Homo sapiens
gtataaaaaggtacattgtgacaagaggcatatagacaaattaataggaaatttaagaggaataaaagattccatttagcttgggattaagcaaggcattttggagaagggagcattcaaagtgagtctctgaagctgaatcagacattcaggagactgggtgaaaagtgtattctgaggcatagtatctggatttttttttttttttttcctccctcttgcctttgacaaggatcgcaaaagtggccgcacagccctgcatttggcagctgaagaagcaaatctggaactcattcgcctctttttggagctgcccagttgcctgtcttttgtgaatgcaaaggcttacaatggcaacactgccctccatgttgctgccagcctgcagtatcggttgacacaattagatgctgtccgcctgttgatgaggaagggagcagacccaagtactcggaacttggagaacgaacagccagtgcatttggttcccgatggccctgtgggagaacagatccgacgtatcctgaagggaaagtccattcagcagagagctccaccgtattagctccattagcttggagcctggctagcaacactcactgtcagttaggcagtcctgatgtatctgtacatagaccatttgccttatattggcaaatgtaagttgtttctatgaaacaaacatatttagttcactattatatagtgggttatattaaaagaaaagaagaaaaatatctaatttctcttggcagatttgcatatttcatacccaggtatctgggatctagacatctgaatttgatctcaatggtaacattgccttcaattaacagtagcttttgagtaggaaaggactttgatttgtggcacaaaacattattaatatagctattgacagtttcaaagcaggtaaattgtaaatgtttctttaagaaaaagcatgtgaaaggaaaaaggtaaatacagcattgaggcttcatttggccttagtccctgggagttactggcgttggacaggcttcagtcattggactagatgaaaggtgtccatggttagaatttgatctttgcaaactgtatataattgttatttttgtccttaaaaatattgtacatacttggttgttaacatggtcatatttgaaatgtataagtccataaaatagaaaagaacaagtgaattgttgctatttaaaaaaattttacaattcttactaaggagtttttattgtgtaatcactaagtctttgtagataaagcagatggggagttacggagttgttcctttactggctgaaagatatattcgaattgtaaagatgctttttctcatgcattgaaattatacattatttgtagggaattgcatgcttttttttttttttctcccgagacagggtcttgctctggcgcccaggctggagtacagtggcatgatcttggctcacttcagccttgacttgggctcaagtgatcctcctacctgagccttctgagtaactgggactacaggtgtgcactcctcgcctggctaattttttattttttgtacaggcaggatcttgccaccttgcccaggctggtcttgaactcctgagctcatgccatctgcctgccttagtctcccaaaatgctgggattacaggagtgagccaccatgcccggctggcagttgcatggaagagaacacctctttatggcttaccctctagaatttctaatttatgtgttctgttgaaatttttgtttttttacctttattgaaacaacaaaaagtcagtattgaaacatatcttcctgttttctgttgtcaaatgatgataatgtgccatgatgttttatatatatcattcagaaaaagttttattttttaataacattctattaacattattttgcttgccgctggcatgcctgaggaatgtatttggctttgattacacactaagtttttgtaataaatttgactcattaaaaaccttttttttttaaaaaaaaaaaaaagaaaatctcattagtgaacttatctttgcagctgagtacttaaattctttttaaaaagataccctttggattgatcacattgtttgacccagtatgtcttgtagacacgttagttataatcaccttgtatctctaaatatggtgtgatatgaaccagtccattcacattggaaaaactgatggttttaaataaactaattcactaatattatttgtctta

SEQ ID NO: 457496 - DNA, 3904 bp, Homo sapiens
gagccggtggcgcaggtgtcggggtcctcgagcgcccagcctgggagcatgattgtggacaagctgctggacgacagccgcggcggagaggggctgcgggacgcggcgggcggctgcggcctcatgaccagcccgctcaacctgagctacttctacggcgcgtcgccgcccgccgccgccccgggcgcctgcgacgccagctgctcggtcttgggcccctcggcgcccggctcgcccggctccgactcctccgacttctcctctgcctcgtcggtgtcctcctgcggcgccgtggagtcccggtcgagaggcggcgcccgcgccgagcgccagccagttgagccccatatgggggttggcaggcagcagagaggcccctttcaaggtgttcgggtaaagaactcagtgaaggaactcctgttgcacatccgaagtcataaacagaaggcttctggccaagctgtggatgattttaagacacaaggtgtgaacatagaacagttcagagaattgaagaacacagtatcatacagtgggaaaaggaaagggcccgattcgttgtctgatggacctgcttgcaaaaggccagctctgttgcattcccaatttttgacaccacctcaaacaccaacgcccggggagagcatggaagatgttcatctcaatgaacccaaacaggagagcagtgctgatctgcttcagaacattatcaacattaagaatgaatgcagccccgtttccctgaacacagttcaagttagctggctgaaccccgtggtggtccctcagagctcccccgcagagcagtgtcaggacttccatggagggcaggtcttttctccacctcagaaatgccaaccattccaagtcaggggctcccaacaaatgatagaccaggcttccctgtaccagtattctccacagaaccagcatgtagagcagcagccacactacacccacaaaccaactctggaatacagtccttttcccatacctccccagtcccccgcttatgaaccaaacctctttgatggtccagaatcacagttttgcccaaaccaaagcttagtttcccttcttggtgatcaaagggaatctgagaatattgctaatcccatgcagacttcctccagtgttcagcagcaaaatgatgctcacttgcacagcttcagcatgatgcccagcagcgcctgtgaggccatggtggggcacgagatggcctctgactcttcaaacacttcactgccattctcaaacatgggaaatccaatgaacaccacacagttagggaaatcactttttcagtggcaggtggagcaggaagaaagcaaattggcaaatatttcccaagaccagtttctttcaaaggatgcagatggtgacacgttccttcatattgctgttgcccaagggagaagggcactttcctatgttcttgcaagaaagatgaatgcacttcacatgctggatattaaagagcacaatggacagagtgcctttcaggtggcagtggctgccaatcagcatctcattgtgcaggatctggtgaacatcggggcacaggtgaacaccacagactgctggggaagaacacctctgcatgtgtgtgctgagaagggccactcccaggtgcttcaggcgattcagaagggagcagtgggaagtaatcagtttgtggatcttgaggcaactaactatgatggcctgactccccttcactgtgcagtcatagcccacaatgctgtggtccatgaactccagagaaatcaacagcctcattcacctgaagttcaggagcttttactgaagaataagagtctggttgataccattaagtgcctaattcaaatgggagcagcggtggaagcgaaggatcgcaaaagtggccgcacagccctgcatttggcagctgaagaagcaaatctggaactcattcgcctctttttggagctgcccagttgcctgtcttttgtgaatgcaaaggcttacaatggcaacactgccctccatgttgctgccagcctgcagtatcggttgacacaattagatgctgtccgcctgttgatgaggaagggagcagacccaagtactcggaacttggagaacgaacagccagtgcatttggttcccgatggccctgtgggagaacagatccgacgtatcctgaagggaaagtccattcagcagagagctccaccgtattagctccattagcttggagcctggctagcaacactcactgtcagttaggcagtcctgatgtatctgtacatagaccatttgccttatattggcaaatgtaagttgtttctatgaaacaaacatatttagttcactattatatagtgggttatattaaaagaaaagaagaaaaatatctaatttctcttggcagatttgcatatttcatacccaggtatctgggatctagacatctgaatttgatctcaatggtaacattgccttcaattaacagtagcttttgagtaggaaaggactttgatttgtggcacaaaacattattaatatagctattgacagtttcaaagcaggtaaattgtaaatgtttctttaagaaaaagcatgtgaaaggaaaaaggtaaatacagcattgaggcttcatttggccttagtccctgggagttactggcgttggacaggcttcagtcattggactagatgaaaggtgtccatggttagaatttgatctttgcaaactgtatataattgttatttttgtccttaaaaatattgtacatacttggttgttaacatggtcatatttgaaatgtataagtccataaaatagaaaagaacaagtgaattgttgctatttaaaaaaattttacaattcttactaaggagtttttattgtgtaatcactaagtctttgtagataaagcagatggggagttacggagttgttcctttactggctgaaagatatattcgaattgtaaagatgctttttctcatgcattgaaattatacattatttgtagggaattgcatgcttttttttttttttctcccgagacagggtcttgctctggcgcccaggctggagtacagtggcatgatcttggctcacttcagccttgacttgggctcaagtgatcctcctacctgagccttctgagtaactgggactacaggtgtgcactcctcgcctggctaattttttattttttgtacaggcaggatcttgccaccttgcccaggctggtcttgaactcctgagctcatgccatctgcctgccttagtctcccaaaatgctgggattacaggagtgagccaccatgcccggctggcagttgcatggaagagaacacctctttatggcttaccctctagaatttctaatttatgtgttctgttgaaatttttgtttttttacctttattgaaacaacaaaaagtcagtattgaaacatatcttcctgttttctgttgtcaaatgatgataatgtgccatgatgttttatatatatcattcagaaaaagttttattttttaataacattctattaacattattttgcttttttttttttgggccccccccggccgcctttgggggggccgctggcatgcctgaggaatgtatttggctttgattacacactaagtttttgtaataaatttgactcattaaaaaccttttttttttaaaaaaaaaaaaaagaaaatctcattagtgaacttatctttgcagctgagtacttaaattctttttaaaaagataccctttggattgatcacattgtttgacccagtatgtcttgtagacacgttagttataatcaccttgtatctctaaatatggtgtgatatgaaccagtccattcacattggaaaaactgatggttttaaataaactaattcactaatattatttgtctta

SEQ ID NO: 457497 - DNA, 3510 bp, Homo sapiens
gagccggtggcgcaggtgtcggggtcctcgagcgcccagcctgggagcatgattgtggacaagctgctggacgacagccgcggcggagaggggctgcgggacgcggcgggcggctgcggcctcatgaccagcccgctcaacctgagctacttctacggcgcgtcgccgcccgccgccgccccgggcgcctgcgacgccagctgctcggtcttgggcccctcggcgcccggctcgcccggctccgactcctccgacttctcctctgcctcgtcggtgtcctcctgcggcgccgtggagtcccggtcgagaggcggcgcccgcgccgagcgccagccagttgagccccatatgggggttggcaggcagcagagaggcccctttcaaggtgttcgggtaaagaactcagtgaaggaactcctgttgcacatccgaagtcataaacagaaggcttctggccaagctgtggatgattttaagacacaaggtgtgaacatagaacagttcagagaattgaagaacacagtatcatacagtgggaaaaggaaagggcccgattcgttgtctgatggacctgcttgcaaaaggccagctctgttgcattcccaatttttgacaccacctcaaacaccaacgcccggggagagcatggaagatgttcatctcaatgaacccaaacaggagagcagtgctgatctgcttcagaacattatcaacattaagaatgaatgcagccccgtttccctgaacacagttcaagttagctggctgaaccccgtggtggtccctcagagctcccccgcagagcagtgtcaggacttccatggagggcaggtcttttctccacctcagaaatgccaaccattccaagtcaggggctcccaacaaatgatagaccaggcttccctgtaccagtattctccacagaaccagcatgtagagcagcagccacactacacccacaaaccaactctggaatacagtccttttcccatacctccccagtcccccgcttatgaaccaaacctctttgatggtccagaatcacagttttgcccaaaccaaagcttagtttcccttcttggtgatcaaagggaatctgagaatattgctaatcccatgcagacttcctccagtgttcagcagcaaaatgatgctcacttgcacagcttcagcatgatgcccagcagcgcctgtgaggccatggtggggcacgagatggcctctgactcttcaaacacttcactgccattctcaaacatgggaaatccaatgaacaccacacagttagggaaatcactttttcagtggcaggtggagcaggaagaaagcaaattggcaaatatttcccaagaccagtttctttcaaaggatgcagatggtgacacgttccttcatattgctgttgcccaagggagaagggcactttcctatgttcttgcaagaaagatgaatgcacttcacatgctggatattaaagagcacaatggacagagtgcctttcaggtggcagtggctgccaatcagcatctcattgtgcaggatctggtgaacatcggggcacaggtgaacaccacagactgctggggaagaacacctctgcatgtgtgtgctgagaagggccactcccaggtgcttcaggcgattcagaagggagcagtgggaagtaatcagtttgtggatcttgaggcaactaactatgatggcctgactccccttcactgtgcagtcatagcccacaatgctgtggtccatgaactccagagaaatcaacagcctcattcacctgaagttcaggagcttttactgaagaataagagtctggttgataccattaagtgcctaattcaaatgggagcagcggtggaagcgaaggatcgcaaaagtggccgcacagccctgcatttggcagctgaagaagcaaatctggaactcattcgcctctttttggagctgcccagttgcctgtcttttgtgaatgcaaaggcttacaatggcaacactgccctccatgttgctgccagcctgcagtatcggttgacacaattagatgctgtccgcctgttgatgaggaagggagcagacccaagtactcggaacttggagaacgaacagccagtgcatttggttcccgatggccctgtgggagaacagatccgacgtatcctgaagggaaagtccattcagcagagagctccaccgtattagctccattagcttggagcctggctagcaacactcactgtcagttaggcagtcctgatgtatctgtacatagaccatttgccttatattggcaaatgtaagttgtttctatgaaacaaacatatttagttcactattatatagtgggttatattaaaagaaaagaagaaaaatatctaatttctcttggcagatttgcatatttcatacccaggtatctgggatctagacatctgaatttgatctcaatggtaacattgccttcaattaacagtagcttttgagtaggaaaggactttgatttgtggcacaaaacattattaatatagctattgacagtttcaaagcaggtaaattgtaaatgtttctttaagaaaaagcatgtgaaaggaaaaaggtaaatacagcattgaggcttcatttggccttagtccctgggagttactggcgttggacaggcttcagtcattggactagatgaaaggtgtccatggttagaatttgatctttgcaaactgtatataattgttatttttgtccttaaaaatattgtacatacttggttgttaacatggtcatatttgaaatgtataagtccataaaatagaaaagaacaagtgaattgttgctatttaaaaaaattttacaattcttactaaggagtttttattgtgtaatcactaagtctttgtagataaagcagatggggagttacggagttgttcctttactggctgaaagatatattcgaattgtaaagatgctttttctcatgcattgaaattatacattatttgtagggaattgcatgcttttttttttttttctcccgagacagggtcttgctctggcgcccaggctggagtacagtggcatgatcttggctcacttcagccttgacttgggctcaagtgatcctcctacctgagccttctgagtaactgggactacaggtgtgcactcctcgcctggctaattttttattttttgtacaggcaggatcttgccaccttgcccaggctggtcttgaactcctgagctcatgccatctgcctgccttagtctcccaaaatgctgggattacaggagtgagccaccatgcccggctggcagttgcatggaagagaacacctctttatggcttaccctctagaatttctaatttatgtgttctgttgaaatttttgtttttttttttttttttttttttgggggggggaggtctcaggggccccggggcggggagtgcggggaggtgatcgcgcgccagtgaaccctcaacctcggggtgtcaggtgatcctcgggg

SEQ ID NO: 457498 - DNA, 1954 bp, Homo sapiens
tgttttactttcttgaactcaaagattattataagagatctgaaataagtttaaaaggagtttagtatttttaaaagtcacctcaaaatcttgagaaatattgtgtgtatttcttcgtatacttacaagttaataggagtagtgtagatggtataagaaaggaatgaaactcagaaggaaatacaccacattggccataagaaataaacctcacaaattttatttgtttctcttccagatccgacgtatcctgaagggaaagtccattcagcagagagctccaccgtattagctccattagcttggagcctggctagcaacactcactgtcagttaggcagtcctgatgtatctgtacatagaccatttgccttatattggcaaatgtaagttgtttctatgaaacaaacatatttagttcactattatatagtgggttatattaaaagaaaagaagaaaaatatctaatttctcttggcagatttgcatatttcatacccaggtatctgggatctagacatctgaatttgatctcaatggtaacattgccttcaattaacagtagcttttgagtaggaaaggactttgatttgtggcacaaaacattattaatatagctattgacagtttcaaagcaggtaaattgtaaatgtttctttaagaaaaagcatgtgaaaggaaaaaggtaaatacagcattgaggcttcatttggccttagtccctgggagttactggcgttggacaggcttcagtcattggactagatgaaaggtgtccatggttagaatttgatctttgcaaactgtatataattgttatttttgtccttaaaaatattgtacatacttggttgttaacatggtcatatttgaaatgtataagtccataaaatagaaaagaacaagtgaattgttgctatttaaaaaaattttacaattcttactaaggagtttttattgtgtaatcactaagtctttgtagataaagcagatggggagttacggagttgttcctttactggctgaaagatatattcgaattgtaaagatgctttttctcatgcattgaaattatacattatttgtagggaattgcatgcttttttttttttttctcccgagacagggtcttgctctggcgcccaggctggagtacagtggcatgatcttggctcacttcagccttgacttgggctcaagtgatcctcctacctgagccttctgagtaactgggactacaggtgtgcactcctcgcctggctaattttttattttttgtacaggcaggatcttgccaccttgcccaggctggtcttgaactcctgagctcatgccatctgcctgccttagtctcccaaaatgctgggattacaggagtgagccaccatgcccggctggcagttgcatggaagagaacacctctttatggcttaccctctagaatttctaatttatgtgttctgttgaaatttttgtttttttacctttattgaaacaacaaaaagtcagtattgaaacatatcttcctgttttctgttgtcaaatgatgataatgtgccatgatgttttatatatatcattcagaaaaagttttattttttaataacattctattaacattattttgcttgccgctggcatgcctgaggaatgtatttggctttgattacacactaagtttttgtaataaatttgactcattaaaaaccttttttttttaaaaaaaaaaaaaagaaaatctcattagtgaacttatctttgcagctgagtacttaaattctttttaaaaagataccctttggattgatcacattgtttgacccagtatgtcttgtagacacgttagttataatcaccttgtatctctaaatatggtgtgatatgaaccagtccattcacattggaaaaactgatggttttaaataaactaattcactaatattatttgtctta

SEQ ID NO: 457499 - DNA, 2970 bp, Homo sapiens
gagccggtggcgcaggtgtcggggtcctcgagcgcccagcctgggagcatgattgtggacaagctgctggacgacagccgcggcggagaggggctgcgggacgcggcgggcggctgcggcctcatgaccagcccgctcaacctgagctacttctacggcgcgtcgccgcccgccgccgccccgggcgcctgcgacgccagctgctcggtcttgggcccctcggcgcccggctcgcccggctccgactcctccgacttctcctctgcctcgtcggtgtcctcctgcggcgccgtggagtcccggtcgagaggcggcgcccgcgccgagcgccagccagttgagccccatatgggggttggcaggcagcagagaggcccctttcaaggtgttcgggtaaagaactcagtgaaggaactcctgttgcacatccgaagtcataaacagaaggcttctggccaagctgtggatgattttaagacacaaggtgtgaacatagaacagttcagagaattgaagaacacagtatcatacagtgggaaaaggaaagggcccgattcgttgtctgatggacctgcttgcaaaaggccagctctgttgcattcccaatttttgacaccacctcaaacaccaacgcccggggagagcatggaagatgttcatctcaatgaacccaaacaggagagcagtgctgatctgcttcagaacattatcaacattaagaatgaatgcagccccgtttccctgaacacagttcaagttagctggctgaaccccgtggtggtccctcagagctcccccgcagagcagtgtcaggacttccatggagggcaggtcttttctccacctcagaaatgccaaccattccaagtcaggggctcccaacaaatgatagaccaggcttccctgtaccagtattctccacagaaccagcatgtagagcagcagccacactacacccacaaaccaactctggaatacagtccttttcccatacctccccagtcccccgcttatgaaccaaacctctttgatggtccagaatcacagttttgcccaaaccaaagcttagtttcccttcttggtgatcaaagggaatctgagaatattgctaatcccatgcagacttcctccagtgttcagcagcaaaatgatgctcacttgcacagcttcagcatgatgcccagcagcgcctgtgaggccatggtggggcacgagatggcctctgactcttcaaacacttcactgccattctcaaacatgggaaatccaatgaacaccacacagttagggaaatcactttttcagtggcaggtggagcaggaagaaagcaaattggcaaatatttcccaagaccagtttctttcaaaggatgcagatggtgacacgttccttcatattgctgttgcccaagggagaagggcactttcctatgttcttgcaagaaagatgaatgcacttcacatgctggatattaaagagcacaatggacagagtgcctttcaggtggcagtggctgccaatcagcatctcattgtgcaggatctggtgaacatcggggcacaggtgaacaccacagactgctggggaagaacacctctgcatgtgtgtgctgagaagggccactcccaggtgcttcaggtaagaggcagcaaaccaggcttccatcattgcaaggccagagagatagagttggatattagaagtcggatataggttgcctgttgcaatgatctattttgagttaacttattcatttcttggggattctaataggtatatgcgcagcttatgtagctaacagatgtctgtttttaaaatctgcaggcgattcagaagggagcagtgggaagtaatcagtttgtggatcttgaggcaactaactatgatggtaagcaactgaaactttattagattcagagccacttagggggaaccataaggtctaagggtgctaagtatactaagaaggaaggtaattaaagctaaaatattctgtaggtaaaattagacccaaaaagagacaatattcagattgccttactagttcttgtggagcccatttataggttaagttagaggccatcctcagcatttgtcattatagaaggaccaaaagacctgatgggatgcttgaccactgcttgattatacttttcttctaggcctgactccccttcactgtgcagtcatagcccacaatgctgtggtccatgaactccagagaaatcaacagcctcattcacctgaagttcaggagcttttactgaagaataagagtctggttgataccattaagtgcctaattcaaatgggagcagcggtggaagcgaaggtaaattcacagaaaaggtttaagatggggtaggggagaaactggttatatagcaaaagaccttgcttccaagtacagattcaaacttctttcttttttttctgaaattaatggtgtgagtagcaatgtatgggtggttaagaagcccagaatttttttttttttttgagacagagtctcactgtgtcgcccaggctggaatgcagtggtgcgatcttggctcactgcaacctccgactccctggttcaagcgattctcctgcctcagcctgcccagtagctgggactacaggtgcctaccaccacacccagctaattttttgtatttttagtagagacggggtttcaccatgttagccaggatggtctcgatctcctgacctcgtgatctgcccgcctcggcctcccgaagtgctgggattacaggcgtgagccaccgcgcccggccaagaagcccagattttaacagatcatttcatgtgttttcttgatttgctttaaatccatgaattattatccaaaaggtcatttaggtataaaataaatagtctttgaaaggtaaaagaaaatgcttgaaattgatattgtcattttggcttccattttcatacactgagaataaaggtgctttttgtaag

SEQ ID NO: 457500 - DNA, 526 bp, Homo sapiens
ctgtgggtttttccctcagtcatagtttagtttcatattccttgttatgataacattgtatgtttaaaatatcttttttcctctggatatccacagagtgcctttcaggtggcagtggctgccaatcagcatctcattgtgcaggatctggtgaacatcggggcacaggtgaacaccacagactgctggggaagaacacctctgcatgtgtgtgctgagaagggccactcccaggtgcttcaggtaagaggcagcaaaccaggcttccatcattgcaaggccagagagatagagttggatattagaagtcggatataggttgcctgttgcaatgatctattttgagttaacttattcatttcttggggattctaataggtatatgcgcagcttatgtagctaacagatgtctgtttttaaaatctgcaggcgattcagaagggagcagtgggaagtaatcagtttgtggatcttgaggcaactaactatgatggtaagcaactgaaactttattagattcagagcc

SEQ ID NO: 457501 - DNA, 426 bp, Homo sapiens
ctgagagatagagaggcttaatttgggtttacctattggctctgaggatccttgaccaaatttttatgaactttaatttcttagggtacccagtggagaaaggtatcaggcaacttaggacctttgagcagagctcgggactcacaaggccattgattgaccagagcaagttggaaaggttttgcaatgtgctgcttggggactttatacattaggcaacagctatacttttgggattattaacgtttatgtctgtgaagatatttaaccaggaatatgttttgttttcttttgaacagttgagccccatatgggggttggcaggcagcagagaggcccctttcaaggtgttcgggtaaagaactcagtgaaggaactcctgttgcacatccgaagtcataaacagaaggcttctggccaagctgt

SEQ ID NO: 457502 - DNA, 604 bp, Homo sapiens
aatccaatgaacaccacacagttagggaaatcactttttcagtggcaggtggagcaggaagaaagcaaattggcaaatatttcccaagaccagtttctttcaaaggatgcagatggtgacacgtgagtattcttttatctcatgttcttaattaggtaagccacacttgttggactagtgagcatataatttttctagggtataacaaggtataccttagttagtggttggctaaccaagatgactggtgtagatagaaaccgccactcagtgatagctagtatgtcaagaaagggttttccttcaaaaaattttttggctgaacagataatctgttctaaattgataaaaatatctgtatcttcttgattaattgagtttggaagaccagcgtagactatgtctatagaacagaaacagttagatcatgattagggataaactgtgagttggtttgtagattgatcttaatctgtcctgatgtctttgtggccttgggcaagttatttaacctccttaggtctcagttccttgacgtgtaaaatgataatacctcttgtataggggttttatgagtattaaaaataatagatttaagttgatc

SEQ ID NO: 457503 - DNA, 3867 bp, Homo sapiens
gagccggtggcgcaggtgtcggggtcctcgagcgcccagcctgggagcatgattgtggacaagctgctggacgacagccgcggcggagaggggctgcgggacgcggcgggcggctgcggcctcatgaccagcccgctcaacctgagctacttctacggcgcgtcgccgcccgccgccgccccgggcgcctgcgacgccagctgctcggtcttgggcccctcggcgcccggctcgcccggctccgactcctccgacttctcctctgcctcgtcggtgtcctcctgcggcgccgtggagtcccggtcgagaggcggcgcccgcgccgagcgccagccagttgagccccatatgggggttggcaggcagcagagaggcccctttcaaggtgttcgggtaaagaactcagtgaaggaactcctgttgcacatccgaagtcataaacagaaggcttctggccaagctgtggatgattttaagacacaaggtgtgaacatagaacagttcagagaattgaagaacacagtatcatacagtgggaaaaggaaagggcccgattcgttgtctgatggacctgcttgcaaaaggccagctctgttgcattcccaatttttgacaccacctcaaacaccaacgcccggggagagcatggaagatgttcatctcaatgaacccaaacaggagagcagtgctgatctgcttcagaacattatcaacattaagaatgaatgcagccccgtttccctgaacacagttcaagttagctggctgaaccccgtggtggtccctcagagctcccccgcagagcagtgtcaggacttccatggagggcaggtcttttctccacctcagaaatgccaaccattccaagtcaggggctcccaacaaatgatagaccaggcttccctgtaccagtattctccacagaaccagcatgtagagcagcagccacactacacccacaaaccaactctggaatacagtccttttcccatacctccccagtcccccgcttatgaaccaaacctctttgatggtccagaatcacagttttgcccaaaccaaagcttagtttcccttcttggtgatcaaagggaatctgagaatattgctaatcccatgcagacttcctccagtgttcagcagcaaaatgatgctcacttgcacagcttcagcatgatgcccagcagcgcctgtgaggccatggtggggcacgagatggcctctgactcttcaaacacttcactgccattctcaaacatgggaaatccaatgaacaccacacagttagggaaatcactttttcagtggcaggtggagcaggaagaaagcaaattggcaaatatttcccaagaccagtttctttcaaaggatgcagatggtgacacgttccttcatattgctgttgcccaagggagaagggcactttcctatgttcttgcaagaaagatgaatgcacttcacatgctggatattaaagagcacaatggacagagtgcctttcaggtggcagtggctgccaatcagcatctcattgtgcaggatctggtgaacatcggggcacaggtgaacaccacagactgctggggaagaacacctctgcatgtgtgtgctgagaagggccactcccaggtgcttcaggcgattcagaagggagcagtgggaagtaatcagtttgtggatcttgaggcaactaactatgatggcctgactccccttcactgtgcagtcatagcccacaatgctgtggtccatgaactccagagaaatcaacagcctcattcacctgaagttcaggagcttttactgaagaataagagtctggttgataccattaagtgcctaattcaaatgggagcagcggtggaagcgaaggatcgcaaaagtggccgcacagccctgcatttggcagctgaagaagcaaatctggaactcattcgcctctttttggagctgcccagttgcctgtcttttgtgaatgcaaaggcttacaatggcaacactgccctccatgttgctgccagcctgcagtatcggttgacacaattagatgctgtccgcctgttgatgaggaagggagcagacccaagtactcggaacttggagaacgaacagccagtgcatttggttcccgatggccctgtgggagaacagatccgacgtatcctgaagggaaagtccattcagcagagagctccaccgtattagctccattagcttggagcctggctagcaacactcactgtcagttaggcagtcctgatgtatctgtacatagaccatttgccttatattggcaaatgtaagttgtttctatgaaacaaacatatttagttcactattatatagtgggttatattaaaagaaaagaagaaaaatatctaatttctcttggcagatttgcatatttcatacccaggtatctgggatctagacatctgaatttgatctcaatggtaacattgccttcaattaacagtagcttttgagtaggaaaggactttgatttgtggcacaaaacattattaatatagctattgacagtttcaaagcaggtaaattgtaaatgtttctttaagaaaaagcatgtgaaaggaaaaaggtaaatacagcattgaggcttcatttggccttagtccctgggagttactggcgttggacaggcttcagtcattggactagatgaaaggtgtccatggttagaatttgatctttgcaaactgtatataattgttatttttgtccttaaaaatattgtacatacttggttgttaacatggtcatatttgaaatgtataagtccataaaatagaaaagaacaagtgaattgttgctatttaaaaaaattttacaattcttactaaggagtttttattgtgtaatcactaagtctttgtagataaagcagatggggagttacggagttgttcctttactggctgaaagatatattcgaattgtaaagatgctttttctcatgcattgaaattatacattatttgtagggaattgcatgcttttttttttttttctcccgagacagggtcttgctctggcgcccaggctggagtacagtggcatgatcttggctcacttcagccttgacttgggctcaagtgatcctcctacctgagccttctgagtaactgggactacaggtgtgcactcctcgcctggctaattttttattttttgtacaggcaggatcttgccaccttgcccaggctggtcttgaactcctgagctcatgccatctgcctgccttagtctcccaaaatgctgggattacaggagtgagccaccatgcccggctggcagttgcatggaagagaacacctctttatggcttaccctctagaatttctaatttatgtgttctgttgaaatttttgtttttttacctttattgaaacaacaaaaagtcagtattgaaacatatcttcctgttttctgttgtcaaatgatgataatgtgccatgatgttttatatatatcattcagaaaaagttttattttttaataacattctattaacattattttgcttgccgctggcatgcctgaggaatgtatttggctttgattacacactaagtttttgtaataaatttgactcattaaaaaccttttttttttaaaaaaaaaaaaaagaaaatctcattagtgaacttatctttgcagctgagtacttaaattctttttaaaaagataccctttggattgatcacattgtttgacccagtatgtcttgtagacacgttagttataatcaccttgtatctctaaatatggtgtgatatgaaccagtccattcacattggaaaaactgatggttttaaataaactaattcactaatattatttgtctta

SEQ ID NO: 457504 - DNA, 3982 bp, Homo sapiens
ctcgctgccccctccctgcctcctctggccctcctcagtgcccacgcaacccggttcgaaagagaggatgaccgtattctgcattttagaaaacaggctcttagcttcccccgcccccgtcctcactagagtggagaactgaaagcgaacgctataaagggcgccagtgagaggggctggcctcctcttgccacgaggtcagacggcgagttcttagagaaaaaggctgcttagctgctgcttatcatgtaacctcaaaaggaaactgatcgtctttctcatgctgtcacgtacttgggttattatcgctgattacagctggaaacaattgatttgctcttacgtatttgtgtgacttgactcttcaaacacaaaggttaacaggaagatctcgagggccctggctgaacttcaccttttggctttcttggcctgatgctgaactctcgaggttgagccccatatgggggttggcaggcagcagagaggcccctttcaaggtgttcgggtaaagaactcagtgaaggaactcctgttgcacatccgaagtcataaacagaaggcttctggccaagctgtggatgattttaagacacaaggtgtgaacatagaacagttcagagaattgaagaacacagtatcatacagtgggaaaaggaaagggcccgattcgttgtctgatggacctgcttgcaaaaggccagctctgttgcattcccaatttttgacaccacctcaaacaccaacgcccggggagagcatggaagatgttcatctcaatgaacccaaacaggagagcagtgctgatctgcttcagaacattatcaacattaagaatgaatgcagccccgtttccctgaacacagttcaagttagctggctgaaccccgtggtggtccctcagagctcccccgcagagcagtgtcaggacttccatggagggcaggtcttttctccacctcagaaatgccaaccattccaagtcaggggctcccaacaaatgatagaccaggcttccctgtaccagtattctccacagaaccagcatgtagagcagcagccacactacacccacaaaccaactctggaatacagtccttttcccatacctccccagtcccccgcttatgaaccaaacctctttgatggtccagaatcacagttttgcccaaaccaaagcttagtttcccttcttggtgatcaaagggaatctgagaatattgctaatcccatgcagacttcctccagtgttcagcagcaaaatgatgctcacttgcacagcttcagcatgatgcccagcagcgcctgtgaggccatggtggggcacgagatggcctctgactcttcaaacacttcactgccattctcaaacatgggaaatccaatgaacaccacacagttagggaaatcactttttcagtggcaggtggagcaggaagaaagcaaattggcaaatatttcccaagaccagtttctttcaaaggatgcagatggtgacacgttccttcatattgctgttgcccaagggagaagggcactttcctatgttcttgcaagaaagatgaatgcacttcacatgctggatattaaagagcacaatggacagagtgcctttcaggtggcagtggctgccaatcagcatctcattgtgcaggatctggtgaacatcggggcacaggtgaacaccacagactgctggggaagaacacctctgcatgtgtgtgctgagaagggccactcccaggtgcttcaggcgattcagaagggagcagtgggaagtaatcagtttgtggatcttgaggcaactaactatgatggcctgactccccttcactgtgcagtcatagcccacaatgctgtggtccatgaactccagagaaatcaacagcctcattcacctgaagttcaggagcttttactgaagaataagagtctggttgataccattaagtgcctaattcaaatgggagcagcggtggaagcgaaggatcgcaaaagtggccgcacagccctgcatttggcagctgaagaagcaaatctggaactcattcgcctctttttggagctgcccagttgcctgtcttttgtgaatgcaaaggcttacaatggcaacactgccctccatgttgctgccagcctgcagtatcggttgacacaattagatgctgtccgcctgttgatgaggaagggagcagacccaagtactcggaacttggagaacgaacagccagtgcatttggttcccgatggccctgtgggagaacagatccgacgtatcctgaagggaaagtccattcagcagagagctccaccgtattagctccattagcttggagcctggctagcaacactcactgtcagttaggcagtcctgatgtatctgtacatagaccatttgccttatattggcaaatgtaagttgtttctatgaaacaaacatatttagttcactattatatagtgggttatattaaaagaaaagaagaaaaatatctaatttctcttggcagatttgcatatttcatacccaggtatctgggatctagacatctgaatttgatctcaatggtaacattgccttcaattaacagtagcttttgagtaggaaaggactttgatttgtggcacaaaacattattaatatagctattgacagtttcaaagcaggtaaattgtaaatgtttctttaagaaaaagcatgtgaaaggaaaaaggtaaatacagcattgaggcttcatttggccttagtccctgggagttactggcgttggacaggcttcagtcattggactagatgaaaggtgtccatggttagaatttgatctttgcaaactgtatataattgttatttttgtccttaaaaatattgtacatacttggttgttaacatggtcatatttgaaatgtataagtccataaaatagaaaagaacaagtgaattgttgctatttaaaaaaattttacaattcttactaaggagtttttattgtgtaatcactaagtctttgtagataaagcagatggggagttacggagttgttcctttactggctgaaagatatattcgaattgtaaagatgctttttctcatgcattgaaattatacattatttgtagggaattgcatgcttttttttttttttctcccgagacagggtcttgctctggcgcccaggctggagtacagtggcatgatcttggctcacttcagccttgacttgggctcaagtgatcctcctacctgagccttctgagtaactgggactacaggtgtgcactcctcgcctggctaattttttattttttgtacaggcaggatcttgccaccttgcccaggctggtcttgaactcctgagctcatgccatctgcctgccttagtctcccaaaatgctgggattacaggagtgagccaccatgcccggctggcagttgcatggaagagaacacctctttatggcttaccctctagaatttctaatttatgtgttctgttgaaatttttgtttttttacctttattgaaacaacaaaaagtcagtattgaaacatatcttcctgttttctgttgtcaaatgatgataatgtgccatgatgttttatatatatcattcagaaaaagttttattttttaataacattctattaacattattttgcttgccgctggcatgcctgaggaatgtatttggctttgattacacactaagtttttgtaataaatttgactcattaaaaaccttttttttttaaaaaaaaaaaaaagaaaatctcattagtgaacttatctttgcagctgagtacttaaattctttttaaaaagataccctttggattgatcacattgtttgacccagtatgtcttgtagacacgttagttataatcaccttgtatctctaaatatggtgtgatatgaaccagtccattcacattggaaaaactgatggttttaaataaactaattcactaatattatttgtctta

SEQ ID NO: 457505 - DNA, 3813 bp, Homo sapiens
gagccggtggcgcaggtgtcggggtcctcgagcgcccagcctgggagcatgattgtggacaagctgctggacgacagccgcggcggagaggggctgcgggacgcggcgggcggctgcggcctcatgaccagcccgctcaacctgagctacttctacggcgcgtcgccgcccgccgccgccccgggcgcctgcgacgccagctgctcggtcttgggcccctcggcgcccggctcgcccggctccgactcctccgacttctcctctgcctcgtcggtgtcctcctgcggcgccgtggagtcccggtcgagaggcggcgcccgcgccgagcgccagccagttgagccccatatgggggttggcaggcagcagagaggcccctttcaaggtgttcgggtaaagaactcagtgaaggaactcctgttgcacatccgaagtcataaacagaaggcttctggccaagctgtggatgattttaagacacaaggtgtgaacatagaacagttcagagaattgaagaacacagtatcatacagtgggaaaaggaaagggcccgattcgttgtctgatggacctgcttgcaaaaggccagctctgttgcattcccaatttttgacaccacctcaaacaccaacgcccggggagagcatggaagatgttcatctcaatgaacccaaacaggagagcagtgctgatctgcttcagaacattatcaacattaagaatgaatgcagccccgtttccctgaacacagttcaagttagctggctgaaccccgtggtggtccctcagagctcccccgcagagcagtgtcaggacttccatggagggcaggtcttttctccacctcagaaatgccaaccattccaagtcaggggctcccaacaaatgatagaccaggcttccctgtaccagtattctccacagaaccagcatgtagagcagcagccacactacacccacaaaccaactctggaatacagtccttttcccatacctccccagtcccccgcttatgaaccaaacctctttgatggtccagaatcacagttttgcccaaaccaaagcttagtttcccttcttggtgatcaaagggaatctgagaatattgctaatcccatgcagacttcctccagtgttcagcagcaaaatgatgctcacttgcacagcttcagcatgatgcccagcagcgcctgtgaggccatggtggggcacgagatggcctctgactcttcaaacacttcactgccattctcaaacatgggaaatccaatgaacaccacacagttagggaaatcactttttcagtggcaggtggagcaggaagaaagcaaattggcaaatatttcccaagaccagtttctttcaaaggatgcagatggtgacacgttccttcatattgctgttgcccaagggagaagggcactttcctatgttcttgcaagaaagatgaatgcacttcacatgctggatattaaagagcacaatggacagagtgcctttcaggtggcagtggctgccaatcagcatctcattgtgcaggatctggtgaacatcggggcacaggtgaacaccacagactgctggggaagaacacctctgcatgtgtgtgctgagaagggccactcccaggtgcttcaggcgattcagaagggagcagtgggaagtaatcagtttgtggatcttgaggcaactaactatgatggcctgactccccttcactgtgcagtcatagcccacaatgctgtggtccatgaactccagagaaatcaacagcctcattcacctgaagttcaggagcttttactgaagaataagagtctggttgataccattaagtgcctaattcaaatgggagcagcggtggaagcgaaggatcgcaaaagtggccgcacagccctgcatttggcagctgaagaagcaaatctggaactcattcgcctctttttggagctgcccagttgcctgtcttttgtgaatgcaaaggcttacaatggcaacactgccctccatgttgctgccagcctgcagtatcggttgacacaattagatgctgtccgcctgttgatgaggaagggagcagacccaagtactcggaacttggagaacgaacagccagtgcatttggttcccgatggccctgtgggagaacagatccgacgtatcctgaagggaaagtccattcagcagagagctccaccgtattagctccattagcttggagcctggctagcaacactcactgtcagttaggcagtcctgatgtatctgtacatagaccatttgccttatattggcaaatgtaagttgtttctatgaaacaaacatatttagttcactattatatagtgggttatattaaaagaaaagaagaaaaatatctaatttctcttggcagatttgcatatttcatacccaggtatctgggatctagacatctgaatttgatctcaatggtaacattgccttcaattaacagtagcttttgagtaggaaaggactttgatttgtggcacaaaacattattaatatagctattgacagtttcaaagcaggtaaattgtaaatgtttctttaagaaaaagcatgtgaaaggaaaaaggtaaatacagcattgaggcttcatttggccttagtccctgggagttactggcgttggacaggcttcagtcattggactagatgaaaggtgtccatggttagaatttgatctttgcaaactgtatataattgttatttttgtccttaaaaatattgtacatacttggttgttaacatggtcatatttgaaatgtataagtccataaaatagaaaagaacaagtgaattgttgctatttaaatagataaagcagatggggagttacggagttgttcctttactggctgaaagatatattcgaattgtaaagatgctttttctcatgcattgaaattatacattatttgtagggaattgcatgcttttttttttttttctcccgagacagggtcttgctctggcgcccaggctggagtacagtggcatgatcttggctcacttcagccttgacttgggctcaagtgatcctcctacctgagccttctgagtaactgggactacaggtgtgcactcctcgcctggctaattttttattttttgtacaggcaggatcttgccaccttgcccaggctggtcttgaactcctgagctcatgccatctgcctgccttagtctcccaaaatgctgggattacaggagtgagccaccatgcccggctggcagttgcatggaagagaacacctctttatggcttaccctctagaatttctaatttatgtgttctgttgaaatttttgtttttttacctttattgaaacaacaaaaagtcagtattgaaacatatcttcctgttttctgttgtcaaatgatgataatgtgccatgatgttttatatatatcattcagaaaaagttttattttttaataacattctattaacattattttgcttgccgctggcatgcctgaggaatgtatttggctttgattacacactaagtttttgtaataaatttgactcattaaaaaccttttttttttaaaaaaaaaaaaaagaaaatctcattagtgaacttatctttgcagctgagtacttaaattctttttaaaaagataccctttggattgatcacattgtttgacccagtatgtcttgtagacacgttagttataatcaccttgtatctctaaatatggtgtgatatgaaccagtccattcacattggaaaaactgatggttttaaataaactaattcactaatattatttgtctta

SEQ ID NO: 457506 - DNA, 3666 bp, Homo sapiens
gagccggtggcgcaggtgtcggggtcctcgagcgcccagcctgggagcatgattgtggacaagctgctggacgacagccgcggcggagaggggctgcgggacgcggcgggcggctgcggcctcatgaccagcccgctcaacctgagctacttctacggcgcgtcgccgcccgccgccgccccgggcgcctgcgacgccagctgctcggtcttgggcccctcggcgcccggctcgcccggctccgactcctccgacttctcctctgcctcgtcggtgtcctcctgcggcgccgtggagtcccggtcgagaggcggcgcccgcgccgagcgccagccagttgagccccatatgggggttggcaggcagcagagaggcccctttcaaggtgttcgggtaaagaactcagtgaaggaactcctgttgcacatccgaagtcataaacagaaggcttctggccaagctgtggatgattttaagacacaaggtgtgaacatagaacagttcagagaattgaagaacacagtatcatacagtgggaaaaggaaagggcccgattcgttgtctgatggacctgcttgcaaaaggccagctctgttgcattcccaatttttgacaccacctcaaacaccaacgcccggggagagcatggaagatgttcatctcaatgaacccaaacaggagagcagtgctgatctgcttcagaacattatcaacattaagaatgaatgcagccccgtttccctgaacacagttcaagttagctggctgaaccccgtggtggtccctcagagctcccccgcagagcagtgtcaggacttccatggagggcaggtcttttctccacctcagaaatgccaaccattccaagtcaggggctcccaacaaatgatagaccaggcttccctgtaccagtattctccacagaaccagcatgtagagcagcagccacactacacccacaaaccaactctggaatacagtccttttcccatacctccccagtcccccgcttatgaaccaaacctctttgatggtccagaatcacagttttgcccaaaccaaagcttagtttcccttcttggtgatcaaagggaatctgagaatattgctaatcccatgcagacttcctccagtgttcagcagcaaaatgatgctcacttgcacagcttcagcatgatgcccagcagcgcctgtgaggccatggtggggcacgagatggcctctgactcttcaaacacttcactgccattctcaaacatgggaaatccaatgaacaccacacagttagggaaatcactttttcagtggcaggtggagcaggaagaaagcaaattggcaaatatttcccaagaccagtttctttcaaaggatgcagatggtgacacgttccttcatattgctgttgcccaagggagaagggcactttcctatgttcttgcaagaaagatgaatgcacttcacatgctggatattaaagagcacaatggacagagtgcctttcaggtggcagtggctgccaatcagcatctcattgtgcaggatctggtgaacatcggggcacaggtgaacaccacagactgctggggaagaacacctctgcatgtgtgtgctgagaagggccactcccaggtgcttcaggcgattcagaagggagcagtgggaagtaatcagtttgtggatcttgaggcaactaactatgatggcctgactccccttcactgtgcagtcatagcccacaatgctgtggtccatgaactccagagaaatcaacagcctcattcacctgaagttcaggagcttttactgaagaataagagtctggttgataccattaagtgcctaattcaaatgggagcagcggtggaagcgaaggatcgcaaaagtggccgcacagccctgcatttggcagctgaagaagcaaatctggaactcattcgcctctttttggagctgcccagttgcctgtcttttgtgaatgcaaaggcttacaatggcaacactgccctccatgttgctgccagcctgcagtatcggttgacacaattagatgctgtccgcctgttgatgaggaagggagcagacccaagtactcggaacttggagaacgaacagccagtgcatttggttcccgatggccctgtgggagaacagatccgacgtatcctgaagggaaagtccattcagcagagagctccaccgtattagctccattagcttggagcctggctagcaacactcactgtcagttaggcagtcctgatgtatctgtacatagaccatttgccttatattggcaaatgtaagttgtttctatgaaacaaacatatttagttcactattatatagtgggttatattaaaagaaaagaagaaaaatatctaatttctcttggcagatttgcatatttcatacccaggtatctgggatctagacatctgaatttgatctcaatggtaacattgccttcaattaacagtagcttttgagtaggaaaggactttgatttgtggcacaaaacattattaatatagctattgacagtttcaaagcaggtaaattgtaaatgtttctttaagaaaaagcatgtgaaaggaaaaaggtaaatacagcattgaggcttcatttggccttagtccctgggagttactggcgttggacaggcttcagtcattggactagatgaaaggtgtccatggttagaatttgatctttgcaaactgtatataattgttatttttgtccttaaaaatattgtacatacttggttgttaacatggtcatatttgaaatgtataagtccataaaatagaaaagaacaagtgaattgttgctatttaaaaaaattttacaattcttactaaggagtttttattgtgtaatcactaagtctttgtagataaagcagatggggagttacggagttgttcctttactggctgaaagatatattcgaattgtaaagatgctttttctcatgcattgaaattatacattatttgtagggaattgcatgcttttttttttttttctcccgagacagggtcttgctctggcgcccaggctggagtacagtggcatgatcttggctcacttcagccttgacttgggctcaagtgatcctcctacctgagccttctgagtaactgggactacaggtgtgcactcctcgcctggctaattttttattttttgtacaggcaggatcttgccaccttgcccaggctggtcttgaactcctgagctcatgccatctgcctgccttagtctcccaaaatgctgggattacaggagtgagccaccatgcccggctggcagttgcatggaagagaacacctctttatggcttaccctctagaatttctaatttatgtgttctgttgaaatttttgtttttttacctttattgaaacaacaaaaagtcagtattgaaacatatcttcctgttttctgttgtcaaatgatgataatgtgccatgatgttttatatatatcattcagaaaaagttttattttttaataacattctattaacattattttgcttgccgctggcatgcctgaggaatgtatttggctttgattacacactaagtttttgtaataaatttgactcattaaaaacctttttttttttttttttttttttttttttttttttttaaaaac

SEQ ID NO: 457507 - DNA, 1976 bp, Homo sapiens
atggccttctgtacaccctctcaaagtttttgagctcctttcatgaaatttcccccttcctgatgtctgataattcatttctttgtcttcaggcttacaatggcaacactgccctccatgttgctgccagcctgcagtatcggttgacacaattagatgctgtccgcctgttgatgaggaagggagcagacccaagtactcggaacttggagaacgaacagccagtgcatttggttcccgatggccctgtgggagaacagatccgacgtatcctgaagggaaagtccattcagcagagagctccaccgtattagctccattagcttggagcctggctagcaacactcactgtcagttaggcagtcctgatgtatctgtacatagaccatttgccttatattggcaaatgtaagttgtttctatgaaacaaacatatttagttcactattatatagtgggttatattaaaagaaaagaagaaaaatatctaatttctcttggcagatttgcatatttcatacccaggtatctgggatctagacatctgaatttgatctcaatggtaacattgccttcaattaacagtagcttttgagtaggaaaggactttgatttgtggcacaaaacattattaatatagctattgacagtttcaaagcaggtaaattgtaaatgtttctttaagaaaaagcatgtgaaaggaaaaaggtaaatacagcattgaggcttcatttggccttagtccctgggagttactggcgttggacaggcttcagtcattggactagatgaaaggtgtccatggttagaatttgatctttgcaaactgtatataattgttatttttgtccttaaaaatattgtacatacttggttgttaacatggtcatatttgaaatgtataagtccataaaatagaaaagaacaagtgaattgttgctatttaaaaaaattttacaattcttactaaggagtttttattgtgtaatcactaagtctttgtagataaagcagatggggagttacggagttgttcctttactggctgaaagatatattcgaattgtaaagatgctttttctcatgcattgaaattatacattatttgtagggaattgcatgcttttttttttttttctcccgagacagggtcttgctctggcgcccaggctggagtacagtggcatgatcttggctcacttcagccttgacttgggctcaagtgatcctcctacctgagccttctgagtaactgggactacaggtgtgcactcctcgcctggctaattttttattttttgtacaggcaggatcttgccaccttgcccaggctggtcttgaactcctgagctcatgccatctgcctgccttagtctcccaaaatgctgggattacaggagtgagccaccatgcccggctggcagttgcatggaagagaacacctctttatggcttaccctctagaatttctaatttatgtgttctgttgaaatttttgtttttttacctttattgaaacaacaaaaagtcagtattgaaacatatcttcctgttttctgttgtcaaatgatgataatgtgccatgatgttttatatatatcattcagaaaaagttttattttttaataacattctattaacattattttgcttgccgctggcatgcctgaggaatgtatttggctttgattacacactaagtttttgtaataaatttgactcattaaaaaccttttttttttaaaaaaaaaaaaaagaaaatctcattagtgaacttatctttgcagctgagtacttaaattctttttaaaaagataccctttggattgatcacattgtttgacccagtatgtcttgtagacacgttagttataatcaccttgtatctctaaatatggtgtgatatgaaccagtccattcacattggaaaaactgatggttttaaataaactaattcactaatattatttgtctta

SEQ ID NO: 457508 - DNA, 1720 bp, Homo sapiens
gagccggtggcgcaggtgtcggggtcctcgagcgcccagcctgggagcatgattgtggacaagctgctggacgacagccgcggcggagaggggctgcgggacgcggcgggcggctgcggcctcatgaccagcccgctcaacctgagctacttctacggcgcgtcgccgcccgccgccgccccgggcgcctgcgacgccagctgctcggtcttgggcccctcggcgcccggctcgcccggctccgactcctccgacttctcctctgcctcgtcggtgtcctcctgcggcgccgtggagtcccggtcgagaggcggcgcccgcgccgagcgccagccagttgagccccatatgggggttggcaggcagcagagaggcccctttcaaggtgttcgggtaaagaactcagtgaaggaactcctgttgcacatccgaagtcataaacagaaggcttctggccaagctgtggatgattttaagacacaaggtgtgaacatagaacagttcagagaattgaagaacacagtatcatacagtgggaaaaggaaagggcccgattcgttgtctgatggacctgcttgcaaaaggccagctctgttgcattcccaatttttgacaccacctcaaacaccaacgcccggggagagcatggaagatgttcatctcaatgaacccaaacaggagagcagtgctgatctgcttcagaacattatcaacattaagaatgaatgcagccccgtttccctgaacacagttcaagttagctggctgaaccccgtggtggtccctcagagctcccccgcagagcagtgtcaggacttccatggagggcaggtcttttctccacctcagaaatgccaaccattccaagtcaggggctcccaacaaatgatagaccaggcttccctgtaccagtattctccacagaaccagcatgtagagcagcagccacactacacccacaaaccaactctggaatacagtccttttcccatacctccccagtcccccgcttatgaaccaaacctctttgatggtccagaatcacagttttgcccaaaccaaagcttagtttcccttcttggtgatcaaagggaatctgagaatattgctaatcccatgcagacttcctccagtgttcagcagcaaaatgatgctcacttgcacagcttcagcatgatgcccagcagcgcctgtgaggccatggtggggcacgagatggcctctgactcttcaaacacttcactgccattctcaaacatgggaaatccaatgaacaccacacagttagggaaatcactttttcagtggcaggtggagcaggaagaaagcaaattggcaaatatttcccaagaccagtttctttcaaaggatgcagatggtgacacgtgagtattcttttatctcatgttcttaattaggtaagccacacttgttggactagtgagcatataatttttctagggtataacaaggtataccttagttagtggttggctaaccaagatgactggtgtagatagaaaccgccactcagtgatagctagtatgtcaagaaagggttttccttcaaaaaattttttggctgaacagataatctgttctaaattgatatctatagaacagaaacagttagatcatgattagggataaactgtgagttggtttgtagattgatcttaatctgtcctgatgtctttgtggccttgggcaagttatttaa

SEQ ID NO: 457509 - DNA, 260 bp, Homo sapiens
gaatgcaaagttaaccatgcagagaagggtgagggggaagccaggcagagagtatggtgagtgcagaagccctaaggagtgaaagttatcttcattcacttaacaggcattgagagcccaaatatgccagtcagaattccaggtactggggctacagcagaaaaccaaacaagtctctgccctcatggatcttacattagaggtgtaacagaggaggagagactgacaagcaaataggtgaatatgtgatatagcgtcaa

SEQ ID NO: 457510 - DNA, 3797 bp, Homo sapiens
attcgaaagaaaaatccaacttatgaattgtcattaatgcaaaattatttatcagaaaatcgtagagcactggaaccccatcatttcacagatgagaagaccagaagcaaaatgacctgccagagttgcagactgacaactgctgccttggcctagtcaagcccagacaggcatctcctactgccttaatttgggggcatctttctaggaccctgatctgcctccacatcttgaaggattttcaagatagccatgtttcacaaaggaacgagggcagctgtgtttagagtggtcaaatttctgattctgtttttttgcttaggaacctttcacaaccttcttcctcaatgcaaatgatggaaaatttgatcatccagatcgaaccttctcatccgttgcaaggtcttggagaactagtcagagagatacttctgatgtaaaggaactaattccagagttctactacctaccagagatgtttgtcaacagtaatggatataatcttggagtcagagaagatgaagtagtggtaaatgatgttgatcttcccccttgggcaaaaaaacctgaagactttgtgcggatcaacaggatggccctagaaagtgaatttgtttcttgccaacttcatcagtggatcgaccttatatttggctataagcagcgaggaccagaagcagttcgtgctctgaatgtttttcactacttgacttatgaaggctctgtgaacctggatagtatcactgatcctgtgctcagggagattccagaagcttatttcattagagacccccacactttccttcttacaaaggactttattaaggccatggaggcacagatacagaactttggacagacgccatctcagttgcttattgagccacatccgcctcggagctctgccatgcacctgtgtttccttccacagagtccgctcatgtttaaagatcagatgcaacaggatgtgataatggtgctgaagtttccttcaaattctccagtaacccatgtggcagccaacactctgccccacttgaccatccccgcagtggtgacagtgacttgcagccgactctttgcagtgaatagatggcacaacacagtaggcctcagaggagctccaggatactccttggatcaagcccaccatcttcccattgaaatggatccattaatagccaataattcaggtgtaaacaaacggcagatcacagacctcgttgaccagagtatacaaatcaatgcacattgttttgtggtaacagcagataatcgctatattcttatctgtggattctgggataagagcttcagagtttattctacagaaacagggaaattgactcagattgtatttggccattgggatgtggtcacttgcttggccaggtccgagtcatacattggtggggactgctacatcgtgtccggatctcgagatgccaccctgctgctctggtactggagtgggcggcaccatatcataggagacaaccctaacagcagtgactatccggcaccaagagccgtcctcacaggccatgaccatgaagttgtctgtgtttctgtctgtgcagaacttgggcttgttatcagtggtgctaaagagggcccttgccttgtccacaccatcactggagatttgctgagagcccttgaaggaccagaaaactgcttattcccacgcttgatatctgtctccagcgaaggccactgtatcatatactatgaacgagggcgattcagtaatttcagcattaatgggaaacttttggctcaaatggagatcaatgattcaacacgggccattctcctgagcagtgacggccagaacctggtcaccggaggggacaatggggtagtagaggtctggcaggcctgtgacttcaagcaactgtacatttaccctggatgtgatgctggcattagagcaatggacttgtcccatgaccagaggactctgatcactggcatggcttctggtagcattgtagcttttaatatagattttaatcggtggcattatgagcatcagaacagatactgaagataaaggaagaaccaaaagccaagttaaagctgagagcacaagtgctgcatggaaaggcaatatctctggtggaaaaaactcgtctacatcgacctccgtttgtacattccatcacacccagcaatagctgtacattgtagtcagcaaccattttactttgtgtgttttttcacgactgaacaccagctgctatcaagcaagcttatatcatgtaaattatatgaattaggagatgttttggtaattatttcatatattgttgtttattgagaaaaggttgtaggatgtgtcacaagagacttttgacaattctgaggaaccttgtgtccagttgttacaaagtttaagctttgaacctaacctgcatcccatttccagcctcttttcaagctgagaaaaaaaaaaaaaaacacgtttgatactttgtacatcagatgcatcttatttaaaagggatacttttgtaaaagtaaaaccttgtataaagaacaaaatgtttcttaattttattgtggagttacaacttgcatgttccttactcctgttggcttgatggaacaggtgcattcacactatgaaacagaaagatctgtccaaggacacagcttgtatgaaagggttgaatttgggctccatcagtaatttttgacattttcaccaaaatatagtttgcactttttaatctaaagtcatcccttctgagtgaaatttgctcataaagcatttggatactaagccattatttgccattttgggtactttatacaaagaaaattcagccctaccctgcataatttgaagacacagcagaaagggggcttagggatgaggtcctggtttttcttgtataaataggagtcatgggcgttagttctgtagtaataacttcccagcacctggacatctcttccagagttatcccactggcttggtgtgtatacattaggggaggataatctgatgctaactttttttttctctttggttcttgaatagcttagtttctttaataacaagtcaaactttattacaacaataactgaagttattcttttaggttctcgtgaaattctcactgaaagccacattcttagcctaaggcatttcatcttttatgatataaaatgatggctatcaaatgattttccatacattgtactgatcaagttatacacccaggggtatatacactttcttcatgtttcttctttgtatatttggtgactgtatcgtcatagatgtacatattgtgtcggtagggctatgaggcatgttacaggaatgtaattttctcagaatttacacccactcgcagtcatttatttaaaaagataaaacaagataatgggttctttgtattggcactttgcaccagaaacatatcattatttattgatgtgattacttatttgttatccaccttgtactagtaagttttagcactgaattccttcttcactgttgtttgtatttatgaaattctgaaattatggggaatcagcgtaatgattaagttattcatcaccaggctgtaagcaatatcttgagtttgtagcttagaattgggaggatacttaacatctggaagacaagttcatttcatcttgagatcatggtgaaatattttggatatataaattccttaagctattgtaaccatgttttattgcaaagatgtaaaatatgccagatgtgtgtgagttggaaatcaaaaaaagaaaaataaaatatgcaaagaattcacc

SEQ ID NO: 457511 - DNA, 4831 bp, Homo sapiens
  misc_feature (1)..(2): n is a, c, g, or t
  misc_feature (5)..(8): n is a, c, g, or t
  misc_feature (15)..(15): n is a, c, g, or t
  misc_feature (17)..(17): n is a, c, g, or t
nnacnnnnctttgtngnaggccttgtttgtatgaagtccagcacatctgtggttgagcttgttatgctgctttgttctcaggaatggcaaaactctattcagaagaatgcaggacttgcatttattgagctcatcaatgaaggaagattactgtgccatgctatgaaggaccatatagtccgtgttgcaaatgaagctgagtttattttgaacagacaaagagccgaggatgtacataaacatgcagagtttgagtcacagtgtgcccaatatgctgctgatagaagagaggaagaaaagatgtgtgaccatcttatcagtgctgctaaacatcgagatcatgtaacagcaaatcagctgaaacagaagattctcaatattctcacaaataaacatggtgcttggggagcagtttctcatagccaattgcatgatttctggcgtttggattactgggaagatgatcttcgtcgaaggagacgatttgttcgcaatgcatttggctccactcatgctgaagcattgctgaaagctgcaatagaatatggcacggaagaagatgtagtaaagtcaaagaaaacattcagaagtcaagcaatagtgaaccaaaatgcagagacagaacttatgctggaaggagacgatgatgcagtcagtctgctacaggagaaagaaattgacaaccttgcaggcccagtggttctcagcacccctgcccagctcatcgctcccgtggtggtggccaaggggactctctccatcaccacgacagaaatctacttcgaggtagatgaggatgattctgccttcaagaagatcgacacgaaagttcttgcatacactgagggacttcacggaaaatggatgttcagcgagatacgagctgtattttcaagacgttaccttctacaaaacactgctttggaagtatttatggcaaaccgaacctcagttatgtttaatttccctgatcaagcaacagtaaaaaaagttgtctatagcttgcctcgggttggagtagggaccagctatggtctgccacaagccaggaggatatcattggccactcctcgacagctttataaatcttccaatatgactcagcgctggcaaagaagggaaatttcaaacttcgaatatttgatgttccttaatactattgcaggacggacatataatgatctgaaccaatatccagtgtttccgtgggtgttaaccaactatgaatcagaagagttggacctgactcttccaggaaacttcagggatctatcaaagccaattggtgctttgaaccccaagagagctgtgttttatgcagagcgttatgagacatgggaagatgatcaaagcccaccctaccattataatacccattattcaacagcaacatctactttatcctggcttgttcgaattgaacctttcacaaccttcttcctcaatgcaaatgatggaaaatttgatcatccagatcgaaccttctcatccgttgcaaggtcttggagaactagtcagagagatacttctgatgtaaaggaactaattccagagttctactacctaccagagatgtttgtcaacagtaatggatataatcttggagtcagagaagatgaagtagtggtaaatgatgttgatcttcccccttgggcaaaaaaacctgaagactttgtgcggatcaacaggatggccctagaaagtgaatttgtttcttgccaacttcatcagtggatcgaccttatatttggctataagcagcgaggaccagaagcagttcgtgctctgaatgtttttcactacttgacttatgaaggctctgtgaacctggatagtatcactgatcctgtgctcagggaggccatggaggcacagatacagaactttggacagacgccatctcagttgcttattgagccacatccgcctcggagctctgccatgcacctgtgtttccttccacagagtccgctcatgtttaaagatcagatgcaacaggatgtgataatggtgctgaagtttccttcaaattctccagtaacccatgtggcagccaacactctgccccacttgaccatccccgcagtggtgacagtgacttgcagccgactctttgcagtgaatagatggcacaacacagtaggcctcagaggagctccaggatactccttggatcaagcccaccatcttcccattgaaatggatccattaatagccaataattcaggtgtaaacaaacggcagatcacagacctcgttgaccagagtatacaaatcaatgcacattgttttgtggtaacagcagataatcgctatattcttatctgtggattctgggataagagcttcagagtttattctacagaaacagggaaattgactcagattgtatttggccattgggatgtggtcacttgcttggccaggtccgagtcatacattggtggggactgctacatcgtgtccggatctcgagatgccaccctgctgctctggtactggagtgggcggcaccatatcataggagacaaccctaacagcagtgactatccggcaccaagagccgtcctcacaggccatgaccatgaagttgtctgtgtttctgtctgtgcagaacttgggcttgttatcagtggtgctaaagagggcccttgccttgtccacaccatcactggagatttgctgagagcccttgaaggaccagaaaactgcttattcccacgcttgatatctgtctccagcgaaggccactgtatcatatactatgaacgagggcgattcagtaatttcagcattaatgggaaacttttggctcaaatggagatcaatgattcaacacgggccattctcctgagcagtgacggccagaacctggtcaccggaggggacaatggggtagtagaggtctggcaggcctgtgacttcaagcaactgtacatttaccctggatgtgatgctggcattagagcaatggacttgtcccatgaccagaggactctgatcactggcatggcttctggtagcattgtagcttttaatatagattttaatcggtggcattatgagcatcagaacagatactgaagataaaggaagaaccaaaagccaagttaaagctgagagcacaagtgctgcatggaaaggcaatatctctggtggaaaaaactcgtctacatcgacctccgtttgtacattccatcacacccagcaatagctgtacattgtagtcagcaaccattttactttgtgtgttttttcacgactgaacaccagctgctatcaagcaagcttatatcatgtaaattatatgaattaggagatgttttggtaattatttcatatattgttgtttattgagaaaaggttgtaggatgtgtcacaagagacttttgacaattctgaggaaccttgtgtccagttgttacaaagtttaagctttgaacctaacctgcatcccatttccagcctcttttcaagctgagaaaaaaaaaaaaaaacacgtttgatactttgtacatcagatgcatcttatttaaaagggatacttttgtaaaagtaaaaccttgtataaagaacaaaatgtttcttaattttattgtggagttacaacttgcatgttccttactcctgttggcttgatggaacaggtgcattcacactatgaaacagaaagatctgtccaaggacacagcttgtatgaaagggttgaatttgggctccatcagtaatttttgacattttcaccaaaatatagtttgcactttttaatctaaagtcatcccttctgagtgaaatttgctcataaagcatttggatactaagccattatttgccattttgggtactttatacaaagaaaattcagccctaccctgcataatttgaagacacagcagaaagggggcttagggatgaggtcctggtttttcttgtataaataggagtcatgggcgttagttctgtagtaataacttcccagcacctggacatctcttccagagttatcccactggcttggtgtgtatacattaggggaggataatctgatgctaactttttttttctctttggttcttgaatagcttagtttctttaataacaagtcaaactttattacaacaataactgaagttattcttttaggttctcgtgaaattctcactgaaagccacattcttagcctaaggcatttcatcttttatgatataaaatgatggctatcaaatgattttccatacattgtactgatcaagttatacacccaggggtatatacactttcttcatgtttcttctttgtatatttggtgactgtatcgtcatagatgtacatattgtgtcggtagggctatgaggcatgttacaggaatgtaattttctcagaatttacacccactcgcagtcatttatttaaaaagataaaacaagataatgggttctttgtattggcactttgcaccagaaacatatcattatttattgatgtgattacttatttgttatccaccttgtactagtaagttttagcactgaattccttcttcactgttgtttgtatttatgaaattctgaaattatggggaatcagcgtaatgattaagttattcatcaccaggctgtaagcaatatcttgagtttgtagcttagaattgggaggatacttaacatctggaagacaagttcatttcatcttgagatcatggtgaaatattttggatatataaattccttaagctattgtaaccatgttttattgcaaagatgtaaaatatgccagatgtgtgtgagttggaaatcaaaaaaagaaaaataaaatatgcaaagaattcacc

SEQ ID NO: 457512 - DNA, 3555 bp, Homo sapiens
  misc_feature (1)..(2): n is a, c, g, or t
  misc_feature (5)..(8): n is a, c, g, or t
  misc_feature (15)..(15): n is a, c, g, or t
  misc_feature (17)..(17): n is a, c, g, or t
nnacnnnnctttgtngnaggccttgtttgtatgaagtccagcacatctgtggttgagcttgttatgctgctttgttctcaggaatggcaaaactctattcagaagaatgcaggacttgcatttattgagctcatcaatgaaggaagattactgtgccatgctatgaaggaccatatagtccgtgttgcaaatgaagctgagtttattttgaacagacaaagagccgaggatgtacataaacatgcagagtttgagtcacagtgtgcccaatatgctgctgatagaagagaggaagaaaagatgtgtgaccatcttatcagtgctgctaaacatcgagatcatgtaacagcaaatcagctgaaacagaagattctcaatattctcacaaataaacatggtgcttggggagcagtttctcatagccaattgcatgatttctggcgtttggattactgggaagatgatcttcgtcgaaggagacgatttgttcgcaatgcatttggctccactcatgctgaagcattgctgaaagctgcaatagaatatggcacggaagaagatgtagtaaagtcaaagaaaacattcagaagtcaagcaatagtgaaccaaaatgcagagacagaacttatgctggaaggagacgatgatgcagtcagtctgctacaggagaaagaaattgacaaccttgcaggcccagtggttctcagcacccctgcccagctcatcgctcccgtggtggtggccaaggggactctctccatcaccacgacagaaatctacttcgaggtagatgaggatgattctgccttcaagaagatcgacacgaaagttcttgcatacactgagggacttcacggaaaatggatgttcagcgagatacgagctgtattttcaagacgttaccttctacaaaacactgctttggaagtatttatggcaaaccgaacctcagttatgtttaatttccctgatcaagcaacagtaaaaaaagttgtctatagcttgcctcgggttggagtagggaccagctatggtctgccacaagccaggaggatatcattggccactcctcgacagctttataaatcttccaatatgactcagcgctggcaaagaagggaaatttcaaacttcgaatatttgatgttccttaatactattgcaggacggacatataatgatctgaaccaatatccagtgtttccgtgggtgttaaccaactatgaatcagaagagttggacctgactcttccaggaaacttcagggatctatcaaagccaattggtgctttgaaccccaagagagctgtgttttatgcagagcgttatgagacatgggaagatgatcaaagcccaccctaccattataatacccattattcaacagcaacatctactttatcctggcttgttcgaattgaacctttcacaaccttcttcctcaatgcaaatgatggaaaatttgatcatccagatcgaaccttctcatccgttgcaaggtcttggagaactagtcagagagatacttctgatgtaaaggaactaattccagagttctactacctaccagagatgtttgtcaacagtaatggatataatcttggagtcagagaagatgaagtagtggtaaatgatgttgatcttcccccttgggcaaaaaaacctgaagactttgtgcggatcaacaggatggccctagaaagtgaatttgtttcttgccaacttcatcagtggatcgaccttatatttggctataagcagcgaggaccagaagcagttcgtgctctgaatgtttttcactacttgacttatgaaggctctgtgaacctggatagtatcactgatcctgtgctcagggaggccatggaggcacagatacagaactttggacagacgccatctcagttgcttattgagccacatccgcctcggagctctgccatgcacctgtgtttccttccacagagtccgctcatgtttaaagatcagatgcaacaggatgtgataatggtgctgaagtttccttcaaattctccagtaacccatgtggcagccaacactctgccccacttgaccatccccgcagtggtgacagtgacttgcagccgactctttgcagtgaatagatggcacaacacagtaggcctcagaggagctccaggatactccttggatcaagcccaccatcttcccattgaaatggatccattaatagccaataattcaggtgtaaacaaacggcagatcacagacctcgttgaccagagtatacaaatcaatgcacattgttttgtggtaacagcagataatcgctatattcttatctgtggattctgggataagagcttcagagtttattctacagaaacagggaaattgactcagattgtatttggccattgggatgtggtcacttgcttggccaggtccgagtcatacattggtggggactgctacatcgtgtccggatctcgagatgccaccctgctgctctggtactggagtgggcggcaccatatcataggagacaaccctaacagcagtgactatccggcaccaagagccgtcctcacaggccatgaccatgaagttgtctgtgtttctgtctgtgcagaacttgggcttgttatcagtggtgctaaagagggcccttgccttgtccacaccatcactggagatttgctgagagcccttgaaggaccagaaaactgcttattcccacgcttgatatctgtctccagcgaaggccactgtatcatatactatgaacgagggcgattcagtaatttcagcattaatgggaaacttttggctcaaatggagatcaatgattcaacacgggccattctcctgagcagtgacggccagaacctggtcaccggaggggacaatggggtagtagaggtctggcaggcctgtgacttcaagcaactgtacatttaccctggatgtgatgctggcattagagcaatggacttgtcccatgaccagaggactctgatcactggcatggcttctggtagcattgtagcttttaatatagattttaatcggtggcattatgagcatcagaacagatactgaagataaaggaagaaccaaaagccaagttaaagctgagagcacaagtgctgcatggaaaggcaatatctctggtggaaaaaactcgtctacatcgacctccgtttgtacattccatcacacccagcaatagctgtacattgtagtcagcaaccattttactttgtgtgttttttcacgactgaacaccagctgctatcaagcaagcttatatcatgtaaattatatgaattaggagatgttttggtttccgaagtcatcatcatctgatgtagagcctacagcatctaaaaacatgaaatcgagtcctaatgaggttctgcaatttgctgaaacctgagctgctctgccgagccatctggcagggatctggggcaacagcgaccatggggaaacggccctcattgtctattctgcataatccactttggggattgtctttattttatttaaaaggaactaagtagtgaaaaa

SEQ ID NO: 457513 - DNA, 2220 bp, Homo sapiens
  misc_feature (1)..(2): n is a, c, g, or t
  misc_feature (7)..(7): n is a, c, g, or t
  misc_feature (9)..(10): n is a, c, g, or t
  misc_feature (56)..(56): n is a, c, g, or t
nncgctngnnggtgaaggaggagtgccgcctgctcaatgcccctccagtgcctccncggggtggcaatggcagcggccggctctccagcagccccccggttccccctcgcttccccaagctgcagccggtacattcccccagctccagcctctcctactactcctctggcctccaggatggggcgggttcccgcagtggcagtggctccccatcgccggacacctactccctctattgctacccatgcacctggggagactgcaaggaaccagtcctggagcccttcgatccctttgagctggggcagggcagttctccagagcctgagctgctgcgttctcaggagcccagagcagtggggacacctgggcctggaccccgcctttcaccacttggcccctccaaggcctttgagcctgaaggtttggtgctgcaccaggtccccaccccactgtcaccagctgctctgcagggacccgaggcgggaggagcactttttctaacccaagggcgcctggaagggcctcctgccagtccccgggatggagccacaggctttggagtccgagatgcctcctcctggcagccccctgctgacctgtctgcactctccctggaggaggtctctcgcagtctgcgtttcatcgggctctcagaggatgtggtgagcttctttgcccgagaacgcatcgatggtagcatctttgtgcagctcagtgaggacatcctggcagatgacttccacctcaccaagctgcaggtcaagaagatcatgcagttcatcaaaggctggaggcccaagatctgaactgcccagctggagctgcacagctggaatgctggtatgggggccccaggtacagcactccggaggagcaggtgctgcctgcaagaaggatctatgtcgagactgaggctgctcagcagccactgggtggatccaggggagatgcatgtggaaatgtggtcctctggggtcagacccctgcacgggacatcttgcctttgagtgtgcagagtacatggggaaggggctgggggcaccactgtgtacctgggcccagtaaggcatttgccgtgattcccacaacggggtcaaaagctggccttcagggtgacctaacaccacctcatgccctgctatagaccttcacaaacgacttccactgctgaagcctgtaggctctgtttagagacaagaagatggctggtaatttaagcaccgatttcccaagtgcccactctcctttgtgctctgttggcttttggcctaaagctgccccagagtgagggtgtagatgtctgtgtctgtgagatgcctttcccttccccctctgctccaccgtggttgaggggggtggggcctggccccgcacacaggtgagtcgtgtacaagcctaacccatggcacctcagaggctccacctgtgggtcctggttcatgggtgacaactttggaagagcacagctctgcaattgacccgacccacttatctagttaggaagccagacactgcccagatgactctagcaccctggcttctgctctgactttactgcagctagtcatccatctgtcaggtggcgttcagtctcagaatactgattccgtggaagagcaggttgatttaggtcagcttctccttgattctagaagcaagcggtagtcaaccacctccaattccgccaatctcttgcccccatcatttgtctctgacaatacttggtgtttttccctggttttctgtcactggcacaggagggtacagttgggagagtgcgttcctggagctcagtcctgcatttgttcacgtgcctcacagcaggcctttgtgcccttgaatctcaaacatggggatctgcttggtacccagagctctggtcattgtgtccaaccacacaccccaccccatccgtgtcctccatctcacccagaaccacagggtgcccactagtgtcagggcccaaagtgccagccttctcttctgccttacctagtctacctatttatttcctccactttttatcttaaaagtagctaagccatgctggtgcccatactccaagcaggctgcctcagctcagagaagtggtcagagagtagagcacagaacctgtgatgtggggacatttggttttcttgcagatcatttaatgaatcctcaaggactaatgaaataaatgctagactgctgaagatgagtacaagtggcaaaaaa

SEQ ID NO: 457514 - DNA, 2151 bp, Homo sapiens
  misc_feature (1)..(2): n is a, c, g, or t
  misc_feature (7)..(7): n is a, c, g, or t
  misc_feature (9)..(10): n is a, c, g, or t
  misc_feature (56)..(56): n is a, c, g, or t
nncgctngnnggtgaaggaggagtgccgcctgctcaatgcccctccagtgcctccncggggtggcaatggcagcggccggctctccagcagccccccggttccccctcgcttccccaagctgcagccggtacattcccccagctccagcctctcctactactcctctggcctccaggatggggcgggttcccgcagtggcagtggctccccatcgccggacacctactccctctattgctacccatgcacctggggagactgcaaggaaccagtcctggagcccttcgatccctttgagctggggcagggcagttctccagagcctgagctgctgcgttctcaggagcccagagcagtggggacacctgggcctggaccccgcctttcaccacttggcccctccaaggcctttgagcctgaaggtttggtgctgcaccaggtccccaccccactgtcaccagctgctctgcagggacccgaggcgggaggagcactttttctaacccaagggcgcctggaagggcctcctgccagtccccgggatggagccacaggctttggagtccgagatgcctcctcctggcagccccctgctgacctgtctgcactctccctggaggaggtctctcgcagtctgcgtttcatcgggctctcagaggatgtggtgagcttctttgcccgagaacgcatcgatggtagcatctttgtgcagctcagtgaggacatcctggcagatgacttccacctcaccaagctgcaggtcaagaagatcatgcagttcatcaaaggctggaggcccaagatctgaactgcccagctggagctgcacagctggaatgctggtatgggggccccaggtacagcactccggaggagcaggtgctgcctgcaagaaggatctatgtcgagactgaggctgctcagcagccactgggtggatccaggggagatgcatgtggaaatgtggtcctctggggtcagacccctgcacgggacatcttgcctttgagtgtgcagagtacatggggaaggggctgggggcaccactgtgtacctgggcccagtaaggcatttgccgtgattcccacaacggggtcaaaagctggccttcagggtgacctaacaccacctcatgccctgctatagaccttcacaaacgacttccactgctgaagcctgtaggctctgtttagagacaagaagatggctggtaatttaagcaccgatttcccaagtgcccactctcctttgtgctctgttggcttttggcctaaagctgccccagagtgagggtgtagatgtctgtgtctgtgagatgcctttcccttccccctctgctccaccgtggttgaggggggtggggcctggccccgcacacaggtgagtcgtgtacaagcctaacccatggcacctcagaggctccacctgtgggtcctggttcatgggtgacaactttggaagagcacagctctgcaattgacccgacccacttatctagttaggaagccagacactgcccagatgactctagcaccctggcttctgctctgactttactgcagctagtcatccatctgtcaggtggcgttcagtctcagaatactgattccgtggaagagcaggttgatttaggtcagcttctccttgattctagaagcaagcggtagtcaaccacctccaattccgccaatctcttgcccccatcatttgtctctgacaatacttggtgtttttccctggttttctgtcactggcacaggagggtacagttgggagagtgcgttcctggagctcagtcctgcatttgttcacgtgcctcacagcaggcctttgtgcccttgaatctcaaacatggggatctgcttggtacccagagctctggtcattgtgtccaaccacacaccccaccccatccgtgtcctccatctcacccagaaccacagggtgcccactagtgtcagggcccaaagtgccagcacagtaggcatactagacacaaaacatcgcccatcgacatacagagcaacccagcgcgccataacaaaggcgtccacccccacggggcaaaaagcccaacggcaggggcatgctcttcgacaccaaaacaagaccccgacacgcaagaaccagggcacccacccagcacgagc

SEQ ID NO: 457515 - DNA, 2619 bp, Homo sapiens
  misc_feature (1)..(2): n is a, c, g, or t
  misc_feature (7)..(7): n is a, c, g, or t
  misc_feature (9)..(10): n is a, c, g, or t
  misc_feature (56)..(56): n is a, c, g, or t
nncgctngnnggtgaaggaggagtgccgcctgctcaatgcccctccagtgcctccncggggtggcaatggcagcggccggctctccagcagccccccggttccccctcgcttccccaagctgcagccggtacattcccccagctccagcctctcctactactcctctggcctccaggatggggcgggttcccgcagtggcagtggctccccatcgccggacacctactccctctattgctacccatgcacctggggagactgcaaggtgggcgagtcctctagccgcccagcccccggtcccctaccctcaaccacacagcccagccaggcctcccgggccctcacagagcctctgagcggtcgagccgcctcccttctgggggctgacacccctgttaagacctaccacagctgccctcctctattcaagccctcacatccccagaagcgctttgctccgtttggagctctcaaccctttttccgggcctgcctacccctcaggcccttcagcggccttgtcttctgggcccagaaccacctcgggtcctgtggctacctctggccctgcgtattccccaggcccagcctcgccaggccaggcctattcagctgctcccccctcctcctgcgccccctcctcctcctcttcttctgaatggcaggaaccagtcctggagcccttcgatccctttgagctggggcagggcagttctccagagcctgagctgctgcgttctcaggagcccagagcagtggggacacctgggcctggaccccgcctttcaccacttggcccctccaaggcctttgagcctgaaggtttggtgctgcaccaggtccccaccccactgtcaccagctgctctgcagggacccgaggcgggaggagcactttttctaacccaagggcgcctggaagggcctcctgccagtccccgggatggagccacaggctttggagtccgagatgcctcctcctggcagccccctgctgacctgtctgcactctccctggaggaggtctctcgcagtctgcgtttcatcgggctctcagaggatgtggtgagcttctttgcccgagaacgcatcgatggtagcatctttgtgcagctcagtgaggacatcctggcagatgacttccacctcaccaagctgcaggtcaagaagatcatgcagttcatcaaaggctggaggcccaagatctgaactgcccagctggagctgcacagctggaatgctggtatgggggccccaggtacagcactccggaggagcaggtgctgcctgcaagaaggatctatgtcgagactgaggctgctcagcagccactgggtggatccaggggagatgcatgtggaaatgtggtcctctggggtcagacccctgcacgggacatcttgcctttgagtgtgcagagtacatggggaaggggctgggggcaccactgtgtacctgggcccagtaaggcatttgccgtgattcccacaacggggtcaaaagctggccttcagggtgacctaacaccacctcatgccctgctatagaccttcacaaacgacttccactgctgaagcctgtaggctctgtttagagacaagaagatggctggtaatttaagcaccgatttcccaagtgcccactctcctttgtgctctgttggcttttggcctaaagctgccccagagtgagggtgtagatgtctgtgtctgtgagatgcctttcccttccccctctgctccaccgtggttgaggggggtggggcctggccccgcacacaggtgagtcgtgtacaagcctaacccatggcacctcagaggctccacctgtgggtcctggttcatgggtgacaactttggaagagcacagctctgcaattgacccgacccacttatctagttaggaagccagacactgcccagatgactctagcaccctggcttctgctctgactttactgcagctagtcatccatctgtcaggtggcgttcagtctcagaatactgattccgtggaagagcaggttgatttaggtcagcttctccttgattctagaagcaagcggtagtcaaccacctccaattccgccaatctcttgcccccatcatttgtctctgacaatacttggtgtttttccctggttttctgtcactggcacaggagggtacagttgggagagtgcgttcctggagctcagtcctgcatttgttcacgtgcctcacagcaggcctttgtgcccttgaatctcaaacatggggatctgcttggtacccagagctctggtcattgtgtccaaccacacaccccaccccatccgtgtcctccatctcacccagaaccacagggtgcccactagtgtcagggcccaaagtgccagccttctcttctgccttacctagtctacctatttatttcctccactttttatcttaaaagtagctaagccatgctggtgcccatactccaagcaggctgcctcagctcagagaagtggtcagagagtagagcacagaacctgtgatgtggggacatttggttttcttgcagatcatttaatgaatcctcaaggactaatgaaataaatgctagactgctgaagatgagtacaagtggcaaaaaa

SEQ ID NO: 457516 - DNA, 2007 bp, Homo sapiens
  misc_feature (1)..(2): n is a, c, g, or t
  misc_feature (7)..(7): n is a, c, g, or t
  misc_feature (9)..(10): n is a, c, g, or t
  misc_feature (56)..(56): n is a, c, g, or t
nncgctngnnggtgaaggaggagtgccgcctgctcaatgcccctccagtgcctccncggggtggcaatggcagcggccggctctccagcagccccccggttccccctcgcttccccaagctgcagccggtacattcccccagctccagcctctcctactactcctctggcctccaggatggggcgggttcccgcagtggcagtggctccccatcgccggacacctactccctctattgctacccatgcacctggggagactgcaaggaaccagtcctggagcccttcgatccctttgagctggggcagggcagttctccagagcctgagctgctgcgttctcaggagcccagagcagtggggacacctgggcctggaccccgcctttcaccacttggcccctccaaggcctttgagcctgaaggtttggtgctgcaccaggtccccaccccactgtcaccagctgctctgcagggacccgaggcgggaggagcactttttctaacccaagggcgcctggaagggcctcctgccagtccccgggatggagccacaggctttggagtccgagatgcctcctcctggcagccccctgctgacctgtctgcactctccctggaggaggtctctcgcagtctgcgtttcatcgggctctcagaggatgtggtgagcttctttgcccgagaacgcatcgatggtagcatctttgtgcagctcagtgaggacatcctggcagatgacttccacctcaccaagctgcaggtcaagaagatcatgcagttcatcaaaggctggaggcccaagatctgaactgcccagctggagctgcacagctggaatgctggtatgggggccccaggtacagcactccggaggagcaggtgctgcctgcaagaaggatctatgtcgagactgaggctgctcagcagccactgggtggatccaggggagatgcatgtggaaatgtggtcctctggggtcagacccctgcacgggacatcttgcctttgagtgtgcagagtacatggggaaggggctgggggcaccactgtgtacctgggcccagtaaggcatttgccgtgattcccacaacggggtcaaaagctggccttcagggtgacctaacaccacctcatgccctgctatagaccttcacaaacgacttccactgctgaagcctgtaggctctgtttagagacaagaagatggctggtaatttaagcaccgatttcccaagtgcccactctcctttgtgctctgttggcttttggcctaaagctgccccagagtgagggtgtagatgtctgtgtctgtgagatgcctttcccttccccctctgctccaccgtggttgaggggggtggggcctggccccgcacacaggtgagtcgtgtacaagcctaacccatggcacctcagaggctccacctgtgggtcctggttcatgggtgacaactttggaagagcacagctctgcaattgacccgacccacttatctagttaggaagccagacactgcccagatgactctagcaccctggcttctgctctgactttactgcagctagtcatccatctgtcaggtggcgttcagtctcagaatactgattccgtggaagagcaggttgatttaggtcagcttctccttgattctagaagcaagcggtagtcaaccacctccaattccgccaatctcttgcccccatcatttgtctctgacaatacttggtgtttttccctggttttctgtcactggcacaggagggtacagttgggagagtgcgttcctggagctcagtcctgcatttgttcacgtgcctcacagcaggcctttgtgcccttgaatctcaaacatggggatctgcttggtacccagagctctggtcattgtgtccaaccacacaccccaccccatccgtgtcctccatctcacccagaaccacagggtgcccactagtgtcagggcccaaagtgccagcacgaatccagcaccagcacgaattccctt

SEQ ID NO: 457517 - DNA, 179 bp, Homo sapiens
tagtcggccctggttagacagaggaggggacagcactgaggagtgagcacagaagacgaagagaaccagaaacaatgccaggacctcggcgccttcaccgagagcatggttgtctttgggtgccccaactgaccacacccccattcccccactccagataaagcttcagttatatctca

SEQ ID NO: 457518 - DNA, 658 bp, Homo sapiens
tatttgaggggttttgagtgagtttcttaatcctgagttctagtttgattgcactgtagtctgagagacagtttgttataatttctgttcttttacatttgccgaggagagctttacttccaactgtgtggtcaattttggaataactgtgccgctgtgctgaggagaattgcttcatacaaaagtcggatgacaaggtcaccctggaagaacggctggacaaggcctgtgagccaggagtggactatgtgtacaagacccgactggtcaaggttcagctgtccaatgactttgacgagtacatcatggccattgagcagaccatcaagtcaggctcggatgaggtgcaggttggacagcagcgcacgttcatcagccccatcaagtgcagagaagccctgaagctggaggagaagaaacactacctcatgtggggtctctcctccgatttctggggagagaagcccaacctcagctacatcatcgggaaggacacttgggtggagcactggcctgaggaggacgaatgccaagacgaagagaaccagaaacaatgccaggacctcggcgccttcaccgagagcatggttgtctttgggtgccccaactgaccacacccccattcccccactccagataaagcttcagttatatctca

SEQ ID NO: 457519 - DNA, 166 bp, Homo sapiens
ttgatgaggaggtggtgattccagtgatagggtgggtgatcttggagctggtctgtgaggagaattgcttcatacaaaagtcggatgacaaggtcaccctggaagaacggctggacaaggcctgtgagccaggagtggactatggtgagtgggtgatgggtggggg

SEQ ID NO: 457520 - DNA, 1535 bp, Homo sapiens
  misc_feature (53)..(53): n is a, c, g, or t
  misc_feature (55)..(55): n is a, c, g, or t
  misc_feature (57)..(58): n is a, c, g, or t
  misc_feature (95)..(95): n is a, c, g, or t
taactgagaaaggcagcacttgcgggggacatgacaagcaagccaagatcgantnanngtaaattgacctcaggtcaccataaaccagcaccggnaacagaattgaggcctcttcttaacaaatttctgaccacagccaaagataagaaccgctgggaggaccctggtaagcagctctacaacgtggaggccacatcctatgccctcttggccctactgcagctaaaagactttgactttgtgcctcccgtcgtgcgttggctcaatgaacagagatactacggtggtggctatggctctacccaggccaccttcatggtgttccaagccttggctcaataccaaaaggacgcccctgaccaccaggaactgaaccttgatgtgtccctccaactgcccagccgcagctccaagatcacccaccgtatccactgggaatctgccagcctcctgcgatcagaagagaccaaggaaaatgagggtttcacagtcacagctgaaggaaaaggccaaggcaccttgtcggtggtgacaatgtaccatgctaaggccaaagatcaactcacctgtaataaattcgacctcaaggtcaccataaaaccagcaccggaaacagaaaagaggcctcaggatgccaagaacactatgatccttgagatctgtaccaggtaccggggagaccaggatgccactatgtctatattggacatatccatgatgactggctttgctccagacacagatgacctgaagcagctggccaatggtgttgacagatacatctccaagtatgagctggacaaagccttctccgataggaacaccctcatcatctacctggacaaggtctcacactctgaggatgactgtctagctttcaaagttcaccaatactttaatgtagagcttatccagcctggagcagtcaaggtctacgcctattacaacctggaggaaagctgtacccggttctaccatccggaaaaggaggatggaaagctgaacaagctctgccgtgatgaactgtgccgctgtgctgaggagaattgcttcatacaaaagtcggatgacaaggtcaccctggaagaacggctggacaaggcctgtgagccaggagtggactatgtgtacaagacccgactggtcaaggttcagctgtccaatgactttgacgagtacatcatggccattgagcagaccatcaagtcaggctcggatgaggtgcaggttggacagcagcgcacgttcatcagccccatcaagtgcagagaagccctgaagctggaggagaagaaacactacctcatgtggggtctctcctccgatttctggggagagaagcccaacctcagctacatcatcgggaaggacacttgggtggagcactggcctgaggaggacgaatgccaagacgaagagaaccagaaacaatgccaggacctcggcgccttcaccgagagcatggttgtctttgggtgccccaactgaccacacccccattcccccactccagataaagcttcagttatatctca

SEQ ID NO: 457521 - DNA, 1574 bp, Homo sapiens
  misc_feature (53)..(53): n is a, c, g, or t
  misc_feature (55)..(55): n is a, c, g, or t
  misc_feature (57)..(58): n is a, c, g, or t
  misc_feature (95)..(95): n is a, c, g, or t
taactgagaaaggcagcacttgcgggggacatgacaagcaagccaagatcgantnanngtaaattgacctcaggtcaccataaaccagcaccggnaacagaattgaggcctcttcttaacaaatttctgaccacagccaaagataagaaccgctgggaggaccctggtaagcagctctacaacgtggaggccacatcctatgccctcttggccctactgcagctaaaagactttgactttgtgcctcccgtcgtgcgttggctcaatgaacagagatactacggtggtggctatggctctacccaggccaccttcatggtgttccaagccttggctcaataccaaaaggacgcccctgaccaccaggaactgaaccttgatgtgtccctccaactgcccagccgcagctccaagatcacccaccgtatccactgggaatctgccagcctcctgcgatcagaagagaccaaggaaaatgagggtttcacagtcacagctgaaggaaaaggccaaggcaccttgtcggtggtgacaatgtaccatgctaaggccaaagatcaactcacctgtaataaattcgacctcaaggtcaccataaaaccagcaccggaaacaggtataccctctcccatctttctctcttctgtgtttctagaaaagaggcctcaggatgccaagaacactatgatccttgagatctgtaccaggtaccggggagaccaggatgccactatgtctatattggacatatccatgatgactggctttgctccagacacagatgacctgaagcagctggccaatggtgttgacagatacatctccaagtatgagctggacaaagccttctccgataggaacaccctcatcatctacctggacaaggtctcacactctgaggatgactgtctagctttcaaagttcaccaatactttaatgtagagcttatccagcctggagcagtcaaggtctacgcctattacaacctggaggaaagctgtacccggttctaccatccggaaaaggaggatggaaagctgaacaagctctgccgtgatgaactgtgccgctgtgctgaggagaattgcttcatacaaaagtcggatgacaaggtcaccctggaagaacggctggacaaggcctgtgagccaggagtggactatgtgtacaagacccgactggtcaaggttcagctgtccaatgactttgacgagtacatcatggccattgagcagaccatcaagtcaggctcggatgaggtgcaggttggacagcagcgcacgttcatcagccccatcaagtgcagagaagccctgaagctggaggagaagaaacactacctcatgtggggtctctcctccgatttctggggagagaagcccaacctcagctacatcatcgggaaggacacttgggtggagcactggcctgaggaggacgaatgccaagacgaagagaaccagaaacaatgccaggacctcggcgccttcaccgagagcatggttgtctttgggtgccccaactgaccacacccccattcccccactccagataaagcttcagttatatctca

SEQ ID NO: 457522 - DNA, 1483 bp, Homo sapiens
  misc_feature (53)..(53): n is a, c, g, or t
  misc_feature (55)..(55): n is a, c, g, or t
  misc_feature (57)..(58): n is a, c, g, or t
  misc_feature (95)..(95): n is a, c, g, or t
taactgagaaaggcagcacttgcgggggacatgacaagcaagccaagatcgantnanngtaaattgacctcaggtcaccataaaccagcaccggnaacagaattgaggcctcttcttaacaaatttctgaccacagccaaagataagaaccgctgggaggaccctggtaagcagctctacaacgtggaggccacatcctatgccctcttggccctactgcagctaaaagactttgactttgtgcctcccgtcgtgcgttggctcaatgaacagagatactacggtggtggctatggctctacccaggccaccttcatggtgttccaagccttggctcaataccaaaaggacgcccctgaccaccaggaactgaaccttgatgtgtccctccaactgcccagccgcagctccaagatcacccaccgtatccactgggaatctgccagcctcctgcgatcagaagagaccaaggaaaatgagggtttcacagtcacagctgaaggaaaaggccaaggcaccttgtcggtggtgacaatgtaccatgctaaggccaaagatcaactcacctgtaataaattcgacctcaaggtcaccataaaaccagcaccggaaacaggtaccggggagaccaggatgccactatgtctatattggacatatccatgatgactggctttgctccagacacagatgacctgaagcagctggccaatggtgttgacagatacatctccaagtatgagctggacaaagccttctccgataggaacaccctcatcatctacctggacaaggtctcacactctgaggatgactgtctagctttcaaagttcaccaatactttaatgtagagcttatccagcctggagcagtcaaggtctacgcctattacaacctggaggaaagctgtacccggttctaccatccggaaaaggaggatggaaagctgaacaagctctgccgtgatgaactgtgccgctgtgctgaggagaattgcttcatacaaaagtcggatgacaaggtcaccctggaagaacggctggacaaggcctgtgagccaggagtggactatgtgtacaagacccgactggtcaaggttcagctgtccaatgactttgacgagtacatcatggccattgagcagaccatcaagtcaggctcggatgaggtgcaggttggacagcagcgcacgttcatcagccccatcaagtgcagagaagccctgaagctggaggagaagaaacactacctcatgtggggtctctcctccgatttctggggagagaagcccaacctcagctacatcatcgggaaggacacttgggtggagcactggcctgaggaggacgaatgccaagacgaagagaaccagaaacaatgccaggacctcggcgccttcaccgagagcatggttgtctttgggtgccccaactgaccacacccccattcccccactccagataaagcttcagttatatctca

SEQ ID NO: 457523 - DNA, 1988 bp, Homo sapiens
  misc_feature (53)..(53): n is a, c, g, or t
  misc_feature (55)..(55): n is a, c, g, or t
  misc_feature (57)..(58): n is a, c, g, or t
  misc_feature (95)..(95): n is a, c, g, or t
  misc_feature (1920)..(1920): n is a, c, g, or t
taactgagaaaggcagcacttgcgggggacatgacaagcaagccaagatcgantnanngtaaattgacctcaggtcaccataaaccagcaccggnaacagaattgaggcctcttcttaacaaatttctgaccacagccaaagataagaaccgctgggaggaccctggtaagcagctctacaacgtggaggccacatcctatgccctcttggccctactgcagctaaaagactttgactttgtgcctcccgtcgtgcgttggctcaatgaacagagatactacggtggtggctatggctctacccaggccaccttcatggtgttccaagccttggctcaataccaaaaggacgcccctgaccaccaggaactgaaccttgatgtgtccctccaactgcccagccgcagctccaagatcacccaccgtatccactgggaatctgccagcctcctgcgatcagaagagaccaaggaaaatgagggtttcacagtcacagctgaaggaaaaggccaaggcaccttgtcggtggtgacaatgtaccatgctaaggccaaagatcaactcacctgtaataaattcgacctcaaggtcaccataaaaccagcaccggaaacagaaaagaggcctcaggatgccaagaacactatgatccttgagatctgtaccaggtaccggggagaccaggatgccactatgtctatattggacatatccatgatgactggctttgctccagacacagatgacctgaagcagctggccaatggtgttgacagatacatctccaagtatgagctggacaaagccttctccgataggaacaccctcatcatctacctggacaaggtctcacactctgaggatgactgtctagctttcaaagttcaccaatactttaatgtagagcttatccagcctggagcagtcaaggtctacgcctattacaacctggaggaaagctgtacccggttctaccatccggaaaaggaggatggaaagctgaacaagctctgccgtgatgaactgtgccgctgtgctgaggagaattgcttcatacaaaagtcggatgacaaggtcaccctggaagaacggctggacaaggcctgtgagccaggagtggactatgtgtacaagacccgactggtcaaggttcagctgtccaatgactttgacgagtacatcatggccattgagcagaccatcaagtcaggctcggatgaggtgcaggttggacagcagcgcacgttcatcagccccatcaagtgcagagaagccctgaagctggaggagaagaaacactacctcatgtggggtctctcctccgatttctggggagagaagcccaacctcagctacatcatcgggaaggacacttgggtggagcactggcctgaggaggacgaatgccaagacgaagagaaccagaaacaatgccaggacctcggcgccttcaccgagagcatggttgtctttgggtgccccaactgaccacacccccattcccccactccagataaagcttcagttatatctcaaaaaaaaaaaaaaaaaaaaaaactggagactagctcgtgccgaattcggcacgagaactagtctcgagtttttttttttttttttttgtaaatgataaactattttactttatgtctaaggtctttcataatatgaaatagaatgtagatattgcaacaatagcatttttggagacagctacctcctttaccaggaataatctttgcatgtcacatttagagataaagctcaaaatgcaaatccttcccctgagagtgggaaagcattaacaaatgagagtgggaaaagcattaacaaagcattaacacaggtctttacatattcaaaatattaaactaatgctaggattatagacttgattttaagacatggtagttaataganaagttctagattgatttttgctatacattggatatgtgatatatggatgtgatatatatatctactgg

SEQ ID NO: 457524 - DNA, 1575 bp, Homo sapiens
  misc_feature (53)..(53): n is a, c, g, or t
  misc_feature (55)..(55): n is a, c, g, or t
  misc_feature (57)..(58): n is a, c, g, or t
  misc_feature (95)..(95): n is a, c, g, or t
taactgagaaaggcagcacttgcgggggacatgacaagcaagccaagatcgantnanngtaaattgacctcaggtcaccataaaccagcaccggnaacagaattgaggcctcttcttaacaaatttctgaccacagccaaagataagaaccgctgggaggaccctggtaagcagctctacaacgtggaggccacatcctatgccctcttggccctactgcagctaaaagactttgactttgtgcctcccgtcgtgcgttggctcaatgaacagagatactacggtggtggctatggctctacccaggccaccttcatggtgttccaagccttggctcaataccaaaaggacgcccctgaccaccaggaactgaaccttgatgtgtccctccaactgcccagccgcagctccaagatcacccaccgtatccactgggaatctgccagcctcctgcgatcagaagagaccaaggaaaatgagggtttcacagtcacagctgaaggaaaaggccaaggcaccttgtcggtggtgacaatgtaccatgctaaggccaaagatcaactcacctgtaataaattcgacctcaaggtcaccataaaaccagcaccggaaacagaaaagaggcctcaggatgccaagaacactatgatccttgagatctgtaccaggtaccggggagaccaggatgccactatgtctatattggacatatccatgatgactggctttgctccagacacagatgacctgaagcagctggccaatggtgttgacagatacatctccaagtatgagctggacaaagccttctccgataggaacaccctcatcatctacctggacaaggtctcacactctgaggatgactgtctagctttcaaagttcaccaatactttaatgtagagcttatccagcctggagcagtcaaggtctacgcctattacaacctggaggaaagctgtacccggttctaccatccggaaaaggaggatggaaagctgaacaagctctgccgtgatgaactgtgccgctgtgctgaggagaattgcttcatacaaaagtcggatgacaaggtcaccctggaagaacggctggacaaggcctgtgagccaggagtggactatgtgtacaagacccgactggtcaaggttcagctgtccaatgactttgacgagtacatcatggccattgagcagaccatcaagtcaggctcggatgaggtgcaggttggacagcagcgcacgttcatcagccccatcaagtgcagagaagccctgaagctggaggagaagaaacactacctcatgtggggtctctcctccgatttctggggagagaagcccaacctcagctacatcatcgggaaggacacttgggtggagcactggcctgaggaggacgaatgccaagacgaagagaaccagaaacaatgccaggacctcggcgccttcaccgagagcatggttgtctttgggtgccccaactgaccacacccccattcccccactccagataaagcttcagttatatctcacgtaccagggtaccgagctgattcgtatcatgtcatctac

SEQ ID NO: 457525 - DNA, 1808 bp, Homo sapiens
  misc_feature (53)..(53): n is a, c, g, or t
  misc_feature (55)..(55): n is a, c, g, or t
  misc_feature (57)..(58): n is a, c, g, or t
  misc_feature (95)..(95): n is a, c, g, or t
taactgagaaaggcagcacttgcgggggacatgacaagcaagccaagatcgantnanngtaaattgacctcaggtcaccataaaccagcaccggnaacagaattgaggcctcttcttaacaaatttctgaccacagccaaagataagaaccgctgggaggaccctggtaagcagctctacaacgtggaggccacatcctatgccctcttggccctactgcagctaaaagactttgactttgtgcctcccgtcgtgcgttggctcaatgaacagagatactacggtggtggctatggctctacccaggccaccttcatggtgttccaagccttggctcaataccaaaaggacgcccctgaccaccaggaactgaaccttgatgtgtccctccaactgcccagccgcagctccaagatcacccaccgtatccactgggaatctgccagcctcctgcgatcagaagagaccaaggaaaatgagggtttcacagtcacagctgaaggaaaaggccaaggcaccttgtcggtggtgacaatgtaccatgctaaggccaaagatcaactcacctgtaataaattcgacctcaaggtcaccataaaaccagcaccggaaacagaaaagaggcctcaggatgccaagaacactatgatccttgagatctgtaccaggtaccggggagaccaggatgccactatgtctatattggacatatccatgatgactggctttgctccagacacagatgacctgaagcagctggccaatggtgttgacagatacatctccaagtatgagctggacaaagccttctccgataggaacaccctcatcatctacctggacaaggtctcacactctgaggatgactgtctagctttcaaagttcaccaatactttaatgtagagcttatccagcctggagcagtcaaggtctacgcctattacaacctggaggaaagctgtacccggttctaccatccggaaaaggaggatggaaagctgaacaagctctgccgtgatgaactgtgccgctgtgctgaggagaattgcttcatacaaaagtcggatgacaaggtcaccctggaagaacggctggacaaggcctgtgagccaggagtggactatgtgtacaagacccgactggtcaaggttcagctgtccaatgactttgacgagtacatcatggccattgagcagaccatcaagtcaggctcggatgaggtgcaggttggacagcagcgcacgttcatcagccccatcaagtgcagagaagccctgaagctggaggagaagaaacactacctcatgtggggtctctcctccgatttctggggagagaagcccaacctcagctacatcatcgggaaggacacttgggtggagcactggcctgaggaggacgaatgccaagacgaagagaaccagaaacaatgccaggacctcggcgccttcaccgagagcatggttgtctttgggtgccccaactgaccacacccccattcccccactccagataaagcttcagttatatctcaatatctcacgtgtctggagttctttgccaagagggagaggctgaaatccccagccgcctcacctgcagctcagctccatcctacttgaaacctcacctgttcccaccgcattttctcctggcgttcgcctgctagtgtgaccctggatgcgaacagacggaccagggcgtgaccgcgcagaaacttcccatcccctccagtatgatctccgggtacctgtacaccatcgcaccaccgcatcaacgttcggtaccggctcgaattgtatcatgc

SEQ ID NO: 457526 - DNA, 1717 bp, Homo sapiens
  misc_feature (53)..(53): n is a, c, g, or t
  misc_feature (55)..(55): n is a, c, g, or t
  misc_feature (57)..(58): n is a, c, g, or t
  misc_feature (95)..(95): n is a, c, g, or t
taactgagaaaggcagcacttgcgggggacatgacaagcaagccaagatcgantnanngtaaattgacctcaggtcaccataaaccagcaccggnaacagaattgaggcctcttcttaacaaatttctgaccacagccaaagataagaaccgctgggaggaccctggtaagcagctctacaacgtggaggccacatcctatgccctcttggccctactgcagctaaaagactttgactttgtgcctcccgtcgtgcgttggctcaatgaacagagatactacggtggtggctatggctctacccaggccaccttcatggtgttccaagccttggctcaataccaaaaggacgcccctgaccaccaggaactgaaccttgatgtgtccctccaactgcccagccgcagctccaagatcacccaccgtatccactgggaatctgccagcctcctgcgatcagaagagaccaaggaaaatgagggtttcacagtcacagctgaaggaaaaggccaaggcaccttgtcggtggtgacaatgtaccatgctaaggccaaagatcaactcacctgtaataaattcgacctcaaggtcaccataaaaccagcaccggaaacagaaaagaggcctcaggatgccaagaacactatgatccttgagatctgtaccaggtaccggggagaccaggatgccactatgtctatattggacatatccatgatgactggctttgctccagacacagatgacctgaagcagctggccaatggtgttgacagatacatctccaagtatgagctggacaaagccttctccgataggaacaccctcatcatctacctggacaaggtctcacactctgaggatgactgtctagctttcaaagttcaccaatactttaatgtagagcttatccagcctggagcagtcaaggtctacgcctattacaacctggaggaaagctgtacccggttctaccatccggaaaaggaggatggaaagctgaacaagctctgccgtgatgaactgtgccgctgtgctgaggagaattgcttcatacaaaagtcggatgacaaggtcaccctggaagaacggctggacaaggcctgtgagccaggagtggactatgtgtacaagacccgactggtcaaggttcagctgtccaatgactttgacgagtacatcatggccattgagcagaccatcaagtcaggctcggatgaggtgcaggttggacagcagcgcacgttcatcagccccatcaagtgcagagaagccctgaagctggaggagaagaaacactacctcatgtggggtctctcctccgatttctggggagagaagcccaacctcagctacatcatcgggaaggacacttgggtggagcactggcctgaggaggacgaatgccaagacgaagagaaccagaaacaatgccaggacctcggcgccttcaccgagagcatggttgtctttgggtgccccaactgaccacacccccattcccccactccagataaagcttcagttatatctcaccttttctcaagttatctactgtcattgtgtccttacatcctttctaactttatatatctccttccggggcgctctgatcccctttcgccataatctgatcgcttactaatccattccctgcgtcattacacttttaatatggaaatttctgtgcgtcacccaatcacattacttcctcacg

SEQ ID NO: 457527 - DNA, 1593 bp, Homo sapiens
  misc_feature (53)..(53): n is a, c, g, or t
  misc_feature (55)..(55): n is a, c, g, or t
  misc_feature (57)..(58): n is a, c, g, or t
  misc_feature (95)..(95): n is a, c, g, or t
taactgagaaaggcagcacttgcgggggacatgacaagcaagccaagatcgantnanngtaaattgacctcaggtcaccataaaccagcaccggnaacagaattgaggcctcttcttaacaaatttctgaccacagccaaagataagaaccgctgggaggaccctggtaagcagctctacaacgtggaggccacatcctatgccctcttggccctactgcagctaaaagactttgactttgtgcctcccgtcgtgcgttggctcaatgaacagagatactacggtggtggctatggctctacccaggccaccttcatggtgttccaagccttggctcaataccaaaaggacgcccctgaccaccaggaactgaaccttgatgtgtccctccaactgcccagccgcagctccaagatcacccaccgtatccactgggaatctgccagcctcctgcgatcagaagagaccaaggaaaatgagggtttcacagtcacagctgaaggaaaaggccaaggcaccttgtcggtggtgacaatgtaccatgctaaggccaaagatcaactcacctgtaataaattcgacctcaaggtcaccataaaaccagcaccggaaacagaaaagaggcctcaggatgccaagaacactatgatccttgagatctgtaccaggtaccggggagaccaggatgccactatgtctatattggacatatccatgatgactggctttgctccagacacagatgacctgaagcagctggccaatggtgttgacagatacatctccaagtatgagctggacaaagccttctccgataggaacaccctcatcatctacctggacaaggtctcacactctgaggatgactgtctagctttcaaagttcaccaatactttaatgtagagcttatccagcctggagcagtcaaggtctacgcctattacaacctggggtgagcagccaacctagggcctggggtctgatggttccaggggcctgagagtcccagaggaaagctgtacccggttctaccatccggaaaaggaggatggaaagctgaacaagctctgccgtgatgaactgtgccgctgtgctgaggagaattgcttcatacaaaagtcggatgacaaggtcaccctggaagaacggctggacaaggcctgtgagccaggagtggactatgtgtacaagacccgactggtcaaggttcagctgtccaatgactttgacgagtacatcatggccattgagcagaccatcaagtcaggctcggatgaggtgcaggttggacagcagcgcacgttcatcagccccatcaagtgcagagaagccctgaagctggaggagaagaaacactacctcatgtggggtctctcctccgatttctggggagagaagcccaacctcagctacatcatcgggaaggacacttgggtggagcactggcctgaggaggacgaatgccaagacgaagagaaccagaaacaatgccaggacctcggcgccttcaccgagagcatggttgtctttgggtgccccaactgaccacacccccattcccccactccagataaagcttcagttatatctca

SEQ ID NO: 457528 - DNA, 1675 bp, Homo sapiens
  misc_feature (53)..(53): n is a, c, g, or t
  misc_feature (55)..(55): n is a, c, g, or t
  misc_feature (57)..(58): n is a, c, g, or t
  misc_feature (95)..(95): n is a, c, g, or t
taactgagaaaggcagcacttgcgggggacatgacaagcaagccaagatcgantnanngtaaattgacctcaggtcaccataaaccagcaccggnaacagaattgaggcctcttcttaacaaatttctgaccacagccaaagataagaaccgctgggaggaccctggtaagcagctctacaacgtggaggccacatcctatgccctcttggccctactgcagctaaaagactttgactttgtgcctcccgtcgtgcgttggctcaatgaacagagatactacggtggtggctatggctctacccaggccaccttcatggtgttccaagccttggctcaataccaaaaggacgcccctgaccaccaggaactgaaccttgatgtgtccctccaactgcccagccgcagctccaagatcacccaccgtatccactgggaatctgccagcctcctgcgatcagaagagaccaaggaaaatgagggtttcacagtcacagctgaaggaaaaggccaaggcaccttgtcggtggtgacaatgtaccatgctaaggccaaagatcaactcacctgtaataaattcgacctcaaggtcaccataaaaccagcaccggaaacagaaaagaggcctcaggatgccaagaacactatgatccttgagatctgtaccaggtaccggggagaccaggatgccactatgtctatattggacatatccatgatgactggctttgctccagacacagatgacctgaagcagctggccaatggtgttgacagatacatctccaagtatgagctggacaaagccttctccgataggaacaccctcatcatctacctggacaaggtctcacactctgaggatgactgtctagctttcaaagttcaccaatactttaatgtagagcttatccagcctggagcagtcaaggtctacgcctattacaacctggaggaaagctgtacccggttctaccatccggaaaaggaggatggaaagctgaacaagctctgccgtgatgaactgtgccgctgtgctgaggagaattgcttcatacaaaagtcggatgacaaggtcaccctggaagaacggctggacaaggcctgtgagccaggagtggactatgtgtacaagacccgactggtcaaggttcagctgtccaatgactttgacgagtacatcatggccattgagcagaccatcaagtcaggctcggatgaggtgcaggttggacagcagcgcacgttcatcagccccatcaagtgcagagaagccctgaagctggaggagaagaaacactacctcatgtggggtctctcctccgatttctggggagagaagcccaacctcagctacatcatcgggaaggacacttgggtggagcactggcctgaggaggacgaatgccggaagaaggtaaagagtgaagccaccactcgcgtctcgaatcgcgcggacgctgggcctgcgcaggcctgttcacagcagctgcatcccgtcagtgttgaagcccgtggagccctctttaggggtctgctgagagcggatattggagctgcctctctgtctctgtttggagatccttatgagctggatcccattcgacagcagtgaagagcttgtcgtgcaaaccctctttccccacagaggagcgtgcggggaactgtaagaacgg

SEQ ID NO: 457529 - DNA, 1619 bp, Homo sapiens
  misc_feature (53)..(53): n is a, c, g, or t
  misc_feature (55)..(55): n is a, c, g, or t
  misc_feature (57)..(58): n is a, c, g, or t
  misc_feature (95)..(95): n is a, c, g, or t
taactgagaaaggcagcacttgcgggggacatgacaagcaagccaagatcgantnanngtaaattgacctcaggtcaccataaaccagcaccggnaacagaattgaggcctcttcttaacaaatttctgaccacagccaaagataagaaccgctgggaggaccctggtaagcagctctacaacgtggaggccacatcctatgccctcttggccctactgcagctaaaagactttgactttgtgcctcccgtcgtgcgttggctcaatgaacagagatactacggtggtggctatggctctacccaggccaccttcatggtgttccaagccttggctcaataccaaaaggacgcccctgaccaccaggaactgaaccttgatgtgtccctccaactgcccagccgcagctccaagatcacccaccgtatccactgggaatctgccagcctcctgcgatcagaagagaccaaggaaaatgagggtttcacagtcacagctgaaggaaaaggccaaggcaccttgtcggtggtgacaatgtaccatgctaaggccaaagatcaactcacctgtaataaattcgacctcaaggtcaccataaaaccagcaccggaaacagaaaagaggcctcaggatgccaagaacactatgatccttgagatctgtaccaggtaccggggagaccaggatgccactatgtctatattggacatatccatgatgactggctttgctccagacacagatgacctgaagcagctggccaatggtgttgacagatacatctccaagtatgagctggacaaagccttctccgataggaacaccctcatcatctacctggacaaggtctcacactctgaggatgactgtctagctttcaaagttcaccaatactttaatgtagagcttatccagcctggagcagtcaaggtctacgcctattacaacctggggtgagcagccaacctagggcctggggtctgatggttccaggggcctgagagtcccagaggaaagctgtacccggttctaccatccggaaaaggaggatggaaagctgaacaagctctgccgtgatgaactgtgccgctgtgctgaggggtgagttccctggagccgggaacagagaattgcttcatacaaaagtcggatgacaaggtcaccctggaagaacggctggacaaggcctgtgagccaggagtggactatgtgtacaagacccgactggtcaaggttcagctgtccaatgactttgacgagtacatcatggccattgagcagaccatcaagtcaggctcggatgaggtgcaggttggacagcagcgcacgttcatcagccccatcaagtgcagagaagccctgaagctggaggagaagaaacactacctcatgtggggtctctcctccgatttctggggagagaagcccaacctcagctacatcatcgggaaggacacttgggtggagcactggcctgaggaggacgaatgccaagacgaagagaaccagaaacaatgccaggacctcggcgccttcaccgagagcatggttgtctttgggtgccccaactgaccacacccccattcccccactccagataaagcttcagttatatctca

SEQ ID NO: 457530 - DNA, 1619 bp, Homo sapiens
  misc_feature (53)..(53): n is a, c, g, or t
  misc_feature (55)..(55): n is a, c, g, or t
  misc_feature (57)..(58): n is a, c, g, or t
  misc_feature (95)..(95): n is a, c, g, or t
taactgagaaaggcagcacttgcgggggacatgacaagcaagccaagatcgantnanngtaaattgacctcaggtcaccataaaccagcaccggnaacagaattgaggcctcttcttaacaaatttctgaccacagccaaagataagaaccgctgggaggaccctggtaagcagctctacaacgtggaggccacatcctatgccctcttggccctactgcagctaaaagactttgactttgtgcctcccgtcgtgcgttggctcaatgaacagagatactacggtggtggctatggctctacccaggccaccttcatggtgttccaagccttggctcaataccaaaaggacgcccctgaccaccaggaactgaaccttgatgtgtccctccaactgcccagccgcagctccaagatcacccaccgtatccactgggaatctgccagcctcctgcgatcagaagagaccaaggaaaatgagggtttcacagtcacagctgaaggaaaaggccaaggcaccttgtcggtggtgacaatgtaccatgctaaggccaaagatcaactcacctgtaataaattcgacctcaaggtcaccataaaaccagcaccggaaacagaaaagaggcctcaggatgccaagaacactatgatccttgagatctgtaccaggtaccggggagaccaggatgccactatgtctatattggacatatccatgatgactggctttgctccagacacagatgacctgaagcagctggccaatggtgttgacagatacatctccaagtatgagctggacaaagccttctccgataggaacaccctcatcatctacctggacaaggtctcacactctgaggatgactgtctagctttcaaagttcaccaatactttaatgtagagcttatccagcctggagcagtcaaggtctacgcctattacaacctggaggaaagctgtacccggttctaccatccggaaaaggaggatggaaagctgaacaagctctgccgtgatgaactgtgccgctgtgctgaggagaattgcttcatacaaaagtcggatgacaaggtcaccctggaagaacggctggacaaggcctgtgagccaggagtggactatgtgtacaagacccgactggtcaaggttcagctgtccaatgactttgacgagtacatcatggccattgagcagaccatcaagtcaggtcaggctcagcacgctgcctcccgtggctcttccctggcttcctccccacgactcagcttcttccctctcccctccactccaggctcggatgaggtgcaggttggacagcagcgcacgttcatcagccccatcaagtgcagagaagccctgaagctggaggagaagaaacactacctcatgtggggtctctcctccgatttctggggagagaagcccaacctcagctacatcatcgggaaggacacttgggtggagcactggcctgaggaggacgaatgccaagacgaagagaaccagaaacaatgccaggacctcggcgccttcaccgagagcatggttgtctttgggtgccccaactgaccacacccccattcccccactccagataaagcttcagttatatctca

SEQ ID NO: 457531 - DNA, 1481 bp, Homo sapiens
  misc_feature (53)..(53): n is a, c, g, or t
  misc_feature (55)..(55): n is a, c, g, or t
  misc_feature (57)..(58): n is a, c, g, or t
  misc_feature (95)..(95): n is a, c, g, or t
taactgagaaaggcagcacttgcgggggacatgacaagcaagccaagatcgantnanngtaaattgacctcaggtcaccataaaccagcaccggnaacagaattgaggcctcttcttaacaaatttctgaccacagccaaagataagaaccgctgggaggaccctggtaagcagctctacaacgtggaggccacatcctatgccctcttggccctactgcagctaaaagactttgactttgtgcctcccgtcgtgcgttggctcaatgaacagagatactacggtggtggctatggctctacccaggccaccttcatggtgttccaagccttggctcaataccaaaaggacgcccctgaccaccaggaactgaaccttgatgtgtccctccaactgcccagccgcagctccaagatcacccaccgtatccactgggaatctgccagcctcctgcgatcagaagagaccaaggaaaatgagggtttcacagtcacagctgaaggaaaaggccaaggcaccttgtcggtggtgacaatgtaccatgctaaggccaaagatcaactcacctgtaataaattcgacctcaaggtcaccataaaaccagcaccggaaacagaaaagaggcctcaggatgccaagaacactatgatccttgagatctgtaccaggtaccggggagaccaggatgccactatgtctatattggacatatccatgatgactggctttgctccagacacagatgacctgaagcagctggccaatggtgttgacagatacatctccaagtatgagctggacaaagccttctccgataggaacaccctcatcatctacctggacaaggtctcacactctgaggatgactgtctagctttcaaagttcaccaatactttaatgtagagcttatccagcctggagcagtcaaggtctacgcctattacaacctggaggaaagctgtacccggttctaccatccggaaaaggaggatggaaagctgaacaagctctgccgtgatgaactgtgccgctgtgctgaggagaattgcttcataccaggagtggactatgtgtacaagacccgactggtcaaggttcagctgtccaatgactttgacgagtacatcatggccattgagcagaccatcaagtcaggctcggatgaggtgcaggttggacagcagcgcacgttcatcagccccatcaagtgcagagaagccctgaagctggaggagaagaaacactacctcatgtggggtctctcctccgatttctggggagagaagcccaacctcagctacatcatcgggaaggacacttgggtggagcactggcctgaggaggacgaatgccaagacgaagagaaccagaaacaatgccaggacctcggcgccttcaccgagagcatggttgtctttgggtgccccaactgaccacacccccattcccccactccagataaagcttcagttatatctca

SEQ ID NO: 457532 - DNA, 1406 bp, Homo sapiens
  misc_feature (53)..(53): n is a, c, g, or t
  misc_feature (55)..(55): n is a, c, g, or t
  misc_feature (57)..(58): n is a, c, g, or t
  misc_feature (95)..(95): n is a, c, g, or t
taactgagaaaggcagcacttgcgggggacatgacaagcaagccaagatcgantnanngtaaattgacctcaggtcaccataaaccagcaccggnaacagaattgaggcctcttcttaacaaatttctgaccacagccaaagataagaaccgctgggaggaccctggtaagcagctctacaacgtggaggccacatcctatgccctcttggccctactgcagctaaaagactttgactttgtgcctcccgtcgtgcgttggctcaatgaacagagatactacggtggtggctatggctctacccaggccaccttcatggtgttccaagccttggctcaataccaaaaggacgcccctgaccaccaggaactgaaccttgatgtgtccctccaactgcccagccgcagctccaagatcacccaccgtatccactgggaatctgccagcctcctgcgatcagaagagaccaaggaaaatgagggtttcacagtcacagctgaaggaaaaggccaaggcaccttgtcggtggtgacaatgtaccatgctaaggccaaagatcaactcacctgtaataaattcgacctcaaggtcaccataaaaccagcaccggaaacagaaaagaggcctcaggatgccaagaacactatgatccttgagatctgtaccaggtaccggggagaccaggatgccactatgtctatattggacatatccatgatgactggctttgctccagacacagatgacctgaagcagctggccaatggtgttgacagatacatctccaagtatgagctggacaaagccttctccgataggaacaccctcatcatctacctggacaaggtctcacactctgaggatgactgtctagctttcaaagttcaccaatactttaatgtagagcttatccagcctggagcagtcaaggtctacgcctattacaacctggtggaagaacggctggacaaggcctgtgagccaggagtggactatgtgtacaagacccgactggtcaaggttcagctgtccaatgactttgacgagtacatcatggccattgagcagaccatcaagtcaggctcggatgaggtgcaggttggacagcagcgcacgttcatcagccccatcaagtgcagagaagccctgaagctggaggagaagaaacactacctcatgtggggtctctcctccgatttctggggagagaagcccaacctcagctacatcatcgggaaggacacttgggtggagcactggcctgaggaggacgaatgccaagacgaagagaaccagaaacaatgccaggacctcggcgccttcaccgagagcatggttgtctttgggtgccccaactgaccacacccccattcccccactccagataaagcttcagttatatctca

SEQ ID NO: 457533 - DNA, 1748 bp, Homo sapiens
  misc_feature (53)..(53): n is a, c, g, or t
  misc_feature (55)..(55): n is a, c, g, or t
  misc_feature (57)..(58): n is a, c, g, or t
  misc_feature (95)..(95): n is a, c, g, or t
taactgagaaaggcagcacttgcgggggacatgacaagcaagccaagatcgantnanngtaaattgacctcaggtcaccataaaccagcaccggnaacagaattgaggcctcttcttaacaaatttctgaccacagccaaagataagaaccgctgggaggaccctggtaagcagctctacaacgtggaggccacatcctatgccctcttggccctactgcagctaaaagactttgactttgtgcctcccgtcgtgcgttggctcaatgaacagagatactacggtggtggctatggctctacccaggccaccttcatggtgttccaagccttggctcaataccaaaaggacgcccctgaccaccaggaactgaaccttgatgtgtccctccaactgcccagccgcagctccaagatcacccaccgtatccactgggaatctgccagcctcctgcgatcagaagagaccaaggaaaatgagggtttcacagtcacagctgaaggaaaaggccaaggcaccttgtcggtggtgacaatgtaccatgctaaggccaaagatcaactcacctgtaataaattcgacctcaaggtcaccataaaaccagcaccggaaacagaaaagaggcctcaggatgccaagaacactatgatccttgagatctgtaccaggtaccggggagaccaggatgccactatgtctatattggacatatccatgatgactggctttgctccagacacagatgacctgaagcagctggccaatggtgttgacagatacatctccaagtatgagctggacaaagccttctccgataggaacaccctcatcatctacctggacaaggtctcacactctgaggatgactgtctagctttcaaagttcaccaatactttaatgtagagcttatccagcctggagcagtcaaggtctacgcctattacaacctggaggaaagctgtacccggttctaccatccggaaaaggaggatggaaagctgaacaagctctgccgtgatgaactgtgccgctgtgctgaggagaattgcttcatacaaaagtcggatgacaaggtcaccctggaagaacggctggacaaggcctgtgagccaggagtggactatgtgtacaagacccgactggtcaaggttcagctgtccaatgactttgacgagtacatcatggccattgagcagaccatcaagtcaggtcaggctcagcacgctgcctcccgtggctcttccctggcttcctccccacgactcagcttcttccctctcccctccactccaggctcggatgaggtgcaggttggacagcagcgcacgttcatcagccccatcaagtgcagagaagccctgaagctggaggagaagaaacactacctcatgtggggtctctcctccgatttctggggagagaagcccaaagtgagtgctttccctgcgcgtgcgcgcgaccgcccgactgccccgcccatgccacgcccacaccattgtcacgcccctgcgccacgcccacaccacgccccttcctgacctgccattcttccctccagcctcagctacatcatcgggaaggacacttgggtggagcactggcctgaggaggacgaatgccaagacgaagagaaccagaaacaatgccaggacctcggcgccttcaccgagagcatggttgtctttgggtgccccaactgaccacacccccattcccccactccagataaagcttcagttatatctca

SEQ ID NO: 457534 - DNA, 2014 bp, Homo sapiens
  misc_feature (53)..(53): n is a, c, g, or t
  misc_feature (55)..(55): n is a, c, g, or t
  misc_feature (57)..(58): n is a, c, g, or t
  misc_feature (95)..(95): n is a, c, g, or t
  misc_feature (1946)..(1946): n is a, c, g, or t
taactgagaaaggcagcacttgcgggggacatgacaagcaagccaagatcgantnanngtaaattgacctcaggtcaccataaaccagcaccggnaacagaattgaggcctcttcttaacaaatttctgaccacagccaaagataagaaccgctgggaggaccctggtaagcagctctacaacgtggaggccacatcctatgccctcttggccctactgcagctaaaagactttgactttgtgcctcccgtcgtgcgttggctcaatgaacagagatactacggtggtggctatggctctacccaggccaccttcatggtgttccaagccttggctcaataccaaaaggacgcccctgaccaccaggaactgaaccttgatgtgtccctccaactgcccagccgcagctccaagatcacccaccgtatccactgggaatctgccagcctcctgcgatcagaagagaccaaggaaaatgagggtttcacagtcacagctgaaggaaaaggccaaggcaccttgtcggtggtgacaatgtaccatgctaaggccaaagatcaactcacctgtaataaattcgacctcaaggtcaccataaaaccagcaccggaaacagaaaagaggcctcaggatgccaagaacactatgatccttgagatctgtaccaggtaccggggagaccaggatgccactatgtctatattggacatatccatgatgactggctttgctccagacacagatgacctgaagcagctggccaatggtgttgacagatacatctccaagtatgagctggacaaagccttctccgataggaacaccctcatcatctacctggacaaggtctcacactctgaggatgactgtctagctttcaaagttcaccaatactttaatgtagagcttatccagcctggagcagtcaaggtctacgcctattacaacctggaggaaagctgtacccggttctaccatccggaaaaggaggatggaaagctgaacaagctctgccgtgatgaactgtgccgctgtgctgaggggtgagttccctggagccgggaacagagaattgcttcatacaaaagtcggatgacaaggtcaccctggaagaacggctggacaaggcctgtgagccaggagtggactatgtgtacaagacccgactggtcaaggttcagctgtccaatgactttgacgagtacatcatggccattgagcagaccatcaagtcaggctcggatgaggtgcaggttggacagcagcgcacgttcatcagccccatcaagtgcagagaagccctgaagctggaggagaagaaacactacctcatgtggggtctctcctccgatttctggggagagaagcccaacctcagctacatcatcgggaaggacacttgggtggagcactggcctgaggaggacgaatgccaagacgaagagaaccagaaacaatgccaggacctcggcgccttcaccgagagcatggttgtctttgggtgccccaactgaccacacccccattcccccactccagataaagcttcagttatatctcaaaaaaaaaaaaaaaaaaaaaaactggagactagctcgtgccgaattcggcacgagaactagtctcgagtttttttttttttttttttgtaaatgataaactattttactttatgtctaaggtctttcataatatgaaatagaatgtagatattgcaacaatagcatttttggagacagctacctcctttaccaggaataatctttgcatgtcacatttagagataaagctcaaaatgcaaatccttcccctgagagtgggaaagcattaacaaatgagagtgggaaaagcattaacaaagcattaacacaggtctttacatattcaaaatattaaactaatgctaggattatagacttgattttaagacatggtagttaataganaagttctagattgatttttgctatacattggatatgtgatatatggatgtgatatatatatctactgg

SEQ ID NO: 457535 - DNA, 1302 bp, Homo sapiens
  misc_feature (53)..(53): n is a, c, g, or t
  misc_feature (55)..(55): n is a, c, g, or t
  misc_feature (57)..(58): n is a, c, g, or t
  misc_feature (95)..(95): n is a, c, g, or t
taactgagaaaggcagcacttgcgggggacatgacaagcaagccaagatcgantnanngtaaattgacctcaggtcaccataaaccagcaccggnaacagaattgaggcctcttcttaacaaatttctgaccacagccaaagataagaaccgctgggaggaccctggtaagcagctctacaacgtggaggccacatcctatgccctcttggccctactgcagctaaaagactttgactttgtgcctcccgtcgtgcgttggctcaatgaacagagatactacggtggtggctatggctctacccaggccaccttcatggtgttccaagccttggctcaataccaaaaggacgcccctgaccaccaggaactgaaccttgatgtgtccctccaactgcccagccgcagctccaagatcacccaccgtatccactgggaatctgccagcctcctgcgatcagaagagaccaaggaaaatgagggtttcacagtcacagctgaaggaaaaggccaaggcaccttgtcggtggtgacaatgtaccatgctaaggccaaagatcaactcacctgtaataaattcgacctcaaggtcaccataaaaccagcaccggaaacagaaaagaggcctcaggatgccaagaacactatgatccttgagatctgtaccaggtaccggggagaccaggatgccactatgtctatattggacatatccatgatgactggctttgctccagacacagatgacctgaagcagctggccaatggtgttgacagatacatctccaagtatgagctggacaaagccttctccgataggaacaccctcatcatctacctggacaaggtctcacactctgaggatgactgtctagctttcaaagttcaccaatactttaatgtagagcttatccagcctggagcagtcaaggtctacgcctattacaacctggtggaagaacggctggacaaggcctgtgagccaggagtggactatgtgtacaagacccgactggtcaaggttcagctgtccaatgactttgacgagtacatcatggccattgagcagaccatcaagtcaggctcggatgaggtgcaggttggacagcagcgcacgttcatcagccccatcaagtgcagagaagccctgaagctggaggagaagaaacactacctcatgtggggtctctcctccgatttctggggagagaagcccaaaactttagctacatcatcgggatagacacttggctggtgaatatacctatgcggaggttagaacatcgcaacgcctgagtggaac

SEQ ID NO: 457536 - DNA, 996 bp, Homo sapiens
  misc_feature (53)..(53): n is a, c, g, or t
  misc_feature (55)..(55): n is a, c, g, or t
  misc_feature (57)..(58): n is a, c, g, or t
  misc_feature (95)..(95): n is a, c, g, or t
  misc_feature (963)..(963): n is a, c, g, or t
  misc_feature (980)..(980): n is a, c, g, or t
taactgagaaaggcagcacttgcgggggacatgacaagcaagccaagatcgantnanngtaaattgacctcaggtcaccataaaccagcaccggnaacagaattgaggcctcttcttaacaaatttctgaccacagccaaagataagaaccgctgggaggaccctggtaagcagctctacaacgtggaggccacatcctatgccctcttggccctactgcagctaaaagactttgactttgtgcctcccgtcgtgcgttggctcaatgaacagagatactacggtggtggctatggctctacccaggccaccttcatggtgttccaagccttggctcaataccaaaaggacgcccctgaccaccaggaactgaaccttgatgtgtccctccaactgcccagccgcagctccaagatcacccaccgtatccactgggaatctgccagcctcctgcgatcagaagagaccaaggaaaatgagggtttcacagtcacagctgaaggaaaaggccaaggcaccttgtcggtggtgacaatgtaccatgctaaggccaaagatcaactcacctgtaataaattcgacctcaaggtcaccataaaaccagcaccggaaacagaaaagaggcctcaggatgccaagaacactatgatccttgagatctgtaccaggtaccggggagaccaggatgccactatgtctatattggacatatccatgatgactggctttgctccagacacagatgacctgaagcagctggccaatggtgttgacagatacatctccaagtatgagctggacaaagccttctccgataggaacaccctcatcatctacctggacaaggtctcacactctgaggatgactgtctagctttcaaagttcaccaatactttaatgtagagcttatccagcctggagcagtcaaggtctacgcctattacaacctggtacgagagtcncaacctgtcgacagtcnggtccacctcgatcta

SEQ ID NO: 457537 - DNA, 820 bp, Homo sapiens
  misc_feature (53)..(53): n is a, c, g, or t
  misc_feature (55)..(55): n is a, c, g, or t
  misc_feature (57)..(58): n is a, c, g, or t
  misc_feature (95)..(95): n is a, c, g, or t
taactgagaaaggcagcacttgcgggggacatgacaagcaagccaagatcgantnanngtaaattgacctcaggtcaccataaaccagcaccggnaacagaattgaggcctcttcttaacaaatttctgaccacagccaaagataagaaccgctgggaggaccctggtaagcagctctacaacgtggaggccacatcctatgccctcttggccctactgcagctaaaagactttgactttgtgcctcccgtcgtgcgttggctcaatgaacagagatactacggtggtggctatggctctacccaggccaccttcatggtgttccaagccttggctcaataccaaaaggacgcccctgaccaccaggaactgaaccttgatgtgtccctccaactgcccagccgcagctccaagatcacccaccgtatccactgggaatctgccagcctcctgcgatcagaagagaccaaggaaaatgagggtttcacagtcacagctgaaggaaaaggccaaggcaccttgtcggtggtgacaatgtaccatgctaaggccaaagatcaactcacctgtaataaattcgacctcaaggtcaccataaaaccagcaccggaaacagaaaagaggcctcaggatgccaagaacactatgatccttgagatctgtaccaggtaccggggagaccaggatgccactatgtctatattggacatatccatgatgactggctttgctccagacacagatgacctgaagcagctggccaatggtgtgatgaattccttgcaggatcgctacggttcctactgatccgagctctgtg

SEQ ID NO: 457538 - DNA, 1182 bp, Homo sapiens
  misc_feature (53)..(53): n is a, c, g, or t
  misc_feature (55)..(55): n is a, c, g, or t
  misc_feature (57)..(58): n is a, c, g, or t
  misc_feature (95)..(95): n is a, c, g, or t
  misc_feature (1087)..(1087): n is a, c, g, or t
  misc_feature (1111)..(1111): n is a, c, g, or t
  misc_feature (1150)..(1150): n is a, c, g, or t
taactgagaaaggcagcacttgcgggggacatgacaagcaagccaagatcgantnanngtaaattgacctcaggtcaccataaaccagcaccggnaacagaattgaggcctcttcttaacaaatttctgaccacagccaaagataagaaccgctgggaggaccctggtaagcagctctacaacgtggaggccacatcctatgccctcttggccctactgcagctaaaagactttgactttgtgcctcccgtcgtgcgttggctcaatgaacagagatactacggtggtggctatggctctacccaggccaccttcatggtgttccaagccttggctcaataccaaaaggacgcccctgaccaccaggaactgaaccttgatgtgtccctccaactgcccagccgcagctccaagatcacccaccgtatccactgggaatctgccagcctcctgcgatcagaagagaccaaggaaaatgagggtttcacagtcacagctgaaggaaaaggccaaggcaccttgtcggtggtgacaatgtaccatgctaaggccaaagatcaactcacctgtaataaattcgacctcaatgcctcccaggttcaagacagaaagtcgaagtcttcctgggccatgtctgcagcctgggactttcctttggagtagaaataggagggtgcttggttttcccagcatgaatggagaggacatggggcttctcttcctctgctctgagtgggaaaggagctctgagggctggctctgcacagagaagggggaagtggacactcattgacccactgctgtaccttctgcatctcactcaccgttcactggctttttctcttcttgcaggtgtctcctgcacctgcgccagctcctgcaagtgcaaagagtgcaaatgcacctcctgcaagaagagtgagtgcggggccatctccaggaatctggggctgtggctaaggttgggagggaacccaaggctgtccctgagtgcgtgcttctggggaaccggcctcctttgtccctgtaggttgtcactgcctgtctagtcttctgcactttccagggcttatgtgaagtggggcanctttctcaaaggaagacccatccnatgtccaccagttgtctcctgacaaaaaaccatgccatnatgaactaagggtcctctggggctggaaggat

SEQ ID NO: 457539 - DNA, 683 bp, Homo sapiens
  misc_feature (53)..(53): n is a, c, g, or t
  misc_feature (55)..(55): n is a, c, g, or t
  misc_feature (57)..(58): n is a, c, g, or t
  misc_feature (95)..(95): n is a, c, g, or t
taactgagaaaggcagcacttgcgggggacatgacaagcaagccaagatcgantnanngtaaattgacctcaggtcaccataaaccagcaccggnaacagaattgaggcctcttcttaacaaatttctgaccacagccaaagataagaaccgctgggaggaccctggtaagcagctctacaacgtggaggccacatcctatgccctcttggccctactgcagctaaaagactttgactttgtgcctcccgtcgtgcgttggctcaatgaacagagatactacggtggtggctatggctctacccaggcaagtgggcccacagcccctaggcacatgcatccctgtctcctgcggcttcccactggcctcctagagaagacactgaggcccagcgaggcagttcttcattcccacgagccagtgtgattgcagtggagttgagaatcagtttttattacttgcaaacccatctataggttctagaatacaatctgggtactccaagctgtgtgttgagccttcttcttgccccaggtgtctagatcatgttctcagggcccaggttcaggtctaagcctctctctccacctggtgggctctagaccaggttcccagttctatctcacaatcttaccctgtcttgctggtgggttctagaccatgttcccagttctaccaggctc

SEQ ID NO: 457540 - DNA, 382 bp, Homo sapiens
ctgagccctcctctcccttctcagattgaggatggctcgggggaggttgtgctgagccggaaggtactgctggacggggtgcagaacccccgagcagaagacctggtggggaagtctttgtacgtgtctgccaccgtcatcttgcactcaggcagtgacatggtgcaggcagagcgcagcgggatccccatcgtgacctctccctaccagatccacttcaccaagacacccaagtacttcaaaccaggaatgccctttgacctcatggtgttcgtgacgaaccctgatggctctccagcctaccgagtccccgtggcagtccagggcgaggactcgtattacaattgtcgaccggccgcgaatttagtagtagtagtcgacc

SEQ ID NO: 457541 - DNA, 1049 bp, Homo sapiens
  misc_feature (1)..(2): n is a, c, g, or t
  misc_feature (9)..(9): n is a, c, g, or t
nnttccggnacgaggggaaaaggccaaggcaccttgtcggtggtgacaatgtaccatgctaaggccaaagatcaactcacctgtaataaattcgacctcaaggtcaccataaaaccagcaccggaaacagaaaagaggcctcaggatgccaagaacactatgatccttgagatctgtaccaggtaccggggagaccaggatgccactatgtctatattggacatatccatgatgactggctttgctccagacacagatgacctgaagcagctggccaatggtgttgacagatacatctccaagtatgagctggacaaagccttctccgataggaacaccctcatcatctacctggacaaggtctcacactctgaggatgactgtctagctttcaaagttcaccaatactttaatgtagagcttatccagcctggagcagtcaaggtctacgcctattacaacctggaggaaagctgtacccggttctaccatccggaaaaggaggatggaaagctgaacaagctctgccgtgatgaactgtgccgctgtgctgaggagaattgcttcatacaaaagtcggatgacaaggtcaccctggaagaacggctggacaaggcctgtgagccaggagtggactatgtgtacaagacccgactggtcaaggttcagctgtccaatgactttgacgagtacatcatggccattgagcagaccatcaagtcaggctcggatgaggtgcaggttggacagcagcgcacgttcatcagccccatcaagtgcagagaagccctgaagctggaggagaagaaacactacctcatgtggggtctctcctccgatttctggggagagaagcccaacctcagctacatcatcgggaaggacacttgggtggagcactggcctgaggaggacgaatgccaagacgaagagaaccagaaacaatgccaggacctcggcgccttcaccgagagcatggttgtctttgggtgccccaactgaccacacccccattcccccactccagataaagcttcagttatatctca

SEQ ID NO: 457542 - DNA, 1019 bp, Homo sapiens
  misc_feature (53)..(53): n is a, c, g, or t
  misc_feature (55)..(55): n is a, c, g, or t
  misc_feature (57)..(58): n is a, c, g, or t
  misc_feature (95)..(95): n is a, c, g, or t
taactgagaaaggcagcacttgcgggggacatgacaagcaagccaagatcgantnanngtaaattgacctcaggtcaccataaaccagcaccggnaacagaaaagaggcctcaggatgccaagaacactatgatccttgagatctgtaccaggtaccggggagaccaggatgccactatgtctatattggacatatccatgatgactggctttgctccagacacagatgacctgaagcagctggccaatggtgttgacagatacatctccaagtatgagctggacaaagccttctccgataggaacaccctcatcatctacctggacaaggtctcacactctgaggatgactgtctagctttcaaagttcaccaatactttaatgtagagcttatccagcctggagcagtcaaggtctacgcctattacaacctggaggaaagctgtacccggttctaccatccggaaaaggaggatggaaagctgaacaagctctgccgtgatgaactgtgccgctgtgctgaggagaattgcttcatacaaaagtcggatgacaaggtcaccctggaagaacggctggacaaggcctgtgagccaggagtggactatgtgtacaagacccgactggtcaaggttcagctgtccaatgactttgacgagtacatcatggccattgagcagaccatcaagtcaggctcggatgaggtgcaggttggacagcagcgcacgttcatcagccccatcaagtgcagagaagccctgaagctggaggagaagaaacactacctcatgtggggtctctcctccgatttctggggagagaagcccaacctcagctacatcatcgggaaggacacttgggtggagcactggcctgaggaggacgaatgccaagacgaagagaaccagaaacaatgccaggacctcggcgccttcaccgagagcatggttgtctttgggtgccccaactgaccacacccccattcccccactccagataaagcttcagttatatctca

SEQ ID NO: 457543 - DNA, 1856 bp, Homo sapiens
  misc_feature (53)..(53): n is a, c, g, or t
  misc_feature (55)..(55): n is a, c, g, or t
  misc_feature (57)..(58): n is a, c, g, or t
  misc_feature (95)..(95): n is a, c, g, or t
  misc_feature (1757)..(1757): n is a, c, g, or t
taactgagaaaggcagcacttgcgggggacatgacaagcaagccaagatcgantnanngtaaattgacctcaggtcaccataaaccagcaccggnaacagaattgaggcctcttcttaacaaatttctgaccacagccaaagataagaaccgctgggaggaccctggtaagcagctctacaacgtggaggccacatcctatgccctcttggccctactgcagctaaaagactttgactttgtgcctcccgtcgtgcgttggctcaatgaacagagatactacggtggtggctatggctctacccaggccaccttcatggtgttccaagccttggctcaataccaaaaggacgcccctgaccaccaggaactgaaccttgatgtgtccctccaactgcccagccgcagctccaagatcacccaccgtatccactgggaatctgccagcctcctgcgatcagaagagaccaaggaaaatgagggtttcacagtcacagctgaaggaaaaggccaaggcaccttgtcggtggtgacaatgtaccatgctaaggccaaagatcaactcacctgtaataaattcgacctcaaggtcaccataaaaccagcaccggaaacagaaaagaggcctcaggatgccaagaacactatgatccttgagatctgtaccaggtaccggggagaccaggatgccactatgtctatattggacatatccatgatgactggctttgctccagacacagatgacctgaagcagctggccaatggtgttgacagatacatctccaagtatgagctggacaaagccttctccgataggaacaccctcatcatctacctggacaaggtctcacactctgaggatgactgtctagctttcaaagttcaccaatactttaatgtagagcttatccagcctggagcagtcaaggtctacgcctattacaacctggaggaaagctgtacccggttctaccatccggaaaaggaggatggaaagctgaacaagctctgccgtgatgaactgtgccgctgtgctgaggagaattgcttcatacaaaagtcggatgacaaggtcaccctggaagaacggctggacaaggcctgtgagccaggagtggactatgtgtacaagacccgactggtcaaggttcagctgtccaatgactttgacgagtacatcatggccattgagcagaccatcaagtcaggctcggatgaggtgcaggttggacagcagcgcacgttcatcagccccatcaagtgcagagaagccctgaagctggaggagaagaaacactacctcatgtggggtctctcctccgatttctggggagagaagcccaacctcagctacatcatcgggaaggacacttgggtggagcactggcctgaggaggacgaatgccaagacgaagagaaccagaaacaatgccaggacctcggcgccttcaccgagagcatggttgtctttgggtgccccaactgaccacacccccattcccccactccagataaagcttcagttatatctcaaaaaaaaaaagcttcaaggttacttcgcggagctggaacgctggccgcgcaggccctgagggctcgcggccccagtggcgcggccgcgatgcgctccatggcatctggaggtgggtgttcccactgatgaagagcacgcgactgggttggagagggagatcatgctggctgcaagaagggctggaccctacatgtactggcccaaagggagctcaggcacanggaagacctatttagtccctcatctccacagagatataggctgctctggagacatacaccgcgtctggtttgctgccgcgaggccacatgcccgctggg

SEQ ID NO: 457544 - DNA, 1770 bp, Homo sapiens
  misc_feature (53)..(53): n is a, c, g, or t
  misc_feature (55)..(55): n is a, c, g, or t
  misc_feature (57)..(58): n is a, c, g, or t
  misc_feature (95)..(95): n is a, c, g, or t
taactgagaaaggcagcacttgcgggggacatgacaagcaagccaagatcgantnanngtaaattgacctcaggtcaccataaaccagcaccggnaacagaattgaggcctcttcttaacaaatttctgaccacagccaaagataagaaccgctgggaggaccctggtaagcagctctacaacgtggaggccacatcctatgccctcttggccctactgcagctaaaagactttgactttgtgcctcccgtcgtgcgttggctcaatgaacagagatactacggtggtggctatggctctacccaggccaccttcatggtgttccaagccttggctcaataccaaaaggacgcccctgaccaccaggaactgaaccttgatgtgtccctccaactgcccagccgcagctccaagatcacccaccgtatccactgggaatctgccagcctcctgcgatcagaagagaccaaggaaaatgagggtttcacagtcacagctgaaggaaaaggccaaggcaccttgtcggtggtgacaatgtaccatgctaaggccaaagatcaactcacctgtaataaattcgacctcaaggtcaccataaaaccagcaccggaaacagaaaagaggcctcaggatgccaagaacactatgatccttgagatctgtaccaggtaccggggagaccaggatgccactatgtctatattggacatatccatgatgactggctttgctccagacacagatgacctgaagcagctggccaatggtgttgacagatacatctccaagtatgagctggacaaagccttctccgataggaacaccctcatcatctacctggacaaggtctcacactctgaggatgactgtctagctttcaaagttcaccaatactttaatgtagagcttatccagcctggagcagtcaaggtctacgcctattacaacctggaggaaagctgtacccggttctaccatccggaaaaggaggatggaaagctgaacaagctctgccgtgatgaactgtgccgctgtgctgaggagaattgcttcatacaaaagtcggatgacaaggtcaccctggaagaacggctggacaaggcctgtgagccaggagtggactatgtgtacaagacccgactggtcaaggttcagctgtccaatgactttgacgagtacatcatggccattgagcagaccatcaagtcaggctcggatgaggtgcaggttggacagcagcgcacgttcatcagccccatcaagtgcagagaagccctgaagctggaggagaagaaacactacctcatgtggggtctctcctccgatttctggggagagaagcccaacctcagctacatcatcgggaaggacacttgggtggagcactggcctgaggaggacgaatgccaagacgaagagaaccagaaacaatgccaggacctcggcgccttcaccgagagcatggttgtctttgggtgccccaactgaccacacccccattcccccactccagataaagcttcagttatatctcaaaaaaagaaaacaaaagaaaaactttgtgggcggccggcccgagaaaaagtttaaacatctggtgggggggccccaagggtagtgaacgggcagggtccaagagacaccgggcgtaattgggtgtttcaccaaaaggcggggcgggtgtgaaaccacgggctggggtgggctcagggcaggcgaacccccgcgggggaaagaagggaaggaagggggggagagaaccatgggcga

SEQ ID NO: 457545 - DNA, 1618 bp, Homo sapiens
  misc_feature (53)..(53): n is a, c, g, or t
  misc_feature (55)..(55): n is a, c, g, or t
  misc_feature (57)..(58): n is a, c, g, or t
  misc_feature (95)..(95): n is a, c, g, or t
  misc_feature (1558)..(1558): n is a, c, g, or t
taactgagaaaggcagcacttgcgggggacatgacaagcaagccaagatcgantnanngtaaattgacctcaggtcaccataaaccagcaccggnaacagaattgaggcctcttcttaacaaatttctgaccacagccaaagataagaaccgctgggaggaccctggtaagcagctctacaacgtggaggccacatcctatgccctcttggccctactgcagctaaaagactttgactttgtgcctcccgtcgtgcgttggctcaatgaacagagatactacggtggtggctatggctctacccaggccaccttcatggtgttccaagccttggctcaataccaaaaggacgcccctgaccaccaggaactgaaccttgatgtgtccctccaactgcccagccgcagctccaagatcacccaccgtatccactgggaatctgccagcctcctgcgatcagaagagaccaaggaaaatgagggtttcacagtcacagctgaaggaaaaggccaaggcaccttgtcggtggtgacaatgtaccatgctaaggccaaagatcaactcacctgtaataaattcgacctcaaggtcaccataaaaccagcaccggaaacagaaaagaggcctcaggatgccaagaacactatgatccttgagatctgtaccaggtaccggggagaccaggatgccactatgtctatattggacatatccatgatgactggctttgctccagacacagatgacctgaagcagctggccaatggtgttgacagatacatctccaagtatgagctggacaaagccttctccgataggaacaccctcatcatctacctggacaaggtctcacactctgaggatgactgtctagctttcaaagttcaccaatactttaatgtagagcttatccagcctggagcagtcaaggtctacgcctattacaacctggaggaaagctgtacccggttctaccatccggaaaaggaggatggaaagctgaacaagctctgccgtgatgaactgtgccgctgtgctgaggagaattgcttcatacaaaagtcggatgacaaggtcaccctggaagaacggctggacaaggcctgtgagccaggagtggactatgtgtacaagacccgactggtcaaggttcagctgtccaatgactttgacgagtacatcatggccattgagcagaccatcaagtcaggctcggatgaggtgcaggttggacagcagcgcacgttcatcagccccatcaagtgcagagaagccctgaagctggaggagaagaaacactacctcatgtggggtctctcctccgatttctggggagagaagcccaacctcagctacatcatcgggaaggacacttgggtggagcactggcctgaggaggacgaatgccaagacgaagagaaccagaaacaatgccaggacctcggcgccttcaccgagagcatggttgtctttgggtgccccaactgaccacacccccattcccccactccagataaagcttcagttatatctcactcaaaagggcaggctcaaaaantgggaaagagcttaaaaaagggaagaggttgacctacccgggttttttttttttttcctg

SEQ ID NO: 457546 - DNA, 1484 bp, Homo sapiens
  misc_feature (53)..(53): n is a, c, g, or t
  misc_feature (55)..(55): n is a, c, g, or t
  misc_feature (57)..(58): n is a, c, g, or t
  misc_feature (95)..(95): n is a, c, g, or t
taactgagaaaggcagcacttgcgggggacatgacaagcaagccaagatcgantnanngtaaattgacctcaggtcaccataaaccagcaccggnaacagaattgaggcctcttcttaacaaatttctgaccacagccaaagataagaaccgctgggaggaccctggtaagcagctctacaacgtggaggccacatcctatgccctcttggccctactgcagctaaaagactttgactttgtgcctcccgtcgtgcgttggctcaatgaacagagatactacggtggtggctatggctctacccaggccaccttcatggtgttccaagccttggctcaataccaaaaggacgcccctgaccaccaggaactgaaccttgatgtgtccctccaactgcccagccgcagctccaagatcacccaccgtatccactgggaatctgccagcctcctgcgatcagaagagaccaaggaaaatgagggtttcacagtcacagctgaaggaaaaggccaaggcaccttgtcggtggtgacaatgtaccatgctaaggccaaagatcaactcacctgtaataaattcgacctcaaggtcaccataaaaccagcaccggaaacagaaaagaggcctcaggatgccaagaacactatgatccttgagatctgtaccaggtaccggggagaccaggatgccactatgtctatattggacatatccatgatgactggctttgctccagacacagatgacctgaagcagctggccaatggtgttgacagatacatctccaagtatgaggtctcacactctgaggatgactgtctagctttcaaagttcaccaatactttaatgtagagcttatccagcctggagcagtcaaggtctacgcctattacaacctggaggaaagctgtacccggttctaccatccggaaaaggaggatggaaagctgaacaagctctgccgtgatgaactgtgccgctgtgctgaggagaattgcttcatacaaaagtcggatgacaaggtcaccctggaagaacggctggacaaggcctgtgagccaggagtggactatgtgtacaagacccgactggtcaaggttcagctgtccaatgactttgacgagtacatcatggccattgagcagaccatcaagtcaggctcggatgaggtgcaggttggacagcagcgcacgttcatcagccccatcaagtgcagagaagccctgaagctggaggagaagaaacactacctcatgtggggtctctcctccgatttctggggagagaagcccaacctcagctacatcatcgggaaggacacttgggtggagcactggcctgaggaggacgaatgccaagacgaagagaaccagaaacaatgccaggacctcggcgccttcaccgagagcatggttgtctttgggtgccccaactgaccacacccccattcccccactccagataaagcttcagttatatctca

SEQ ID NO: 457547 - DNA, 1471 bp, Homo sapiens
  misc_feature (53)..(53): n is a, c, g, or t
  misc_feature (55)..(55): n is a, c, g, or t
  misc_feature (57)..(58): n is a, c, g, or t
  misc_feature (95)..(95): n is a, c, g, or t
taactgagaaaggcagcacttgcgggggacatgacaagcaagccaagatcgantnanngtaaattgacctcaggtcaccataaaccagcaccggnaacagaattgaggcctcttcttaacaaatttctgaccacagccaaagataagaaccgctgggaggaccctggtaagcagctctacaacgtggaggccacatcctatgccctcttggccctactgcagctaaaagactttgactttgtgcctcccgtcgtgcgttggctcaatgaacagagatactacggtggtggctatggctctacccaggccaccttcatggtgttccaagccttggctcaataccaaaaggacgcccctgaccaccaggaactgaaccttgatgtgtccctccaactgcccagccgcagctccaagatcacccaccgtatccactgggaatctgccagcctcctgcgatcagaagagaccaaggaaaatgagggtttcacagtcacagctgaaggaaaaggccaaggcaccttgtcggtggtgacaatgtaccatgctaaggccaaagatcaactcacctgtaataaattcgacctcaaggtcaccataaaaccagcaccggaaacagaaaagaggcctcaggatgccaagaacactatgatccttgagatctgtaccaggtaccggggagaccaggatgccactatgtctatattggacatatccatgatgactggctttgctccagacacagatgacctgaagcagctggccaatggtgttgacagatacatctccaagtatgagctggacaaagccttctccgataggaacaccctcatcatctacctggacaaggtctcacactctgaggatgactgtctagctttcaaagttcaccaatactttaatgtagagcttatccagcctggagcagtcaaggtctacgcctattacaacctggaggaaagctgtacccggttctaccatagaattgcttcatacaaaagtcggatgacaaggtcaccctggaagaacggctggacaaggcctgtgagccaggagtggactatgtgtacaagacccgactggtcaaggttcagctgtccaatgactttgacgagtacatcatggccattgagcagaccatcaagtcaggctcggatgaggtgcaggttggacagcagcgcacgttcatcagccccatcaagtgcagagaagccctgaagctggaggagaagaaacactacctcatgtggggtctctcctccgatttctggggagagaagcccaacctcagctacatcatcgggaaggacacttgggtggagcactggcctgaggaggacgaatgccaagacgaagagaaccagaaacaatgccaggacctcggcgccttcaccgagagcatggttgtctttgggtgccccaactgaccacacccccattcccccactccagataaagcttcagttatatctca

SEQ ID NO: 457548 - DNA, 1664 bp, Homo sapiens
  misc_feature (53)..(53): n is a, c, g, or t
  misc_feature (55)..(55): n is a, c, g, or t
  misc_feature (57)..(58): n is a, c, g, or t
  misc_feature (95)..(95): n is a, c, g, or t
taactgagaaaggcagcacttgcgggggacatgacaagcaagccaagatcgantnanngtaaattgacctcaggtcaccataaaccagcaccggnaacagaattgaggcctcttcttaacaaatttctgaccacagccaaagataagaaccgctgggaggaccctggtaagcagctctacaacgtggaggccacatcctatgccctcttggccctactgcagctaaaagactttgactttgtgcctcccgtcgtgcgttggctcaatgaacagagatactacggtggtggctatggctctacccaggccaccttcatggtgttccaagccttggctcaataccaaaaggacgcccctgaccaccaggaactgaaccttgatgtgtccctccaactgcccagccgcagctccaagatcacccaccgtatccactgggaatctgccagcctcctgcgatcagaagagaccaaggaaaatgagggtttcacagtcacagctgaaggaaaaggccaaggcaccttgtcggtggtgacaatgtaccatgctaaggccaaagatcaactcacctgtaataaattcgacctcaaggtcaccataaaaccagcaccggaaacagaaaagaggcctcaggatgccaagaacactatgatccttgagatctgtaccaggtaccggggagaccaggatgccactatgtctatattggacatatccatgatgactggctttgctccagacacagatgacctgaagcagctggccaatggtgttgacagatacatctccaagtatgagctggacaaagccttctccgataggaacaccctcatcatctacctggacaaggtctcacactctgaggatgactgtctagctttcaaagttcaccaatactttaatgtagagcttatccagcctggagcagtcaaggtctacgcctattacaacctggaggaaagctgtacccggttctaccatccggaaaaggaggatggaaagctgaacaagctctgccgtgatgaactgtgccgctgtgctgaggagaattgcttcatacaaaagtcggatgacaaggtcaccctggaagaacggctggacaaggcctgtgagccaggagtggactatgtgtacaagacccgactggtcaaggttcagctgtccaatgactttgacgagtacatcatggccattgagcagaccatcaagtcaggctcggatgaggtgcaggttggacagcagcgcacgttcatcagccccatcaagtgcagagaagccctgaagctggaggagaagaaacactacctcatgtggggtctctcctccgatttctggggagagaagcccaaagtgagtgctttccctgcgcgtgcgcgcgaccgcccgactgccccgcccatgccacgcccacaccattgtcacgcccctgcgccacgcccacaccacgccccttcctgacctgccattcttccctccagcctcagctacatcatcgggaaggacacttgggtggagcactggcctgaggaggacgaatgccaagacgaagagaaccagaaacaatgccaggacctcggcgccttcaccgagagcatggttgtctttgggtgccccaactgaccacacccccattcccccactccagataaagcttcagttatatctca

SEQ ID NO: 457549 - DNA, 1464 bp, Homo sapiens
  misc_feature (53)..(53): n is a, c, g, or t
  misc_feature (55)..(55): n is a, c, g, or t
  misc_feature (57)..(58): n is a, c, g, or t
  misc_feature (95)..(95): n is a, c, g, or t
taactgagaaaggcagcacttgcgggggacatgacaagcaagccaagatcgantnanngtaaattgacctcaggtcaccataaaccagcaccggnaacagaattgaggcctcttcttaacaaatttctgaccacagccaaagataagaaccgctgggaggaccctggtaagcagctctacaacgtggaggccacatcctatgccctcttggccctactgcagctaaaagactttgactttgtgcctcccgtcgtgcgttggctcaatgaacagagatactacggtggtggctatggctctacccaggccaccttcatggtgttccaagccttggctcaataccaaaaggacgcccctgaccaccaggaactgaaccttgatgtgtccctccaactgcccagccgcagctccaagatcacccaccgtatccactgggaatctgccagcctcctgcgatcagaagagaccaaggaaaatgagggtttcacagtcacagctgaaggaaaaggccaaggcaccttgtcggtggtgacaatgtaccatgctaaggccaaagatcaactcacctgtaataaattcgacctcaaggtcaccataaaaccagcaccggaaacagaaaagaggcctcaggatgccaagaacactatgatccttgagatctgtaccaggtaccggggagaccaggatgccactatgtctatattggacatatccatgatgactggctttgctccagacacagatgacctgaagcagctggccaatggtgttgacagatacatctccaagtatgagctggacaaagccttctccgataggaacaccctcatcatctacctggacaaggtctcacactctgaggatgactgtctagctttcaaagttcaccaatactttaatgtagagcttatccagcctggagcagtcaaggtctacgcctattacaacctggaggaaagctgtacccggttctaccatccggaaaaggaggatggaaagctgaacaagctctgccgtgatgaactgtgccgctgtgctgaggagaattgcttcatacaaaagtcggatgacaaggtcaccctggaagaacggctggacaaggcctgtgagccaggagtggactatgtgtacaagacccgactggtcaaggttcagctgtccaatgactttgacgagtacatcatggccattgagcagaccatcaagtcaggctcggatgaggtgcaggttggacagcagcgcacgttcatcagccccatcaagtgcagagaagcccctcagctacatcatcgggaaggacacttgggtggagcactggcctgaggaggacgaatgccaagacgaagagaaccagaaacaatgccaggacctcggcgccttcaccgagagcatggttgtctttgggtgccccaactgaccacacccccattcccccactccagataaagcttcagttatatctca

SEQ ID NO: 457550 - DNA, 1298 bp, Homo sapiens
  misc_feature (53)..(53): n is a, c, g, or t
  misc_feature (55)..(55): n is a, c, g, or t
  misc_feature (57)..(58): n is a, c, g, or t
  misc_feature (95)..(95): n is a, c, g, or t
taactgagaaaggcagcacttgcgggggacatgacaagcaagccaagatcgantnanngtaaattgacctcaggtcaccataaaccagcaccggnaacagaattgaggcctcttcttaacaaatttctgaccacagccaaagataagaaccgctgggaggaccctggtaagcagctctacaacgtggaggccacatcctatgccctcttggccctactgcagctaaaagactttgactttgtgcctcccgtcgtgcgttggctcaatgaacagagatactacggtggtggctatggctctacccaggccaccttcatggtgttccaagccttggctcaataccaaaaggacgcccctgaccaccaggaactgaaccttgatgtgtccctccaactgcccagccgcagctccaagatcacccaccgtatccactgggaatctgccagcctcctgcgatcagaagagaccaaggaaaatgagggtttcacagtcacagctgaaggaaaaggccaaggcaccttgtcggtggtgacaatgtaccatgctaaggccaaagatcaactcacctgtaataaattcgacctcaaggtcaccataaaaccagcaccggaaacagaaaagaggcctcaggatgccaagaacactatgatccttgagatctgtaccaggtaccggggagaccaggatgccactatgtctatattggacatatccatgatgactggctttgctccagacacagatgacctgaagcagctggccaatggtgttgacagatacatctccaagtatgagctggacaaagccttctccgataggaacaccctcatcatctacctggacaaggtctcacactctgaggatgactgtctagctttcaaagttcaccaatactttaatgtagagcttatccagcctggagcagtcaaggtctacgcctattacaacctggaggaaagctgtacccggttctaccatccggaaaaggaggatggaaagctgaacaagctctgccgtgatgaactgtgccgctgtgctgaggagaattgcttcatacaaaagtcggatgacaaggtcaccctggaagaacggctggacaaggcctgtgagccaggagtggactatgtgtacaagacccgactggtcaaggttcagctgtccaatgactttgacgagtacatcatggccattgagcagaccatcaagtcaggctcggatgagctgcgtctgctgaggagagctgcgtctgctgaggagagctgcgttactgaggagggctgcgtctgctgaggggagct

SEQ ID NO: 457551 - DNA, 1245 bp, Homo sapiens
  misc_feature (53)..(53): n is a, c, g, or t
  misc_feature (55)..(55): n is a, c, g, or t
  misc_feature (57)..(58): n is a, c, g, or t
  misc_feature (95)..(95): n is a, c, g, or t
taactgagaaaggcagcacttgcgggggacatgacaagcaagccaagatcgantnanngtaaattgacctcaggtcaccataaaccagcaccggnaacagaattgaggcctcttcttaacaaatttctgaccacagccaaagataagaaccgctgggaggaccctggtaagcagctctacaacgtggaggccacatcctatgccctcttggccctactgcagctaaaagactttgactttgtgcctcccgtcgtgcgttggctcaatgaacagagatactacggtggtggctatggctctacccaggccaccttcatggtgttccaagccttggctcaataccaaaaggacgcccctgaccaccaggaactgaaccttgatgtgtccctccaactgcccagccgcagctccaagatcacccaccgtatccactgggaatctgccagcctcctgcgatcagaagagaccaaggaaaatgagggtttcacagtcacagctgaaggaaaaggccaaggcaccttgtcggtggtgacaatgtaccatgctaaggccaaagatcaactcacctgtaataaattcgacctcaaggtcaccataaaaccagcaccggaaacagaaaagaggcctcaggatgccaagaacactatgatccttgagatctgtaccaggtaccggggagaccaggatgccactatgtctatattggacatatccatgatgactggctttgctccagacacagatgacctgaagcagctggccaatggtgttgacagatacatctccaagtatgagctggacaaagccttctccgataggaacaccctcatcatctacctggacaaggtctcacactctgaggatgactgtctagctttcaaagttcaccaatactttaatgtagagcttatccagcctggagcagtcaaggtctacgcctattacaacctggaggaaagctgtacccggttctaccatccggaaaaggaggatggaaagctgaacaagctctgccgtgatgaactgtgccgctgtgctgaggagaattgcttcatacaaaagtcggatgacaaggtcaccctggaagaacggctggacaaggcctgtgagccaggagtggactatgtgtacaagacccgactggtcaaggttcagctgtccaatgactttgacgagtacatcatggccattgagcagaccatcaagtcaggctcggatcagctgcgtctctgaaaaggggtagga

SEQ ID NO: 457552 - DNA, 1091 bp, Homo sapiens
  misc_feature (53)..(53): n is a, c, g, or t
  misc_feature (55)..(55): n is a, c, g, or t
  misc_feature (57)..(58): n is a, c, g, or t
  misc_feature (95)..(95): n is a, c, g, or t
taactgagaaaggcagcacttgcgggggacatgacaagcaagccaagatcgantnanngtaaattgacctcaggtcaccataaaccagcaccggnaacagaattgaggcctcttcttaacaaatttctgaccacagccaaagataagaaccgctgggaggaccctggtaagcagctctacaacgtggaggccacatcctatgccctcttggccctactgcagctaaaagactttgactttgtgcctcccgtcgtgcgttggctcaatgaacagagatactacggtggtggctatggctctacccaggccaccttcatggtgttccaagccttggctcaataccaaaaggacgcccctgaccaccaggaactgaaccttgatgtgtccctccaactgcccagccgcagctccaagatcacccaccgtatccactgggaatctgccagcctcctgcgatcagaagagaccaaggaaaatgagggtttcacagtcacagctgaaggaaaaggccaaggcaccttgtcggtggtgacaatgtaccatgctaaggccaaagatcaactcacctgtaataaattcgacctcaaggtcaccataaaaccagcaccggaaacagaaaagaggcctcaggatgccaagaacactatgatccttgagatctgtaccaggtaccggggagaccaggatgccactatgtctatattggacatatccatgatgactggctttgctccagacacagatgacctgaagcagctggccaatggtgttgacagatacatctccaagtatgagctggacaaagccttctccgataggaacaccctcatcatctacctggacaaggtctcacactctgaggatgactgtctagctttcaaagttcaccaatactttaatgtagagcttatccagcctggagcagtcaaggtctacgcctattacaacctggaggaaagctgtacccggttctaccatccggaaaaggaggatggaaagctgaacaagctctgccgtgatgaactgtgccgctgtgctgaggtcgtattacaattgtcgaccggccgcgaatttagtagtagtagtcgacc

SEQ ID NO: 457553 - DNA, 855 bp, Homo sapiens
  misc_feature (1)..(2): n is a, c, g, or t
  misc_feature (9)..(9): n is a, c, g, or t
nnttccggnacgaggggaaaaggccaaggcaccttgtcggtggtgacaatgtaccatgctaaggccaaagatcaactcacctgtaataaattcgacctcaaggtcaccataaaaccagcaccggaaacagaaaagaggcctcaggatgccaagaacactatgatccttgagatctgtaccaggtaccggggagaccaggatgccactatgtctatattggacatatccatgatgactggctttgctccagacacagatgacctgaagcagctggccaatggtgttgacagatacatctccaagtatgagctggacaaagccttctccgataggaacaccctcatcatctacctggacaaggtctcacactctgaggatgactgtctagctttcaaagttcaccaatactttaatgtagagcttatccagcctggagcagtcaaggtctacgcctattacaacctggaggaaagctgtacccggttctaccatccggaaaaggaggatggaaagctgaacaagctctgccgtgatgaactgtgccgctgtgctgaggagaattgcttcatacaaaagtcggatgacaaggtcacccctgaagctggaggagaagaaacactacctcatgtggggtctctcctccgatttctggggagagaagcccaacctcagctacatcatcgggaaggacacttgggtggagcactggcctgaggaggacgaatgccaagacgaagagaaccagaaacaatgccaggacctcggcgccttcaccgagagcatggttgtctttgggtgccccaactgaccacacccccattcccccactccagataaagcttcagttatatctca

SEQ ID NO: 457554 - DNA, 823 bp, Homo sapiens
  misc_feature (53)..(53): n is a, c, g, or t
  misc_feature (55)..(55): n is a, c, g, or t
  misc_feature (57)..(58): n is a, c, g, or t
  misc_feature (95)..(95): n is a, c, g, or t
taactgagaaaggcagcacttgcgggggacatgacaagcaagccaagatcgantnanngtaaattgacctcaggtcaccataaaccagcaccggnaacagaattgaggcctcttcttaacaaatttctgaccacagccaaagataagaaccgctgggaggaccctggtaagcagctctacaacgtggaggccacatcctatgccctcttggccctactgcagctaaaagactttgactttgtgcctcccgtcgtgcgttggctcaatgaacagagatactacggtggtggctatggctctacccaggccaccttcatggtgttccaagccttggctcaataccaaaaggacgcccctgaccaccaggaactgaaccttgatgtgtccctccaactgcccagccgcagctccaagatcacccaccgtatccactgggaatctgccagcctcctgcgatcagaagagaccaaggaaaatgagggtttcacagtcacagctgaaggaaaaggccaaggcaccttgtcggtggtgacaatgtaccatgctaaggccaaagatcaactcacctgtaataaattcgacctcaaggtcaccataaaaccagcaccggaaacagaaaagaggcctcaggatgccaagaacactatgatccttgagatctgtaccaggtaagaagctaggtcaccggggttcatcttggccatccctctatctctagcaagaattcttgcaaataatatccatgatattcagtactttccaagtacactgtgtatctgatactgttctaagtatccaccatgaggtagacaacacagacagt

SEQ ID NO: 457555 - DNA, 567 bp, Homo sapiens
  misc_feature (53)..(53): n is a, c, g, or t
  misc_feature (55)..(55): n is a, c, g, or t
  misc_feature (57)..(58): n is a, c, g, or t
  misc_feature (95)..(95): n is a, c, g, or t
taactgagaaaggcagcacttgcgggggacatgacaagcaagccaagatcgantnanngtaaattgacctcaggtcaccataaaccagcaccggnaacagaattgaggcctcttcttaacaaatttctgaccacagccaaagataagaaccgctgggaggaccctggtaagcagctctacaacgtggaggccacatcctatgccctcttggccctactgcagctaaaagactttgactttgtgcctcccgtcgtgcgttggctcaatgaacagagatactacggtggtggctatggctctacccaggccaccttcatggtgttccaagccttggctcaataccaaaaggacgcccctgaccaccaggaactgaaccttgatgtgtccctccaactgcccagccgcagctccaagatcacccaccgtatccactgggaatctgccagcctcctgcgatcagaagagaccaaggaaaatgagggtttcacagtcacagctgaaggaaaaggccaaggcaccttgtcggtaaggaacagaaacccacacctgcctggcccatgcccctct

SEQ ID NO: 457556 - DNA, 2438 bp, Homo sapiens
ctgaccaattacagcttgcatggtccccgtgtccctgctgcgctgagagaatgttcttataatgatccaagaggaagtggcaaatgagtgctcttcttcaggatccaatgatagctggacaagtcagtaagcccttgctgtcagtgcggagtgaaatgaatgcggagttgagaggtgaggacaaggctgctacttcagacagcgagctgaatgagcccctgcttgcgcctgtggaatcaaatgacagcgaggacactcccagcaagctcttcggggctagaggaaacccagcattatcagacccaggcactcctgaccaacaccaggccagtcagacccaccccccatttccagttgggccacagccacttctgacggcacagcagttagcttctgctgtggccggcgtgatgccgggaggccccccagccctcaaccagccaatcctcattcccttcaacatggcgggacagctaggaggccagcaaggactggttctcacactgccaacagcgaatctcaccaacatccaagggctggtggcagcagctgcagccggaggcattatgactctgccactgcaaaatctacaagctacctcatccctgaactcccagctccagcagctccagctccagctccagcagcagcagcagcagcagcagcagcagcctcccccgtcaaccaaccagcacccgcaaccagccccacaggcgccctcgcagtcccagcagcagccgctgcagcccaccccaccccagcagccaccacccgcctctcagcagccgccagctcctacatctcagctgcaacaggcgcctcagccccagcagcaccaaccccactcccactcccacaaccagaaccaaccatctccaacccagcagagctccagccccccgcagaaacctagtcagtctccaggacatggcctgccttcaccgctcacgccacccaatcctctacagctggttaataatccactagcaagtcaggctgcagcggctgcagcagccatgagctccatagcaagctcacaggcctttggcaatgccctctccagtcttcagggggtcacaggtcaactagttactaatgcacaaggacagattatcgggaccattccactgatgcctaatccggggccatcgagccaagcagcaagcggcactcagggcttgcaagtgcagccaatcaccccccagctcctcacaaacgcccagggccagatcatcgccacagtcattgggaaccagatcctgcccgtgatcaacacccagggcatcacgctgtcacccatcaagcccggccagcagctccaccaaccctcccagacgtcagtgggtcaagcagcctcccaaggcaaccttctgcacctggctcacagccaagcatccatgtctcaaagtcccgtccggcaggcttcctcttcttcctcctcatcctcctcttcttcagctttgagcgtgggccagttagtcagcaatcctcaaacggcagcgggtgaggtggatggggttaatctggaggagatccgagaatttgccaaagcttttaaaatccggcgcctgtcccttggcctgacccagactcaggtgggacaggctctcagtgctacagagggccccgcgtacagccagtcggccatctgcaggtttgaaaagctggacatcacccctaaaagtgcccagaagatcaagccggtgcttgagcggtggatggctgaggctgaggcccgccatcgagcaggtatgcagaacctgaccgagtttatcgggagtgaaccatccaaaaagcgcaagcggcgcacctccttcacaccccaggcccttgagatcctcaatgcccactttgagaagaacacacacccttctgggcaggaaatgaccgaaattgctgagaagctgaactatgaccgagaagtagttagagtttggttctgcaataagaggcaagccctgaagaacacaattaaacgcttaaaacagcacgagccggccacggcagtccctttggagcccttaacagactctctggaagaaaactcctaaagagatgcccacccataatcagaagcaaaattcacagaaactaaactccacccttgggactccacaacaacaacaacaacaaaatttaatttaatttaaaaatagccccagtcgtcatcacccttgtaagtaaatgactaagaaaactaccaagtggacagaatggtttctacatgtccgttggttttccaaaaaggaaagaagaaaatttttagaaaatttttaaacaaggaatacaccacactgaaggtgtgtgtggtaggatagttcccttcccccacctgtctcccccaaagccagttttttaatggacttaaagcaaaccaaataaccacgtacttttttctgtatattatgaaaatgtgaacacattttaaggaaaaagaa

SEQ ID NO: 457557 - DNA, 1537 bp, Homo sapiens
ctgaccaattacagcttgcatggtccccgtgtccctgctgcgctgagagaatgttcttataatgatccaagaggaagtggcaaatgagtgctcttcttcaggatccaatgatagctggacaagtcagtaagcccttgctgtcagtgcggagtgaaatgaatgcggagttgagaggtgaggacaaggctgctacttcagacagcgagctgaatgagcccctgcttgcgcctgtggaatcaaatgacagcgaggacactcccagcaagctcttcggggctagaggaaacccagcattatcagacccaggcactcctgaccaacaccaggccagtcagacccaccccccatttccagttgggccacagccacttctgacggcacagcagttagcttctgctgtggccggcgtgatgccgggaggccccccagccctcaaccagccaatcctcattcccttcaacatggcgggacagctaggaggccagcaaggactggttctcacactgccaacagcgaatctcaccaacatccaagggctggtggcagcagctgcagccggaggcattatgactctgccactgcaaaatctacaagctacctcatccctgaactcccagctccagcagctccagctccagctccagcagcagcagcagcagcagcagcagcagcctcccccgtcaaccaaccagcacccgcaaccagccccacaggcgccctcgcagtcccagcagcagccgctgcagcccaccccaccccagcagccaccacccgcctctcagcagccgccagctcctacatctcagctgcaacaggcgcctcagccccagcagcaccaaccccactcccactcccacaaccagaaccaaccatctccaacccagcagagctccagccccccgcagaaacctagtcagtctccaggacatggcctgccttcaccgctcacgccacccaatcctctacagctggttaataatccactagcaagtcaggctgcagcggctgcagcagccatgagctccatagcaagctcacaggcctttggcaatgccctctccagtcttcagggggtcacaggtcaactagttactaatgcacaaggacagattatcgggaccattccactgatgcctaatccggggccatcgagccaagcagcaagcggcactcagggcttgcaagtgcagccaatcaccccccagctcctcacaaacgcccagggccagatcatcgccacagtcattgggaaccagatcctgcccgtgatcaacacccagggcatcacgctgtcacccatcaagcccggccagcagatcctcaaacggcagcgggtgaggtggatggggttaatctggaggagatccgagaatttgccaaagcttttaaaatccggcgcctgtcccttggcctgacccagactcaggtgggacaggctctcagtgctacagagggccccgcgtacagccagtcggccatctgcagacacaccatcctgagaagccactttttcctaccacaggagcccaagagaaca

SEQ ID NO: 457558 - DNA, 3240 bp, Homo sapiens
agtctttgtggtgatgtcattgccatgagcgagccgggccgttcgttactctgctgtgctgcctcagacgcggagggctgcgtgcagtgggagcgggctccaggagcccgagcctccagccgtcctcagagcaaggcagcaccgaggcctggccacagcaatatccatctggaagctcttcccttcactcccaactctgaggttgcctaactctttattaaaaattcagaagggggaatgccagcccctagcatggactgtgatgtttccactctggttgcctgtgtggtggatgtcgaggtctttaccaatcaggaggttaaggaaaaatttgagggactgtttcggacttatgatgactgtgtgacgttccagctatttaagagtttcagacgtgtccgtataaacttcagcaatcctaaatctgcagcccgagctaggatagagcttcatgaaacccaattcagagggaaaaaattaaagctctactttgcacaggttcagactccagagacagatggagacaaactgcacttggctccaccccagcctgccaaacagtttctcatctcgcccccttcctccccacctgttggctggcagcccatcaacgatgccacgccagtcctcaactatgacctcctctatgctgtggccaaactaggaccaggagagaagtatgagctccatgcagggactgagtccaccccaagtgtcgtcgtgcacgtgtgcgacagtgacatagaggaagaagaggacccaaagacttccccaaagccaaaaatcatccaaactcggcgtcctggcctgccaccctccgtgtccaactgagctgcctgctccttctcgataatagccgtctcctctttatcatgctttttccccctgttgtttgtcaaaaaaaattgcctttaaattcctgggtgtttggttgtttgagattccttccttgttatcaagcctctcggacaaaagggctaggaaaaggtgatatgtctcctgatcatatcatacccattaagtataacccattatttagaaggttctagggaaaaaagtagtattttcttattaaacaatcagcacagcctatatctttgttctctcatgttgatccaagccagagacatcagtaacaaatagcacctgtgttgtttgtgagctgtttcagtcccagtcctgatgtgtgtgcgttgttctctcctggccacttaaataggaccatatgtaaacttgactttgactgcatgagatatccctatctggtctcactcagtcctctgcatcccaacattcccaggacatgcatgatcaccagcatttattttcattatttgaggatatcttataactcacagattgtcagcatccagccatgtcctatctagattaggaaaatgatcagaatattccagctcaacaagtctgggtatattcactattgtgagtcaatacaccatagctctgttgaaattcctggaggcaaaattgaccttggccccaaagatattcctcaatagatttcaaacaccactcccctgtagaactctcccagcctcgttggggaggcttgtccagggtgatagagactgatttcagacaaacctatttattacaaaagtttcatggtgtctgaatgattgttttctctctttgtatatttgtacaaatgtttcagctgtgcttttaaaaaatctggatgttttttatttagtgattgttcgacaattagctgcttcaaaacataatgtgcattgcttatgaatgccttcatatactaatacagatactctgataatattacactctaataaggataatgctgaattttgaaaggacacaaaacatctaatgccaatatatacatgattagccaacatctttgctatcaagaccacttgtttttaaataaagatgcaagtgtcagttgtagattattgggatgaagctaaatccccagaatgcagcagcagctgagcatgttaaaatggggaaggatgatagctacatgtatgccggtcctactcacgcgacacccgtgtgctcaaaaaagttatttgtttttgttacgtgtgatttttctatttctctagcccaaagtgcattacagaagatacacctatagaaccattaccttctgctatgtgtgccaggcctcatctactcctgtacattaatgaattactttagatgcaaacgcagattacaatggagtggggaagtactttcattacccaagcctcagaaaaacacacaagaacaataacacagcaaacagattgagggattgttgtggtttttgactaaggtgtatgttagtttcatcagaaacttaaaacatagactgatcactcagaaattaaagtccgttttactgtgaatatagcaatatagtactggacacagtactggtgaaactgaggagagcattgcttgtaaaatcctgagtttccataaggaaaatgaaaactccttttaaaaataaaatctgaggagtgtacaataagcatatgctttgactttcctttgctgtggaggtttttggtttttcattgatgataaacgactacagacttagtagtggagaaatggtgtcctctagtggaagaaatagtaggctccgctattcagatgcagagcactgcagcatccagcctttcaaagctgactcttctcaatcatctgtgggtcatttgacttgattttttaagctaccctgaatttccagaatgcaggttctaaagaaatctagatgagagaaagtatttgaaaatgatttttaaatgttttttaaaagacacatctgacatttttaacaacttagtaaaagttgaaatgaccattctgtgtagtcataaaagaaacacaatgaagtgtatggcctctggagttagtcttagtaaaacttattgctctgtgtcaatgttaacctgtctcagatcaagtaattctttcactaggttgggtttggggaggggggaaaagaggggcttttcctaggagaacgataagaaatggaaagactccttgaagtgttgcaagggaacctcctagcactgtgaaagtcagaatcgcctcagcatttccatgacgcacattatgcaaatctctttagcactattttaagtttgaaaactttaacaatgaaggggaaggggaagatttccaccaactgaatcatttgtgcacgtgtatagctcaaagagcttagacttcaaatatatctggtgaatgactctt

SEQ ID NO: 457559 - DNA, 2455 bp, Homo sapiens
agtctttgtggtgatgtcattgccatgagcgagccgggccgttcgttactctgctgtgctgcctcagacgcggagggctgcgtgcagtgggagcgggctccaggagcccgagcctccagccgtcctcagagcaaggcagcaccgaggcctggccacagcaatatccatctggaagctcttcccttcactcccaactctgaggttgcctaactctttattaaaaattcagaagggggaatgccagcccctagcatggactgtgatgtttccactctggttgcctgtgtggtggatgtcgaggtctttaccaatcaggaggttaaggaaaaatttgagggactgtttcggacttatgatgactgtgtgacgttccagctatttaagagtttcagacgtgtccgtataaacttcagcaatcctaaatctgcagcccgagctaggatagagcttcatgaaacccaattcagagggaaaaaattaaagctctactttgcacaggttcagactccagagacagatggagacaaactgcacttggctccaccccagcctgccaaacagtttctcatctcgcccccttcctccccacctgttggctggcagcccatcaacgatgccacgccagtcctcaactatgacctcctctatgctgtggccaaactaggaccaggagagaagtatgagctccatgcagggactgagtccaccccaagtgtcgtcgtgcacgtgtgcgacagtgacatagaggaagaagaggacccaaagacttccccaaagccaaaaatcatccaaaggtgatagagactgatttcagacaaacctatttattacaaaagtttcatggtgtctgaatgattgttttctctctttgtatatttgtacaaatgtttcagctgtgcttttaaaaaatctggatgttttttatttagtgattgttcgacaattagctgcttcaaaacataatgtgcattgcttatgaatgccttcatatactaatacagatactctgataatattacactctaataaggataatgctgaattttgaaaggacacaaaacatctaatgccaatatatacatgattagccaacatctttgctatcaagaccacttgtttttaaataaagatgcaagtgtcagttgtagattattgggatgaagctaaatccccagaatgcagcagcagctgagcatgttaaaatggggaaggatgatagctacatgtatgccggtcctactcacgcgacacccgtgtgctcaaaaaagttatttgtttttgttacgtgtgatttttctatttctctagcccaaagtgcattacagaagatacacctatagaaccattaccttctgctatgtgtgccaggcctcatctactcctgtacattaatgaattactttagatgcaaacgcagattacaatggagtggggaagtactttcattacccaagcctcagaaaaacacacaagaacaataacacagcaaacagattgagggattgttgtggtttttgactaaggtgtatgttagtttcatcagaaacttaaaacatagactgatcactcagaaattaaagtccgttttactgtgaatatagcaatatagtactggacacagtactggtgaaactgaggagagcattgcttgtaaaatcctgagtttccataaggaaaatgaaaactccttttaaaaataaaatctgaggagtgtacaataagcatatgctttgactttcctttgctgtggaggtttttggtttttcattgatgataaacgactacagacttagtagtggagaaatggtgtcctctagtggaagaaatagtaggctccgctattcagatgcagagcactgcagcatccagcctttcaaagctgactcttctcaatcatctgtgggtcatttgacttgattttttaagctaccctgaatttccagaatgcaggttctaaagaaatctagatgagagaaagtatttgaaaatgatttttaaatgttttttaaaagacacatctgacatttttaacaacttagtaaaagttgaaatgaccattctgtgtagtcataaaagaaacacaatgaagtgtatggcctctggagttagtcttagtaaaacttattgctctgtgtcaatgttaacctgtctcagatcaagtaattctttcactaggttgggtttggggaggggggaaaagaggggcttttcctaggagaacgataagaaatggaaagactccttgaagtgttgcaagggaacctcctagcactgtgaaagtcagaatcgcctcagcatttccatgacgcacattatgcaaatctctttagcactattttaagtttgaaaactttaacaatgaaggggaaggggaagatttccaccaactgaatcatttgtgcacgtgtatagctcaaagagcttagacttcaaatatatctggtgaatgactctt

SEQ ID NO: 457560 - DNA, 3333 bp, Homo sapiens
agagggaggcggggcgcgccgcgccgcgtacggccccacgcaaaggcccgcgggcaccgcgccgcccccacgcgctcgcaccggcgggcaggtgagcaggcagcgccgcgcgctagcagctggcccccgtagacgccccagccgccgcctccgcctccgcctccgccggcgcatcgcggacgcccagcaggaatgaggggagaatcatacttcatcggaatgaggagcccagggcagcagggacacgtccctgaagatggaggacttttcttactgtgctgcatagacagggactgggctgtcactcgttgttttgcagaagaagcctttcaagcaatcactgacttcaatgacctccccaactcgttgtttgcgtgcaatgttcaccagtcagtgtttgaaggagaagagagcaaggaaaaatttgagggactgtttcggacttatgatgactgtgtgacgttccagctatttaagagtttcagacgtgtccgtataaacttcagcaatcctaaatctgcagcccgagctaggatagagcttcatgaaacccaattcagagggaaaaaattaaagctctactttgcacaggttcagactccagagacagatggagacaaactgcacttggctccaccccagcctgccaaacagtttctcatctcgcccccttcctccccacctgttggctggcagcccatcaacgatgccacgccagtcctcaactatgacctcctctatgctgtggccaaactaggaccaggagagaagtatgagctccatgcagggactgagtccaccccaagtgtcgtcgtgcacgtgtgcgacagtgacatagaggaagaagaggacccaaagacttccccaaagccaaaaatcatccaaactcggcgtcctggcctgccaccctccgtgtccaactgagctgcctgctccttctcgataatagccgtctcctctttatcatgctttttccccctgttgtttgtcaaaaaaaattgcctttaaattcctgggtgtttggttgtttgagattccttccttgttatcaagcctctcggacaaaagggctaggaaaaggtgatatgtctcctgatcatatcatacccattaagtataacccattatttagaaggttctagggaaaaaagtagtattttcttattaaacaatcagcacagcctatatctttgttctctcatgttgatccaagccagagacatcagtaacaaatagcacctgtgttgtttgtgagctgtttcagtcccagtcctgatgtgtgtgcgttgttctctcctggccacttaaataggaccatatgtaaacttgactttgactgcatgagatatccctatctggtctcactcagtcctctgcatcccaacattcccaggacatgcatgatcaccagcatttattttcattatttgaggatatcttataactcacagattgtcagcatccagccatgtcctatctagattaggaaaatgatcagaatattccagctcaacaagtctgggtatattcactattgtgagtcaatacaccatagctctgttgaaattcctggaggcaaaattgaccttggccccaaagatattcctcaatagatttcaaacaccactcccctgtagaactctcccagcctcgttggggaggcttgtccagggtgatagagactgatttcagacaaacctatttattacaaaagtttcatggtgtctgaatgattgttttctctctttgtatatttgtacaaatgtttcagctgtgcttttaaaaaatctggatgttttttatttagtgattgttcgacaattagctgcttcaaaacataatgtgcattgcttatgaatgccttcatatactaatacagatactctgataatattacactctaataaggataatgctgaattttgaaaggacacaaaacatctaatgccaatatatacatgattagccaacatctttgctatcaagaccacttgtttttaaataaagatgcaagtgtcagttgtagattattgggatgaagctaaatccccagaatgcagcagcagctgagcatgttaaaatggggaaggatgatagctacatgtatgccggtcctactcacgcgacacccgtgtgctcaaaaaagttatttgtttttgttacgtgtgatttttctatttctctagcccaaagtgcattacagaagatacacctatagaaccattaccttctgctatgtgtgccaggcctcatctactcctgtacattaatgaattactttagatgcaaacgcagattacaatggagtggggaagtactttcattacccaagcctcagaaaaacacacaagaacaataacacagcaaacagattgagggattgttgtggtttttgactaaggtgtatgttagtttcatcagaaacttaaaacatagactgatcactcagaaattaaagtccgttttactgtgaatatagcaatatagtactggacacagtactggtgaaactgaggagagcattgcttgtaaaatcctgagtttccataaggaaaatgaaaactccttttaaaaataaaatctgaggagtgtacaataagcatatgctttgactttcctttgctgtggaggtttttggtttttcattgatgataaacgactacagacttagtagtggagaaatggtgtcctctagtggaagaaatagtaggctccgctattcagatgcagagcactgcagcatccagcctttcaaagctgactcttctcaatcatctgtgggtcatttgacttgattttttaagctaccctgaatttccagaatgcaggttctaaagaaatctagatgagagaaagtatttgaaaatgatttttaaatgttttttaaaagacacatctgacatttttaacaacttagtaaaagttgaaatgaccattctgtgtagtcataaaagaaacacaatgaagtgtatggcctctggagttagtcttagtaaaacttattgctctgtgtcaatgttaacctgtctcagatcaagtaattctttcactaggttgggtttggggaggggggaaaagaggggcttttcctaggagaacgataagaaatggaaagactccttgaagtgttgcaagggaacctcctagcactgtgaaagtcagaatcgcctcagcatttccatgacgcacattatgcaaatctctttagcactattttaagtttgaaaactttaacaatgaaggggaaggggaagatttccaccaactgaatcatttgtgcacgtgtatagctcaaagagcttagacttcaaatatatctggtgaatgactctt

SEQ ID NO: 457561 - DNA, 2166 bp, Homo sapiens
gccgcttctccccgttgctaatgcgcaggcgctggcgggatagcgcgccgccgagccgagaaagaggtcacgaactctgaccccccagaaatacccaaacacagaaagctctctccgccgtgaatctcgatcccacatcccgtcggctttcttcaacctctcttcccggagcgccccccaatccacgagtggcagccgcgggactgtcgcgtcggcgcccgacgccggagtcagcagggcgcaaaagcgccggtagatcatggcaaccatagaagaaattgcacatcaaattattgaacaacagatgggagagattgttacagagcagcaaactgggcagaaaatccagattgtgacagcacttgatcataatacccaaggcaagcagttcattctgacaaatcacgacggctctactccaagcaaagtcattctggccaggcaagattccactccgggaaaagttttccttacaactccagatgcagcaggtgtcaaccagttattttttaccactcctgatctgtctgcacaacacctgcagctcctaacagataattctccagaccaaggaccaaataaggtttttgatctttgcgtagtatgtggagacaaagcatcaggacgtcattatggagcagtaacttgtgaaggctgcaaaggattttttaaaagaagcatccgaaaaaatttagtatattcatgtcgaggatcaaaggattgtattattaataagcaccaccgaaaccgctgtcaatactgcaggttacagagatgtattgcgtttggaatgaagcaagactctgtccaatgtgaaagaaaacccattgaagtatcacgagaaaaatcttccaactgtgccgcttcaacagaaaaaatctatatccgaaaggaccttcgtagcccattaactgcaactccaacttttgtaacagatagtgaaagtacaaggtcaacaggactgttagattcaggaatgttcatgaatattcatccatctggagtaaaaactgagtcagctgtgctgatgacatcagataaggctgaatcatgtcagggagatttaagtacattggccaatgtggttacatcattagcgaatcttggaaaaactaaagatctttctcaaaatagtaatgaaatgtctatgattgaaagcttaagcaatgatgatacctctttgtgtgaatttcaagaaatgcagaccaacggtgatgtttcaagggcatttgacactcttgcaaaagcattgaatcctggagagagcacagcctgccagagctcagtagcgggcatggaaggaagtgtacacctaatcactggagattcaagcataaattacaccgaaaaagaggggccacttctcagcgattcacatgtagctttcaggctcaccatgccttctcctatgcctgagtacctgaatgtgcactacattggggagtctgcctccagactgctgttcttatcaatgcactgggcactttcgattccttctttccaggctctagggcaagaaaacagcatatcactggtgaaagcttactggaatgaactttttactcttggtcttgcccagtgctggcaagtgatgaatgtagcaactatattagcaacatttgtcaattgtcttcacaatagtcttcaacaagatgccaaggtaattgcagccctcattcatttcacaagacgagcaatcactgatttataaatgcttaactatagaatggcttatgactacccaaaacagtgccccatcaacaaatggggaaaattgccttttgagctcaggaataatttataaattggggactaccttttagttctttagcatattctatttcttattgttttatataatttttaaatcatttgcttcctccttatgtttaacagcagaggggtaatcaccttaaaatgtcatcaaaaatagatctactagaaggcagcatcacattcccatcttacttatggactcctacccctggttcatgtcttatatgcctgtaatggttataaagcctaccttcaggaaagctatggttgactaattactaatggatgggttttaaacatgtccctctacaataaattaaaatctttattgcaatgtttgaatataatgtggaggtgtttacctgagggcctctctatctccccgaattc

SEQ ID NO: 457562 - DNA, 1474 bp, Homo sapiens
gccgcttctccccgttgctaatgcgcaggcgctggcgggatagcgcgccgccgagccgagaaagaggtcacgaactctgaccccccagaaatacccaaacacagaaagctctctccgccgtgaatctcgatcccacatcccgtcggctttcttcaacctctcttcccggagcgccccccaatccacgagtggcagccgcgggactgtcgcgtcggcgcccgacgccggagtcagcagggcgcaaaagcgccggtagatcatggcaaccatagaagaaattgcacatcaaattattgaacaacagatgggagagattgttacagagcagcaaactgggcagaaaatccagattgtgacagcacttgatcataatacccaaggcaagcagttcattctgacaaatcacgacggctctactccaagcaaagtcattctggccaggcaagattccactccgggaaaagttttccttacaactccagatgcagcaggtgtcaaccagttattttttaccactcctgatctgtctgcacaacacctgcagctcctaacagataattctccagaccaaggaccaaataaggtttttgatctttgcgtagtatgtggagacaaagcatcaggacgtcattatggagcagtaacttgtgaaggctgcaaaggattttttaaaagaagcatccgaaaaaatttagtatattcatgtcgaggatcaaaggattgtattattaataagcaccaccgaaaccgctgtcaatactgcaggttacagagatgtattgcgtttggaatgaagcaagactctgtccaatgtgaaagaaaacccattgaagtatcacgagaaaaatcttccaactgtgccgcttcaacagaaaaaatctatatccgaaaggaccttcgtagcccattaactgcaactccaacttttgtaacagatagtgaaagtacaaggtcaacaggactgttagattcaggaatgttcatgaatattcatccatctggagtaaaaactgagtcagctgtgctgatgacatcagataaggtgtgtttagtacaatttaaagcttagataattttaagcattttaaaatgttttctaatcacttcctttgctttggtaaattgctttgttcttaaatattccatattacaagttgcctttttttttttaatataaattagaaatgttcggctgggcacagtggctcacatctgtaatcccagcactttgggaggccgaggcacatggatcgcttgaggtcagaagttcaagaccagcctgaccaacatggagaaaccccgtctccagtaaaaatggaaaaattaactgggcgtggtggcgcatgcctgtaatcccagctactcgggaggctgaggcaggagaatcgcttgaacccggtaggtggaggttgcagtgagccgagatagtgccattgcactcccgcctgggcaacaagagcgaaactctgtctca

SEQ ID NO: 457563 - DNA, 2876 bp, Homo sapiens
gccgcttctccccgttgctaatgcgcaggcgctggcgggatagcgcgccgccgagccgagaaagaggtcacgaactctgaccccccagaaatacccaaacacagaaagctctctccgccgtgaatctcgatcccacatcccgtcggctttcttcaacctctcttcccggagcgccccccaatccacgagtggcagccgcgggactgtcgcgtcggcgcccgacgccggagtcagcagggcgcaaaagcgccggtagatcatggcaaccatagaagaaattgcacatcaaattattgaacaacagatgggagaggatagaattttgtggcaatagaatcggtagtttaaaagattgttacagagcagcaaactgggcagaaaatccagattgtgacagcacttgatcataatacccaaggcaagcagttcattctgacaaatcacgacggctctactccaagcaaagtcattctggccaggcaagattccactccgggaaaagttttccttacaactccagatgcagcaggtgtcaaccagttattttttaccactcctgatctgtctgcacaacacctgcagctcctaacagataattctccagaccaaggaccaaataaggtttttgatctttgcgtagtatgtggagacaaagcatcaggacgtcattatggagcagtaacttgtgaaggctgcaaaggattttttaaaagaagcatccgaaaaaatttagtatattcatgtcgaggatcaaaggattgtattattaataagcaccaccgaaaccgctgtcaatactgcaggttacagagatgtattgcgtttggaatgaagcaagactgtatgtattagcttttaaggagaaaatactttttaaagattccagcaaactacaagagtattgaaattaacaaaatatgtcaaatatgtatactttttagtttacagttttccaactaaaaatataagaatacagacctacgtatgtacttttttatttattcaactaatatttattgaatacctgtgtaaaaagcacgtatttgtagtttgtgtttggcaaaaagaatgagagatgcaaattggtttgttttactaatctaaagcaactttgttgaacttgcacataatttctaaagattgatggttatctttggagtttagtatggtagccatgtctcctattagcagcattaagcttacctacagcttacatttctaattgtctgtaaatcctatattgtgatataatagtttaacacatttttgtagctgtccaatgtgaaagaaaacccattgaagtatcacgagaaaaatcttccaactgtgccgcttcaacagaaaaaatctatatccgaaaggaccttcgtagcccattaactgcaactccaacttttgtaacagatagtgaaagtacaaggtcaacaggactgttagattcaggaatgttcatgaatattcatccatctggagtaaaaactgagtcagctgtgctgatgacatcagataaggctgaatcatgtcagggagatttaagtacattggccaatgtggttacatcattagcgaatcttggaaaaactaaagatctttctcaaaatagtaatgaaatgtctatgattgaaagcttaagcaatgatgatacctctttgtgtgaatttcaagaaatgcagaccaacggtgatgtttcaagggcatttgacactcttgcaaaagcattgaatcctggagagagcacagcctgccagagctcagtagcgggcatggaaggaagtgtacacctaatcactggagattcaagcataaattacaccgaaaaagaggggccacttctcagcgattcacatgtagctttcaggctcaccatgccttctcctatgcctgagtacctgaatgtgcactacattggggagtctgcctccagactgctgttcttatcaatgcactgggcactttcgattccttctttccaggctctagggcaagaaaacagcatatcactggtgaaagcttactggaatgaactttttactcttggtcttgcccagtgctggcaagtgatgaatgtagcaactatattagcaacatttgtcaattgtcttcacaatagtcttcaacaagataaaatgtcaacagaaagaagaaaattattgatggagcacatcttcaaactacaggagttttgtaacagcatggttaaactctgcattgatggatacgaatatgcctacctgaaggcaatagtactcttcagtccagatcatccaagcctagaaaacatggaacagatagagaaatttcaggaaaaggcttatgtggaattccaagattatataaccaaaacatatccagatgacacctacaggttatccagactactactcagattgccagctttaagactgatgaatgctaccatcactgaagaattgtttttcaaaggtctcattggcaatatacgaattgacagtgttatcccacatattttgaaaatggagcctgcagattataactctcaaataattggtcacagcatttgaaaactgtgactgcagtgctgtaaacttaactgttctttgccagaacacaagacaccaaattgaactcactgcttttgaggcatctggaaatttttactttaaaaagtaaccagaatccaaggtatttttattttagcttcccttaagaatttttgaagtgactgggcaggcagcagaaattaaatgaatttttcttcctgattcctttaaatgaatatgaaacactacaaatttattcttggtgaagatgatacctgaagctgtcacctcttgattatctaaactaagcgctcattctattttataaaacaaataaattagtctcttttttctgaa

SEQ ID NO: 457564 - DNA, 2789 bp, Homo sapiens
gccgcttctccccgttgctaatgcgcaggcgctggcgggatagcgcgccgccgagccgagaaagaggtcacgaactctgaccccccagaaatacccaaacacagaaagctctctccgccgtgaatctcgatcccacatcccgtcggctttcttcaacctctcttcccggagcgccccccaatccacgagtggcagccgcgggactgtcgcgtcggcgcccgacgccggagtcagcagggcgcaaaagcgccggtagatcatggcaaccatagaagaaattgcacatcaaattattgaacaacagatgggagagattgttacagagcagcaaactgggcagaaaatccagattgtgacagcacttgatcataatacccaaggcaagcagttcattctgacaaatcacgacggctctactccaagcaaagtcattctggccaggcaagattccactccgggaaaagttttccttacaactccagatgcagcaggtgtcaaccagttattttttaccactcctgatctgtctgcacaacacctgcagctcctaacagataattctccagaccaaggaccaaataaggtttttgatctttgcgtagtatgtggagacaaagcatcaggacgtcattatggagcagtaacttgtgaaggctgcaaaggattttttaaaagaagcatccgaaaaaatttagtatattcatgtcgaggatcaaaggattgtattattaataagcaccaccgaaaccgctgtcaatactgcaggttacagagatgtattgcgtttggaatgaagcaagactctgtccaatgtgaaagaaaacccattgaagtatcacgagaaaaatcttccaactgtgccgcttcaacagaaaaaatctatatccgaaaggaccttcgtagcccattaactgcaactccaacttttgtaacagatagtgaaagtacaaggtcaacaggactgttagattcaggaatgttcatgaatattcatccatctggagtaaaaactgagtcagctgtgctgatgacatcagataaggctgaatcatgtcagggagatttaagtacattggccaatgtggttacatcattagcgaatcttggaaaaactaaagatctttctcaaaatagtaatgaaatgtctatgattgaaagcttaagcaatgatgatacctctttgtgtgaatttcaagaaatgcagaccaacggtgatgtttcaagggcatttgacactcttgcaaaagcattgaatcctggagagagcacagcctgccagagctcagtagcgggcatggaaggaagtgtacacctaatcactggagattcaagcataaattacaccgaaaaagaggggccacttctcagcgattcacatgtagctttcaggctcaccatgccttctcctatgcctgagtacctgaatgtgcactacattggggagtctgcctccagactgctgttcttatcaatgcactgggcactttcgattccttctttccaggctctagggcaagaaaacagcatatcactggtgaaagcttactggaatgaactttttactcttggtcttgcccagtgctggcaagtgatgaatgtagcaactatattagcaacatttgtcaattgtcttcacaatagtcttcaacaagataaaatgtcaacagaaagaagaaaattattgatggagcacatcttcaaactacaggagttttgtaacagcatggttaaactctgcattgatggatacgaatatgcctacctgaaggcaatagtactcttcagtccagatcatccaagcctagaaaacatggaacagatagagaaatttcaggaaaaggcttatgtggaattccaagattatataaccaaaacatatccagatgacacctacaggttatccagactactactcagattgccagctttaagactgatgaatgctaccatcactgaagaattgtttttcaaaggtctcattggcaatatacgaattgacagtgttatcccacatattttgaaaatggagcctgcagattataactctcaaataattggtcacagcatttgaaaactgtgactgcagtgctgtaaacttaactgttctttgccagaacacaagacaccaaattgaactcactgcttttgaggcatctggaaatttttactttaaaaagtaaccagaatccaaggtatttttattttagcttcccttaagaatttttgaagtgactgggcaggcagcagaaattaaatgaatttttcttcctgattcctttaaatgaatatgaaacactacaaatttattcttggtgaagatgatacctgaagctgtcacctcttgattatctaaactaagcgctcattctattttataaaacaaataaattagtctcttttttctgaaaaaaaaaaaaaaaaaaaaaaaaaaaaaaaaaaaaaaaaaaaaaaaaaaaaaaaaaaaaaaaaaaaaaggaaagcaaaaaagaacagaaaccaagagagacggaagcataacggagaaacgaaggacgagaacacaaacagcgagcggaacacggcagtccacagatgacgcgggagggagccaggagaagaaacaccaccaggcgcggtcgcgacggcagaagcaagccaaaagacacagaagccacaggcatgaggaaaagagatgagacgcagaacgcaatgctagacgggggtaaagaacaggtcgatcgggacccaagaccagccgagacgcagcagaagaagagcacagagagagggcgaccgcaccaaaaagtagg

SEQ ID NO: 457565 - DNA, 2801 bp, Homo sapiens
gccgcttctccccgttgctaatgcgcaggcgctggcgggatagcgcgccgccgagccgagaaagaggtcacgaactctgaccccccagaaatacccaaacacagaaagctctctccgccgtgaatctcgatcccacatcccgtcggctttcttcaacctctcttcccggagcgccccccaatccacgagtggcagccgcgggactgtcgcgtcggcgcccgacgccggagtcagcagggcgcaaaagcgccggtagatcatggcaaccatagaagaaattgcacatcaaattattgaacaacagatgggagagattgttacagagcagcaaactgggcagaaaatccagattgtgacagcacttgatcataatacccaaggcaagcagttcattctgacaaatcacgacggctctactccaagcaaattttccttacaactccagatgcagcaggtgtcaaccagttattttttaccactcctgatctgtctgcacaacacctgcagctcctaacagataattctccagaccaaggaccaaataaggtttttgatctttgcgtagtatgtggagacaaagcatcaggacgtcattatggagcagtaacttgtgaaggctgcaaaggattttttaaaagaagcatccgaaaaaatttagtatattcatgtcgaggatcaaaggattgtattattaataagcaccaccgaaaccgctgtcaatactgcaggttacagagatgtattgcgtttggaatgaagcaagactgtatgtattagcttttaaggagaaaatactttttaaagattccagcaaactacaagagtattgaaattaacaaaatatgtcaaatatgtatactttttagtttacagttttccaactaaaaatataagaatacagacctacgtatgtacttttttatttattcaactaatatttattgaatacctgtgtaaaaagcacgtatttgtagtttgtgtttggcaaaaagaatgagagatgcaaattggtttgttttactaatctaaagcaactttgttgaacttgcacataatttctaaagattgatggttatctttggagtttagtatggtagccatgtctcctattagcagcattaagcttacctacagcttacatttctaattgtctgtaaatcctatattgtgatataatagtttaacacatttttgtagctgtccaatgtgaaagaaaacccattgaagtatcacgagaaaaatcttccaactgtgccgcttcaacagaaaaaatctatatccgaaaggaccttcgtagcccattaactgcaactccaacttttgtaacagatagtgaaagtacaaggtcaacaggactgttagattcaggaatgttcatgaatattcatccatctggagtaaaaactgagtcagctgtgctgatgacatcagataaggctgaatcatgtcagggagatttaagtacattggccaatgtggttacatcattagcgaatcttggaaaaactaaagatctttctcaaaatagtaatgaaatgtctatgattgaaagcttaagcaatgatgatacctctttgtgtgaatttcaagaaatgcagaccaacggtgatgtttcaagggcatttgacactcttgcaaaagcattgaatcctggagagagcacagcctgccagagctcagtagcgggcatggaaggaagtgtacacctaatcactggagattcaagcataaattacaccgaaaaagaggggccacttctcagcgattcacatgtagctttcaggctcaccatgccttctcctatgcctgagtacctgaatgtgcactacattggggagtctgcctccagactgctgttcttatcaatgcactgggcactttcgattccttctttccaggctctagggcaagaaaacagcatatcactggtgaaagcttactggaatgaactttttactcttggtcttgcccagtgctggcaagtgatgaatgtagcaactatattagcaacatttgtcaattgtcttcacaatagtcttcaacaagataaaatgtcaacagaaagaagaaaattattgatggagcacatcttcaaactacaggagttttgtaacagcatggttaaactctgcattgatggatacgaatatgcctacctgaaggcaatagtactcttcagtccagatcatccaagcctagaaaacatggaacagatagagaaatttcaggaaaaggcttatgtggaattccaagattatataaccaaaacatatccagatgacacctacaggttatccagactactactcagattgccagctttaagactgatgaatgctaccatcactgaagaattgtttttcaaaggtctcattggcaatatacgaattgacagtgttatcccacatattttgaaaatggagcctgcagattataactctcaaataattggtcacagcatttgaaaactgtgactgcagtgctgtaaacttaactgttctttgccagaacacaagacaccaaattgaactcactgcttttgaggcatctggaaatttttactttaaaaagtaaccagaatccaaggtatttttattttagcttcccttaagaatttttgaagtgactgggcaggcagcagaaattaaatgaatttttcttcctgattcctttaaatgaatatgaaacactacaaatttattcttggtgaagatgatacctgaagctgtcacctcttgattatctaaactaagcgctcattctattttataaaacaaataaattagtctcttttttctgaa

SEQ ID NO: 457566 - DNA, 1320 bp, Homo sapiens
aaaacatattattatatgaaaatatgaagatgcttctcccccttaattatgcaagattttaaaaagagactttaggccaggcatgtggcttatacctgtaatcccagcactttggaaggctgaggcgggcatatcacttgagttctagaccagcctggccagttttttaggcttaaatcttaattccagaatcctatgtagaattgttattttattgcggtgtttggtcaagctcatagcttctgatgtcttcatacagggcatttgacactcttgcaaaagcattgaatcctggagagagcacagcctgccagagctcagtagcgggcatggaaggaagtgtacacctaatcactggagattcaagcataaattacaccgaaaaagaggggccacttctcagcgattcacatgtagctttcagggcaagaaaacagcatatcactggtgaaagcttactggaatgaactttttactcttggtcttgcccagtgctggcaagtgatgaatgtagcaactatattagcaacatttgtcaattgtcttcacaatagtcttcaacaagataaaatgtcaacagaaagaagaaaattattgatggagcacatcttcaaactacaggagttttgtaacagcatggttaaactctgcattgatggatacgaatatgcctacctgaaggcaatagtactcttcagtccagatcatccaagcctagaaaacatggaacagatagagaaatttcaggaaaaggcttatgtggaattccaagattatataaccaaaacatatccagatgacacctacaggttatccagactactactcagattgccagctttaagactgatgaatgctaccatcactgaagaattgtttttcaaaggtctcattggcaatatacgaattgacagtgttatcccacatattttgaaaatggagcctgcagattataactctcaaataattggtcacagcatttgaaaactgtgactgcagtgctgtaaacttaactgttctttgccagaacacaagacaccaaattgaactcactgcttttgaggcatctggaaatttttactttaaaaagtaaccagaatccaaggtatttttattttagcttcccttaagaatttttgaagtgactgggcaggcagcagaaattaaatgaatttttcttcctgattcctttaaatgaatatgaaacactacaaatttattcttggtgaagatgatacctgaagctgtcacctcttgattatctaaactaagcgctcattctattttataaaacaaataaattagtctcttttttctgaa

SEQ ID NO: 457567 - DNA, 1187 bp, Homo sapiens
taaaaatgttgcacagagatcccctgttccctttaccaattttctcccatggtaatatcttgcaaaattatggtacaataccaaaactaggatattgacattgatacaatccatcaatcttcttcaaactttcccagttttctctgtacttatttgtgtgttagttctatccaattgtatcctgagtgtgggttcatgtatcgaccatcatagtcaagatacagagcagttccatcaccaggagaatttgtcctgttatccttttatgaccacaccctcttccgtcttgccccttccccacatctctaacccctgacaaccactcatctgttctccatttgtgtactttggtcatttcagaaatgttatataaatggggccaggcatggtggctcatgcccgtggtcccaaagtgctaggattacaggcgtgagccaccatgcccggcctgagccacacattttatgatggggcttctattttgactattctttctgtctcttttcatatccactctgtcttaaatgaacattcagaactagggtaccaatgttttctttaatgtttcagatcatccaagcctagaaaacatggaacagatagagaaatttcaggaaaaggcttatgtggaattccaagattatataaccaaaacatatccagatgacacctacaggttatccagactactactcagattgccagctttaagactgatgaatgctaccatcactgaagaattgtttttcaaaggtctcattggcaatatacgaattgacagtgttatcccacatattttgaaaatggagcctgcagattataactctcaaataattggtcacagcatttgaaaactgtgactgcagtgctgtaaacttaactgttctttgccagaacacaagacaccaaattgaactcactgcttttgaggcatctggaaatttttactttaaaaagtaaccagaatccaaggtatttttattttagcttcccttaagaatttttgaagtgactgggcaggcagcagaaattaaatgaatttttcttcctgattcctttaaatgaatatgaaacactacaaatttattcttggtgaagatgatacctgaagctgtcacctcttgattatctaaactaagcgctcattctattttataaaacaaataaattagtctcttttttctgaa

SEQ ID NO: 457568 - DNA, 830 bp, Homo sapiens
caggctggtcttgaactcctgacctcagatgattcaccctcctcagcctcccaaagtgctaggattacaggcgtgagccaccatgcccggcctgagccacacattttatgatggggcttctattttgactattctttctgtctcttttcatatccactctgtcttaaatgaacattcagaactagggtaccaatgttttctttaatgtttcagatcatccaagcctagaaaacatggaacagatagagaaatttcaggaaaaggcttatgtggaattccaagattatataaccaaaacatatccagatgacacctacaggttatccagactactactcagattgccagctttaagactgatgaatgctaccatcactgaagaattgtttttcaaaggtctcattggcaatatacgaattgacagtgttatcccacatattttgaaaatggagcctgcagattataactctcaaataattggtcacagcatttgaaaactgtgactgcagtgctgtaaacttaactgttctttgccagaacacaagacaccaaattgaactcactgcttttgaggcatctggaaatttttactttaaaaagtaaccagaatccaaggtatttttattttagcttcccttaagaatttttgaagtgactgggcaggcagcagaaattaaatgaatttttcttcctgattcctttaaatgaatatgaaacactacaaatttattcttggtgaagatgatacctgaagctgtcacctcttgattatctaaactaagcgctcattctattttataaaacaaataaattagtctcttttttctgaa

SEQ ID NO: 457569 - DNA, 754 bp, Homo sapiens
ggattacaggagtgaaccacccgcctggcctgaattgtatactttaaattggtgaattttaaggatgttagacatatccactctgtcttaaatgaacattcagaactagggtaccaatgttttctttaatgtttcagatcatccaagcctagaaaacatggaacagatagagaaatttcaggaaaaggcttatgtggaattccaagattatataaccaaaacatatccagatgacacctacaggttatccagactactactcagattgccagctttaagactgatgaatgctaccatcactgaagaattgtttttcaaaggtctcattggcaatatacgaattgacagtgttatcccacatattttgaaaatggagcctgcagattataactctcaaataattggtcacagcatttgaaaactgtgactgcagtgctgtaaacttaactgttctttgccagaacacaagacaccaaattgaactcactgcttttgaggcatctggaaatttttactttaaaaagtaaccagaatccaaggtatttttattttagcttcccttaagaatttttgaagtgactgggcaggcagcagaaattaaatgaatttttcttcctgattcctttaaatgaatatgaaacactacaaatttattcttggtgaagatgatacctgaagctgtcacctcttgattatctaaactaagcgctcattctattttataaaacaaataaattagtctcttttttctgaa

SEQ ID NO: 457570 - DNA, 726 bp, Homo sapiens
gcagggctttcccctgtggagtctgtcagactgcattaatagccaggtaattgccatatgttctaaggcttgagaatactaaagttttgattttaacttttgaaaatgctatctttattaaattaggccacatgcagaaattactcatatttttctactaaatttctttctggtttacaaccttgttcctctcccttttttctttctttttttaggttatccagactactactcagattgccagctttaagactgatgaatgctaccatcactgaagaattgtttttcaaaggtctcattggcaatatacgaattgacagtgttatcccacatattttgaaaatggagcctgcagattataactctcaaataattggtcacagcatttgaaaactgtgactgcagtgctgtaaacttaactgttctttgccagaacacaagacaccaaattgaactcactgcttttgaggcatctggaaatttttactttaaaaagtaaccagaatccaaggtatttttattttagcttcccttaagaatttttgaagtgactgggcaggcagcagaaattaaatgaatttttcttcctgattcctttaaatgaatatgaaacactacaaatttattcttggtgaagatgatacctgaagctgtcacctcttgattatctaaactaagcgctcattctattttataaaacaaataaattagtctcttttttctgaa

SEQ ID NO: 457571 - DNA, 401 bp, Homo sapiens
cagtgctgtaaacttaactgttctttgccagaacacaagacaccaaattgaactcactgcttttgaggcatctggaaatttttactttaaaaagtaaccagaatccaaggtatttttattttagcttcccttaagaatttttgaagtgactgggcaggcagcagaaattaaatgaatttttcttcctgattcctttaaatgaatatgaaacactacaaatttattcttggtgaagatgatacctgaagctgtcacctcttgattatctaaactaagcgctcattctattttataaaacaaataaattagtctcttttttctgaattgtgttctagtcatatttaacttcattatgaactagtaaaaatacttaatggtcagaaatccctaaggagttagtt

SEQ ID NO: 457572 - DNA, 640 bp, Homo sapiens
gtagaggtggtcaaatattttaaaacatatactactcagcaatttttaaatgacctttctttattatagccctttgaatcctaagataggttgattttgtatcaattcatcagagtgtattctctcacctaaatagttctgaagagtcaggaacaatcctttttattctgtttttcctttcctagatgccaaggtaattgcagccctcattcatttcacaagacgagcaatcactgatttataaatgcttaactatagaatggcttatgactacccaaaacagtgccccatcaacaaatggggaaaattgccttttgagctcaggaataatttataaattggggactaccttttagttctttagcatattctatttcttattgttttatataatttttaaatcatttgcttcctccttatgtttaacagcagaggggtaatcaccttaaaatgtcatcaaaaatagatctactagaaggcagcatcacattcccatcttacttatggactcctacccctggttcatgtcttatatgcctgtaatggttataaagcctaccttcaggaaagctatggttgactaattactaatggatgggttttaaacatgtccctctacaataaattaaaatctttattg

SEQ ID NO: 457573 - DNA, 2407 bp, Homo sapiens
gccgcttctccccgttgctaatgcgcaggcgctggcgggatagcgcgccgccgagccgagaaagaggtcacgaactctgaccccccagaaatacccaaacacagaaagctctctccgccgtgaatctcgatcccacatcccgtcggctttcttcaacctctcttcccggagcgccccccaatccacgagtggcagccgcgggactgtcgcgtcggcgcccgacgccggagtcagcagggcgcaaaagcgccggtagatcatggcaaccatagaagaaattgcacatcaaattattgaacaacagatgggagagattgttacagagcagcaaactgggcagaaaatccagattgtgacagcacttgatcataatacccaaggcaagcagttcattctgacaaatcacgacggctctactccaagcaaagtcattctggccaggcaagattccactccgggaaaagttttccttacaactccagatgcagcaggtgtcaaccagttattttttaccactcctgatctgtctgcacaacacctgcagctcctaacagataattctccagaccaaggaccaaataaggtttttgatctttgcgtagtatgtggagacaaagcatcaggacgtcattatggagcagtaacttgtgaaggctgcaaaggattttttaaaagaagcatccgaaaaaatttagtatattcatgtcgaggatcaaaggattgtattattaataagcaccaccgaaaccgctgtcaatactgcaggttacagagatgtattgcgtttggaatgaagcaagactctgtccaatgtgaaagaaaacccattgaagtatcacgagaaaaatcttccaactgtgccgcttcaacagaaaaaatctatatccgaaaggaccttcgtagcccattaactgcaactccaacttttgtaacagatagtgaaagtacaaggtcaacaggactgttagattcaggaatgttcatgaatattcatccatctggagtaaaaactgagtcagctgtgctgatgacatcagataaggctgaatcatgtcagggagatttaagtacattggccaatgtggttacatcattagcgaatcttggaaaaactaaagatctttctcaaaatagtaatgaaatgtctatgattgaaagcttaagcaatgatgatacctctttgtgtgaatttcaagaaatgcagaccaacggtgatgtttcaagggcatttgacactcttgcaaaagcattgaatcctggagagagcacagcctgccagagctcagtagcgggcatggaaggaagtgtacacctaatcactggagattcaagcataaattacaccgaaaaagaggggccacttctcagcgattcacatgtagctttcaggctcaccatgccttctcctatgcctgagtacctgaatgtgcactacattggggagtctgcctccagactgctgttcttatcaatgcactgggcactttcgattccttctttccaggctctagggcaagaaaacagcatatcactggtgaaagcttactggaatgaactttttactcttggtcttgcccagtgctggcaagtgatgaatgtagcaactatattagcaacatttgtcaattgtcttcacaatagtcttcaacaagataaaatgtcaacagaaagaagaaaattattgatggagcacatcttcaaactacaggagttttgtaacagcatggttaaactctgcattgatggatacgaatatgcctacctgaaggcaatagtactcttcagtccagatcatccaagcctagaaaacatggaacagatagagaaatttcaggaaaaggcttatgtggaattccaagattatataaccaaaacatatccagatgacacctacaggttatccagactactactcagattgccagctttaagactgatgaatgctaccatcactgaagaattgtttttcaaaggtctcattggcaatatacgaattgacagtgttatcccacatattttgaaaatggagcctgcagattataactctcaaataattggtcacagcatttgaaaactgtgactgcagtgctgtaaacttaactgttctttgccagaacacaagacaccaaattgaactcactgcttttgaggcatctggaaatttttactttaaaaagtaaccagaatccaaggtatttttattttagcttcccttaagaatttttgaagtgactgggcaggcagcagaaattaaatgaatttttcttcctgattcctttaaatgaatatgaaacactacaaatttattcttggtgaagatgatacctgaagctgtcacctcttgattatctaaactaagcgctcattctattttataaaacaaataaattagtctcttttttctgaa

SEQ ID NO: 457574 - DNA, 1922 bp, Homo sapiens
gccgcttctccccgttgctaatgcgcaggcgctggcgggatagcgcgccgccgagccgagaaagaggtcacgaactctgaccccccagaaatacccaaacacagaaagctctctccgccgtgaatctcgatcccacatcccgtcggctttcttcaacctctcttcccggagcgccccccaatccacgagtggcagccgcgggactgtcgcgtcggcgcccgacgccggagtcagcagggcgcaaaagcgccggtagatcatggcaaccatagaagaaattgcacatcaaattattgaacaacagatgggagagattgttacagagcagcaaactgggcagaaaatccagattgtgacagcacttgatcataatacccaaggcaagcagttcattctgacaaatcacgacggctctactccaagcaaagtcattctggccaggcaagattccactccgggaaaagttttccttacaactccagatgcagcaggtgtcaaccagttattttttaccactcctgatctgtctgcacaacacctgcagctcctaacagataattctccagaccaaggaccaaataaggtttttgatctttgcgtagtatgtggagacaaagcatcaggacgtcattatggagcagtaacttgtgaaggctgcaaaggattttttaaaagaagcatccgaaaaaatttagtatattcatgtcgaggatcaaaggattgtattattaataagcaccaccgaaaccgctgtcaatactgcaggttacagagatgtattgcgtttggaatgaagcaagactctgtccaatgtgaaagaaaacccattgaagtatcacgagaaaaatcttccaactgtgccgcttcaacagaaaaaatctatatccgaaaggaccttcgtagcccattaactgcaactccaacttttgtaacagatagtgaaagtacaaggtcaacaggactgttagattcaggaatgttcatgaatattcatccatctggagtaaaaactgagtcagctgtgctgatgacatcagataaggctgaatcatgtcagggagatttaagtacattggccaatgtggttacatcattagcgaatcttggaaaaactaaagatctttctcaaaatagtaatgaaatgtctatgattgaaagcttaagcaatgatgatacctctttgtgtgaatttcaagaaatgcagaccaacggtgatgtttcaagggcatttgacactcttgcaaaagcattgaatcctggagagagcacagcctgccagagctcagtagcgggcatggaaggaagtgtacacctaatcactggagattcaagcataaattacaccgaaaaagaggggccacttctcagcgattcacatgtagctttcaggctcaccatgccttctcctatgcctgagtacctgaatgtgcactacattggggagtctgcctccagactgctgttcttatcaatgcactgggcactttcgattccttctttccaggctctagggcaagaaaacagcatatcactggtgaaagcttactggaatgaactttttactcttggtcttgcccagtgctggcaagtgatgaatgtagcaactatattagcaacatttgtcaattgtcttcacaatagtcttcaacaagcagaggggtaatcaccttaaaatgtcatcaaaaatagatctactagaaggcagcatcacattcccatcttacttatggactcctacccctggttcatgtcttatatgcctgtaatggttataaagcctaccttcaggaaagctatggttgactaattactaatggatgggttttaaacatgtccctctacaataaattaaaatctttattgcaatgtttgaatataatgtggaggtgtttacctgagggcctctctatctccccgaattc

SEQ ID NO: 457575 - DNA, 2838 bp, Homo sapiens
gccgcttctccccgttgctaatgcgcaggcgctggcgggatagcgcgccgccgagccgagaaagaggtcacgaactctgaccccccagaaatacccaaacacagaaagctctctccgccgtgaatctcgatcccacatcccgtcggctttcttcaacctctcttcccggagcgccccccaatccacgagtggcagccgcgggactgtcgcgtcggcgcccgacgccggagtcagcagggcgcaaaagcgccggtagatcatggcaaccatagaagaaattgcacatcaaattattgaacaacagatgggagagattgttacagagcagcaaactgggcagaaaatccagattgtgacagcacttgatcataatacccaaggcaagcagttcattctgacaaatcacgacggctctactccaagcaaagtcattctggccaggcaagattccactccgggaaaagttttccttacaactccagatgcagcaggtgtcaaccagttattttttaccactcctgatctgtctgcacaacacctgcagctcctaacagataattctccagaccaaggaccaaataaggtttttgatctttgcgtagtatgtggagacaaagcatcaggacgtcattatggagcagtaacttgtgaaggctgcaaaggattttttaaaagaagcatccgaaaaaatttagtatattcatgtcgaggatcaaaggattgtattattaataagcaccaccgaaaccgctgtcaatactgcaggttacagagatgtattgcgtttggaatgaagcaagactgtatgtattagcttttaaggagaaaatactttttaaagattccagcaaactacaagagtattgaaattaacaaaatatgtcaaatatgtatactttttagtttacagttttccaactaaaaatataagaatacagacctacgtatgtacttttttatttattcaactaatatttattgaatacctgtgtaaaaagcacgtatttgtagtttgtgtttggcaaaaagaatgagagatgcaaattggtttgttttactaatctaaagcaactttgttgaacttgcacataatttctaaagattgatggttatctttggagtttagtatggtagccatgtctcctattagcagcattaagcttacctacagcttacatttctaattgtctgtaaatcctatattgtgatataatagtttaacacatttttgtagctgtccaatgtgaaagaaaacccattgaagtatcacgagaaaaatcttccaactgtgccgcttcaacagaaaaaatctatatccgaaaggaccttcgtagcccattaactgcaactccaacttttgtaacagatagtgaaagtacaaggtcaacaggactgttagattcaggaatgttcatgaatattcatccatctggagtaaaaactgagtcagctgtgctgatgacatcagataaggctgaatcatgtcagggagatttaagtacattggccaatgtggttacatcattagcgaatcttggaaaaactaaagatctttctcaaaatagtaatgaaatgtctatgattgaaagcttaagcaatgatgatacctctttgtgtgaatttcaagaaatgcagaccaacggtgatgtttcaagggcatttgacactcttgcaaaagcattgaatcctggagagagcacagcctgccagagctcagtagcgggcatggaaggaagtgtacacctaatcactggagattcaagcataaattacaccgaaaaagaggggccacttctcagcgattcacatgtagctttcaggctcaccatgccttctcctatgcctgagtacctgaatgtgcactacattggggagtctgcctccagactgctgttcttatcaatgcactgggcactttcgattccttctttccaggctctagggcaagaaaacagcatatcactggtgaaagcttactggaatgaactttttactcttggtcttgcccagtgctggcaagtgatgaatgtagcaactatattagcaacatttgtcaattgtcttcacaatagtcttcaacaagataaaatgtcaacagaaagaagaaaattattgatggagcacatcttcaaactacaggagttttgtaacagcatggttaaactctgcattgatggatacgaatatgcctacctgaaggcaatagtactcttcagtccagatcatccaagcctagaaaacatggaacagatagagaaatttcaggaaaaggcttatgtggaattccaagattatataaccaaaacatatccagatgacacctacaggttatccagactactactcagattgccagctttaagactgatgaatgctaccatcactgaagaattgtttttcaaaggtctcattggcaatatacgaattgacagtgttatcccacatattttgaaaatggagcctgcagattataactctcaaataattggtcacagcatttgaaaactgtgactgcagtgctgtaaacttaactgttctttgccagaacacaagacaccaaattgaactcactgcttttgaggcatctggaaatttttactttaaaaagtaaccagaatccaaggtatttttattttagcttcccttaagaatttttgaagtgactgggcaggcagcagaaattaaatgaatttttcttcctgattcctttaaatgaatatgaaacactacaaatttattcttggtgaagatgatacctgaagctgtcacctcttgattatctaaactaagcgctcattctattttataaaacaaataaattagtctcttttttctgaa

SEQ ID NO: 457576 - DNA, 2445 bp, Homo sapiens
gccgcttctccccgttgctaatgcgcaggcgctggcgggatagcgcgccgccgagccgagaaagaggtcacgaactctgaccccccagaaatacccaaacacagaaagctctctccgccgtgaatctcgatcccacatcccgtcggctttcttcaacctctcttcccggagcgccccccaatccacgagtggcagccgcgggactgtcgcgtcggcgcccgacgccggagtcagcagggcgcaaaagcgccggtagatcatggcaaccatagaagaaattgcacatcaaattattgaacaacagatgggagaggatagaattttgtggcaatagaatcggtagtttaaaagattgttacagagcagcaaactgggcagaaaatccagattgtgacagcacttgatcataatacccaaggcaagcagttcattctgacaaatcacgacggctctactccaagcaaagtcattctggccaggcaagattccactccgggaaaagttttccttacaactccagatgcagcaggtgtcaaccagttattttttaccactcctgatctgtctgcacaacacctgcagctcctaacagataattctccagaccaaggaccaaataaggtttttgatctttgcgtagtatgtggagacaaagcatcaggacgtcattatggagcagtaacttgtgaaggctgcaaaggattttttaaaagaagcatccgaaaaaatttagtatattcatgtcgaggatcaaaggattgtattattaataagcaccaccgaaaccgctgtcaatactgcaggttacagagatgtattgcgtttggaatgaagcaagactctgtccaatgtgaaagaaaacccattgaagtatcacgagaaaaatcttccaactgtgccgcttcaacagaaaaaatctatatccgaaaggaccttcgtagcccattaactgcaactccaacttttgtaacagatagtgaaagtacaaggtcaacaggactgttagattcaggaatgttcatgaatattcatccatctggagtaaaaactgagtcagctgtgctgatgacatcagataaggctgaatcatgtcagggagatttaagtacattggccaatgtggttacatcattagcgaatcttggaaaaactaaagatctttctcaaaatagtaatgaaatgtctatgattgaaagcttaagcaatgatgatacctctttgtgtgaatttcaagaaatgcagaccaacggtgatgtttcaagggcatttgacactcttgcaaaagcattgaatcctggagagagcacagcctgccagagctcagtagcgggcatggaaggaagtgtacacctaatcactggagattcaagcataaattacaccgaaaaagaggggccacttctcagcgattcacatgtagctttcaggctcaccatgccttctcctatgcctgagtacctgaatgtgcactacattggggagtctgcctccagactgctgttcttatcaatgcactgggcactttcgattccttctttccaggctctagggcaagaaaacagcatatcactggtgaaagcttactggaatgaactttttactcttggtcttgcccagtgctggcaagtgatgaatgtagcaactatattagcaacatttgtcaattgtcttcacaatagtcttcaacaagataaaatgtcaacagaaagaagaaaattattgatggagcacatcttcaaactacaggagttttgtaacagcatggttaaactctgcattgatggatacgaatatgcctacctgaaggcaatagtactcttcagtccagatcatccaagcctagaaaacatggaacagatagagaaatttcaggaaaaggcttatgtggaattccaagattatataaccaaaacatatccagatgacacctacaggttatccagactactactcagattgccagctttaagactgatgaatgctaccatcactgaagaattgtttttcaaaggtctcattggcaatatacgaattgacagtgttatcccacatattttgaaaatggagcctgcagattataactctcaaataattggtcacagcatttgaaaactgtgactgcagtgctgtaaacttaactgttctttgccagaacacaagacaccaaattgaactcactgcttttgaggcatctggaaatttttactttaaaaagtaaccagaatccaaggtatttttattttagcttcccttaagaatttttgaagtgactgggcaggcagcagaaattaaatgaatttttcttcctgattcctttaaatgaatatgaaacactacaaatttattcttggtgaagatgatacctgaagctgtcacctcttgattatctaaactaagcgctcattctattttataaaacaaataaattagtctcttttttctgaa

SEQ ID NO: 457577 - DNA, 2797 bp, Homo sapiens
gccgcttctccccgttgctaatgcgcaggcgctggcgggatagcgcgccgccgagccgagaaagaggtcacgaactctgaccccccagaaatacccaaacacagaaagctctctccgccgtgaatctcgatcccacatcccgtcggctttcttcaacctctcttcccggagcgccccccaatccacgagtggcagccgcgggactgtcgcgtcggcgcccgacgccggagtcagcagggcgcaaaagcgccggtagatcatggcaaccatagaagaaattgcacatcaaattattgaacaacagatgggagaggatagaattttgtggcaatagaatcggtagtttaaaagattgttacagagcagcaaactgggcagaaaatccagattgtgacagcacttgatcataatacccaaggcaagcagttcattctgacaaatcacgacggctctactccaagcaaagtcattctggccaggcaagattccactccgggaaaagttttccttacaactccagatgcagcaggtgtcaaccagttattttttaccactcctgatctgtctgcacaacacctgcaggacgtcattatggagcagtaacttgtgaaggctgcaaaggattttttaaaagaagcatccgaaaaaatttagtatattcatgtcgaggatcaaaggattgtattattaataagcaccaccgaaaccgctgtcaatactgcaggttacagagatgtattgcgtttggaatgaagcaagactgtatgtattagcttttaaggagaaaatactttttaaagattccagcaaactacaagagtattgaaattaacaaaatatgtcaaatatgtatactttttagtttacagttttccaactaaaaatataagaatacagacctacgtatgtacttttttatttattcaactaatatttattgaatacctgtgtaaaaagcacgtatttgtagtttgtgtttggcaaaaagaatgagagatgcaaattggtttgttttactaatctaaagcaactttgttgaacttgcacataatttctaaagattgatggttatctttggagtttagtatggtagccatgtctcctattagcagcattaagcttacctacagcttacatttctaattgtctgtaaatcctatattgtgatataatagtttaacacatttttgtagctgtccaatgtgaaagaaaacccattgaagtatcacgagaaaaatcttccaactgtgccgcttcaacagaaaaaatctatatccgaaaggaccttcgtagcccattaactgcaactccaacttttgtaacagatagtgaaagtacaaggtcaacaggactgttagattcaggaatgttcatgaatattcatccatctggagtaaaaactgagtcagctgtgctgatgacatcagataaggctgaatcatgtcagggagatttaagtacattggccaatgtggttacatcattagcgaatcttggaaaaactaaagatctttctcaaaatagtaatgaaatgtctatgattgaaagcttaagcaatgatgatacctctttgtgtgaatttcaagaaatgcagaccaacggtgatgtttcaagggcatttgacactcttgcaaaagcattgaatcctggagagagcacagcctgccagagctcagtagcgggcatggaaggaagtgtacacctaatcactggagattcaagcataaattacaccgaaaaagaggggccacttctcagcgattcacatgtagctttcaggctcaccatgccttctcctatgcctgagtacctgaatgtgcactacattggggagtctgcctccagactgctgttcttatcaatgcactgggcactttcgattccttctttccaggctctagggcaagaaaacagcatatcactggtgaaagcttactggaatgaactttttactcttggtcttgcccagtgctggcaagtgatgaatgtagcaactatattagcaacatttgtcaattgtcttcacaatagtcttcaacaagataaaatgtcaacagaaagaagaaaattattgatggagcacatcttcaaactacaggagttttgtaacagcatggttaaactctgcattgatggatacgaatatgcctacctgaaggcaatagtactcttcagtccagatcatccaagcctagaaaacatggaacagatagagaaatttcaggaaaaggcttatgtggaattccaagattatataaccaaaacatatccagatgacacctacaggttatccagactactactcagattgccagctttaagactgatgaatgctaccatcactgaagaattgtttttcaaaggtctcattggcaatatacgaattgacagtgttatcccacatattttgaaaatggagcctgcagattataactctcaaataattggtcacagcatttgaaaactgtgactgcagtgctgtaaacttaactgttctttgccagaacacaagacaccaaattgaactcactgcttttgaggcatctggaaatttttactttaaaaagtaaccagaatccaaggtatttttattttagcttcccttaagaatttttgaagtgactgggcaggcagcagaaattaaatgaatttttcttcctgattcctttaaatgaatatgaaacactacaaatttattcttggtgaagatgatacctgaagctgtcacctcttgattatctaaactaagcgctcattctattttataaaacaaataaattagtctcttttttctgaa

SEQ ID NO: 457578 - DNA, 4831 bp, Homo sapiens
gggcagggggtggagctggttgaaggaacggggcagtcccctgaggagcggggctggttgaaacgctaggggcgggatctggcggagtggaagaaccgcggcaggggccaagcctcctcaactatgacctcaaccggccaggattccaccacaaccaggcagcgaagaagtaggcagaacccccagtcgccccctcaggactccagtgtcacttcgaagcgaaatattaaaaagggagccgttccccgctctatccccaatctagcggaggtaaagaagaaaggcaaaatgaagaagctcggccaagcaatggaagaagacctaatcgtgggactgcaagggatggatctgaaccttgaggctgaagcactggctggcactggcttggtgttggatgagcagttaaatgaattccattgcctctgggatgacagcttcccggaaggccctgagcggctccatgccatcaaggagcaactgatccaggagggcctcctagatcgctgcgtgtcctttcaggcccggtttgctgaaaaggaagagctgatgttggttcacaggtgaaggcttgggagccttgtagggatggggaggagcctgccctggacaaaccagggcaagctaaacgctttgggaagcaatgtcatggtctctgcagccagccttgggcaagtcgctgagcctttctgaatctgtgtcatcgcctgtaacaaggggaccagtaaacataagttcctcaggagagtttgatgtgtgtcaggtgcttagaacagggcctgatatataatcagcccatgatgagctattactgttatcatgatctgattgtgtgaatagatggtggatgtgtggacagagtgatcggggttcccccaggggcttccagatttagaggcctagtgctatgtggcttgaggaaagctagcttccagagcaggtatctgagctgaactttaagaggagaaaaagagtgagtcagatgaagagggtgactgagggaagggaagaacagacagctgaaccagtgtggccaaaggcctgaaagtaggatttggtgtggctactgcaggggagcagagaacattacctgaactgaggcgggctagggaagaaacagaatgtgtcttatatcctggctattccttcaggttgacagttgggggagccaagccctaatttgaccagggggttggtgtatggacagctcagttggggaagagacagggccctgaatctcatctcccatctgtgtctagcctagaatatattgatctgatggaaacaacccagtacatgaatgagggagaactccgtgtcctagcagacacctacgactcagtttatctgcatccgaactcatactcctgtgcctgcctggcctcaggctctgtcctcaggctggtggatgcggtcctgggggctgagatccggaatggcatggccatcattaggcctcctggacatcacgcccagcacagtcttatggatggctattgcatgttcaaccacgtggctgtggcagcccgctatgctcaacagaaacaccgcatccggagggtccttatcgtagattgggatgtgcaccacggtcaaggaacacagttcaccttcgaccaggaccccagtgtcctctatttctccatccaccgctacgagcagggtaggttctggccccacctgaaggcctctaactggtccaccacaggtttcggccaaggccaaggatataccatcaatgtgccttggaaccaggtggggatgcgggatgctgactacattgctgctttcctgcacgtcctgctgccagtcgccctcgagttccagcctcagctggtcctggtggctgctggatttgatgccctgcaaggggaccccaagggtgagatggccgccactccggcagggttcgcccagctaacccacctgctcatgggtctggcaggaggcaagctgatcctgtctctggagggtggctacaacctccgcgccctggctgaaggcgtcagtgcttcgctccacacccttctgggagacccttgccccatgctggagtcacctggtgccccctgccggagtgcccaggcttcagtttcctgtgctctggaagcccttgagcccttctgggaggttcttgtgagatcaactgagaccgtggagagggacaacatggaggaggacaatgtagaggagagcgaggaggaaggaccctgggagccccctgtgctcccaatcctgacatggccagtgctacagtctcgcacagggctggtctatgaccaaaatatgatgaatcactgcaacttgtgggacagccaccaccctgaggtaccccagcgcatcttgcggatcatgtgccgtctggaggagctgggccttgccgggcgctgcctcaccctgacaccgcgccctgccacagaggctgagctgctcacctgtcacagtgctgagtacgtgggtcatctccgggccacagagaaaatgaaaacccgggagctgcaccgtgagagttccaactttgactccatctatatctgccccagtaccttcgcctgtgcacagcttgccactggcgctgcctgccgcctggtggaggctgtgctctcaggagaggttctgaatggtgctgctgtggtgcgtcccccaggacaccacgcagagcaggatgcagcttgcggtttttgctttttcaactctgtggctgtggctgctcgccatgcccagactatcagtgggcatgccctacggatcctgattgtggattgggatgtccaccacggtaatggaactcagcacatgtttgaggatgaccccagtgtgctatatgtgtccctgcaccgctatgatcatggcaccttcttccccatgggggatgagggtgccagcagccagatcggccgggctgcgggcacaggcttcaccgtcaacgtggcatggaacgggccccgcatgggtgatgctgactacctagctgcctggcatcgcctggtgcttcccattgcctacgagtttaacccagaactggtgctggtctcagctggctttgatgctgcacggggggatccgctggggggctgccaggtgtcacctgagggttatgcccacctcacccacctgctgatgggccttgccagtggccgcattatccttatcctagagggtggctataacctgacatccatctcagagtccatggctgcctgcactcgctccctccttggagacccaccacccctgctgaccctgccacggcccccactatcaggggccctggcctcaatcactgagaccatccaagtccatcgcagatactggcgcagcttacgggtcatgaaggtagaagacagagaaggaccctccagttctaagttggtcaccaagaaggcaccccaaccagccaaacctaggttagctgagcggatgaccacacgagaaaagaaggttctggaagcaggcatggggaaagtcacctcggcatcatttggggaagagtccactccaggccagactaactcagagacagctgtggtggccctcactcaggaccagccctcagaggcagccacagggggagccactctggcccagaccatttctgaggcagccattgggggagccatgctgggccagaccacctcagaggaggctgtcgggggagccactccggaccagaccacctcagaggagactgtgggaggagccattctggaccagaccacctcagaggatgctgttgggggagccacgctgggccagactacctcagaggaggctgtaggaggagctacactggcccagaccacctcggaggcagccatggagggagccacactggaccagactacgtcagaggaggctccagggggcaccgagctgatccaaactcctctagcctcgagcacagaccaccagacccccccaacctcacctgtgcagggaactacaccccagatatctcccagtacactgattgggagtctcaggaccttggagctaggcagcgaatctcagggggcctcagaatctcaggccccaggagaggagaacctactaggagaggcagctggaggtcaggacatggctgattcgatgctgatgcagggatctaggggcctcactgatcaggccatattttatgctgtgacaccactgccctggtgtccccatttggtggcagtatgccccatacctgcagcaggcctagacgtgacccaaccttgtggggactgtggaacaatccaagagaattgggtgtgtctctcttgctatcaggtctactgtggtcgttacatcaatggccacatgctccaacaccatggaaattctggacacccgctggtcctcagctacatcgacctgtcagcctggtgttactactgtcaggcctatgtccaccaccaggctctcctagatgtgaagaacatcgcccaccagaacaagtttggggaggatatgccccacccacactaagccccagaatacggtccctcttcaccttctgaggcccacgatagaccagctgtagctcattccagcctgtaccttggatgaggggtagcctcccactgcatcccatcctgaatatcctttgcaactccccaagagtgcttatttaagtgttaatacttttaagagaactgcgacgattaattgtggatctccccctgcccattgcctgcttgaggggcaccactactccagcccagaaggaaaggggggcagctcagtggccccaagagggagctgatatcatgaggataacattggcgggaggggagttaactggcaggcatggcaaggttgcatatgtaataaagtacaagctgttaaaaaa

SEQ ID NO: 457579 - DNA, 2582 bp, Homo sapiens
gggcagggggtggagctggttgaaggaacggggcagtcccctgaggagcggggctggttgaaacgctaggggcgggatctggcggagtggaagaaccgcggcaggggccaagcctcctcaactatgacctcaaccggccaggattccaccacaaccaggcagcgaagaagtaggcagaacccccagtcgccccctcaggactccagtgtcacttcgaagcgaaatattaaaaagggagccgttccccgctctatccccaatctagcggaggtaaagaagaaaggcaaaatgaagaagctcggccaagcaatggaagaagacctaatcgtgggactgcaagggatggatctgaaccttgaggctgaagcactggctggcactggcttggtgttggatgagcagttaaatgaattccattgcctctgggatgacagcttcccggaaggccctgagcggctccatgccatcaaggagcaactgatccaggagggcctcctagatcgctgcgtgtcctttcaggcccggtttgctgaaaaggaagagctgatgttggttcacagcctagaatatattgatctgatggaaacaacccagtacatgaatgagggagaactccgtgtcctagcagacacctacgactcagtttatctgcatccgaactcatactcctgtgcctgcctggcctcaggctctgtcctcaggctggtggatgcggtcctgggggctgagatccggaatggcatggccatcattaggcctcctggacatcacgcccagcacagtcttatggatggctattgcatgttcaaccacgtggctgtggcagcccgctatgctcaacagaaacaccgcatccggagggtccttatcgtagattgggatgtgcaccacggtcaaggaacacagttcaccttcgaccaggaccccagtgtcctctatttctccatccaccgctacgagcagggtaggttctggccccacctgaaggcctctaactggtccaccacaggtttcggccaaggccaaggatataccatcaatgtgccttggaaccaggtggggatgcgggatgctgactacattgctgctttcctgcacgtcctgctgccagtcgccctcgagttccagcctcagctggtcctggtggctgctggatttgatgccctgcaaggggaccccaagggtgagatggccgccactccggcagggttcgcccagctaacccacctgctcatgggtctggcaggaggcaagctgatcctgtctctggagggtggctacaacctccgcgccctggctgaaggcgtcagtgcttcgctccacacccttctgggagacccttgccccatgctggagtcacctggtgccccctgccggagtgcccaggcttcagtttcctgtgctctggaagcccttgagcccttctgggaggttcttgtgagatcaactgagaccgtggagagggacaacatggaggaggacaatgtagaggagagcgaggaggaaggaccctgggagccccctgtgctcccaatcctgacatggccagtgctacagtctcgcacagggctggtctatgaccaaaatatgatgaatcactgcaacttgtgggacagccaccaccctgaggtaccccagcgcatcttgcggatcatgtgccgtctggaggagctgggccttgccgggcgctgcctcaccctgacaccgcgccctgccacagaggctgagctgctcacctgtcacagtgctgagtacgtgggtcatctccgggccacagagaaaatgaaaacccgggagctgcaccgtgagagttccaactttgactccatctatatctgccccagtaccttcgcctgtgcacagcttgccactggcgctgcctgccgcctggtggaggctgtgctctcaggagaggttctgaatggtgctgctgtggtgcgtcccccaggacaccacgcagagcaggatgcagcttgcggtttttgctttttcaactctgtggctgtggctgctcgccatgcccagactatcagtgggcatgccctacggatcctgattgtggattgggatgtccaccacggtaatggaactcagcacatgtttgaggatgaccccagtgtgctatatgtgtccctgcaccgctatgatcatggcaccttcttccccatgggggatgagggtgccagcagccagatcggccgggctgcgggcacaggcttcaccgtcaacgtggcatggaacgggccccgcatgggtgatgctgactacctagctgcctggcatcgcctggtgcttcccattgcctacgagtttaacccagaactggtgctggtctcagctggctttgatgctgcacggggggatccgctggggggctgccaggtgtcacctgagggttatgcccacctccccctgcccattgcctgcttgaggggcaccactactccagcccagaaggaaaggggggcagctcagtggccccaagagggagctgatatcatgaggataacattggcgggaggggagttaactggcaggcatggcaaggttgcatatgtaataaagtacaagctgttaaaaaa

SEQ ID NO: 457580 - DNA, 1152 bp, Homo sapiens
gggcagggggtggagctggttgaaggaacggggcagtcccctgaggagcggggctggttgaaacgctaggggcgggatctggcggagtggaaggtaccggtccggcccgataaggggtggagttaagtgaatcgttaagggtggagtcgaaaccggggtcggggccggggccggctgagtgaaagggtgggtgattatcccgggagataggccgaaagggcaggttcgtgaaggaatggggtctgggctgggcttagagggtctgggaatggggcttaggagagtagaaggggcggtgattggttggaaagggcaggccctaagacggactgtgtgagcccgggggctcattgctccgtgaaagggcaagaccagggaaagagaatcgtgtaaaaggggtggagtctagcgggccgggcggggccgggtagaatggccacctgagtggagggagaaggcctgagagaggcggagtttggaaggctgtggagaatcagatcgcaaccgcggcaggggccaagcctcctcaactatgacctcaaccggccaggattccaccacaaccaggcagcgaagaagtaggcagaacccccagtcgccccctcaggactccagtgtcacttcgaagcgaaatattaaaaagggagccgttccccgctctatccccaatctagcggaggtaaagaagaaaggcaaaatgaagaagctcggccaagcaatggaagaagacctaatcgtgggactgcaagggatggatctgaaccttgaggctgaagcactggctggcactggcttggtgttggatgagcagttaaatgaattccattgcctctgggatgacagcttcccggaaggccctgagcggctccatgccatcaaggagcaactgatccaggagggcctcctagatcgctgcgtgtcctttcaggcccggtttgctgaaaaggaagagctgatgttggttcacaggtgaaggcttgggagccttgtagggatggggaggagcctgccctggacaaaccagggcaagctaaacgctttgggaagcaatgtcatggtctctgcagccagccttgggcaagtcgctgagcctttctgaatctgtgtcatcgcctgtaacaaggggaccagtaaacataagttcctcaggag

SEQ ID NO: 457581 - DNA, 435 bp, Homo sapiens
ggtatgcactctcttattatcatcattattattattccctggtcatgtctggtcctttcctgatcccccttcacaactccttgccccagggtggctacgcgagctcagcttgctccacacgccccccacccgtcacaccctcggcaccctcaccacccgcaacacacaccacactccttgccttcccctgatccagatatcctctcagtgtcaagttgccctgcgctttatcgaaatgaagaggaggaagaggccatttacttctctgctgaaaagcaatgggaagtgccagacacagcttcagaatgtgactccttaaattcttccattggaaggaaacagtctcctcctttaagcctcgagatataccaaacattatctccgcgaaagatatcaagagatgaggtgtccctagaggattcctcccgaggggat

SEQ ID NO: 457582 - DNA, 4073 bp, Homo sapiens
accgaaggcggctagggactggctgaagaggaaccgcggcaggggccaagcctcctcaactatgacctcaaccggccaggattccaccacaaccaggcagcgaagaagtaggcagaacccccagtcgccccctcaggactccagtgtcacttcgaagcgaaatattaaaaagggagccgttccccgctctatccccaatctagcggaggtaaagaagaaaggcaaaatgaagaagctcggccaagcaatggaagaagacctaatcgtgggactgcaagggatggatctgaaccttgaggctgaagcactggctggcactggcttggtgttggatgagcagttaaatgaattccattgcctctgggatgacagcttcccggaaggccctgagcggctccatgccatcaaggagcaactgatccaggagggcctcctagatcgctgcgtgtcctttcaggcccggtttgctgaaaaggaagagctgatgttggttcacagcctagaatatattgatctgatggaaacaacccagtacatgaatgagggagaactccgtgtcctagcagacacctacgactcagtttatctgcatccgaactcatactcctgtgcctgcctggcctcaggctctgtcctcaggctggtggatgcggtcctgggggctgagatccggaatggcatggccatcattaggcctcctggacatcacgcccagcacagtcttatggatggctattgcatgttcaaccacgtggctgtggcagcccgctatgctcaacagaaacaccgcatccggagggtccttatcgtagattgggatgtgcaccacggtcaaggaacacagttcaccttcgaccaggaccccagtgtcctctatttctccatccaccgctacgagcagggtaggttctggccccacctgaaggcctctaactggtccaccacaggtttcggccaaggccaaggatataccatcaatgtgccttggaaccaggtggggatgcgggatgctgactacattgctgctttcctgcacgtcctgctgccagtcgccctcgagttccagcctcagctggtcctggtggctgctggatttgatgccctgcaaggggaccccaagggtgagatggccgccactccggcagggttcgcccagctaacccacctgctcatgggtctggcaggaggcaagctgatcctgtctctggagggtggctacaacctccgcgccctggctgaaggcgtcagtgcttcgctccacacccttctgggagacccttgccccatgctggagtcacctggtgccccctgccggagtgcccaggcttcagtttcctgtgctctggaagcccttgagcccttctgggaggttcttgtgagatcaactgagaccgtggagagggacaacatggaggaggacaatgtagaggagagcgaggaggaaggaccctgggagccccctgtgctcccaatcctgacatggccagtgctacagtctcgcacagggctggtctatgaccaaaatatgatgaatcactgcaacttgtgggacagccaccaccctgaggtaccccagcgcatcttgcggatcatgtgccgtctggaggagctgggccttgccgggcgctgcctcaccctgacaccgcgccctgccacagaggctgagctgctcacctgtcacagtgctgagtacgtgggtcatctccgggccacagagaaaatgaaaacccgggagctgcaccgtgagagttccaactttgactccatctatatctgccccagtaccttcgcctgtgcacagcttgccactggcgctgcctgccgcctggtggaggctgtgctctcaggagaggttctgaatggtgctgctgtggtgcgtcccccaggacaccacgcagagcaggatgcagcttgcggtttttgctttttcaactctgtggctgtggctgctcgccatgcccagactatcagtgggcatgccctacggatcctgattgtggattgggatgtccaccacggtaatggaactcagcacatgtttgaggatgaccccagtgtgctatatgtgtccctgcaccgctatgatcatggcaccttcttccccatgggggatgagggtgccagcagccagatcggccgggctgcgggcacaggcttcaccgtcaacgtggcatggaacgggccccgcatgggtgatgctgactacctagctgcctggcatcgcctggtgcttcccattgcctacgagtttaacccagaactggtgctggtctcagctggctttgatgctgcacggggggatccgctggggggctgccaggtgtcacctgagggttatgcccacctcacccacctgctgatgggccttgccagtggccgcattatccttatcctagagggtggctataacctgacatccatctcagagtccatggctgcctgcactcgctccctccttggagacccaccacccctgctgaccctgccacggcccccactatcaggggccctggcctcaatcactgagaccatccaagtccatcgcagatactggcgcagcttacgggtcatgaaggtagaagacagagaaggaccctccagttctaagttggtcaccaagaaggcaccccaaccagccaaacctaggttagctgagcggatgaccacacgagaaaagaaggttctggaagcaggcatggggaaagtcacctcggcatcatttggggaagagtccactccaggccagactaactcagagacagctgtggtggccctcactcaggaccagccctcagaggcagccacagggggagccactctggcccagaccatttctgaggcagccattgggggagccatgctgggccagaccacctcagaggaggctgtcgggggagccactccggaccagaccacctcagaggagactgtgggaggagccattctggaccagaccacctcagaggatgctgttgggggagccacgctgggccagactacctcagaggaggctgtaggaggagctacactggcccagaccacctcggaggcagccatggagggagccacactggaccagactacgtcagaggaggctccagggggcaccgagctgatccaaactcctctagcctcgagcacagaccaccagacccccccaacctcacctgtgcagggaactacaccccagatatctcccagtacactgattgggagtctcaggaccttggagctaggcagcgaatctcagggggcctcagaatctcaggccccaggagaggagaacctactaggagaggcagctggaggtcaggacatggctgattcgatgctgatgcagggatctaggggcctcactgatcaggccatattttatgctgtgacaccactgccctggtgtccccatttggtggcagtatgccccatacctgcagcaggcctagacgtgacccaaccttgtggggactgtggaacaatccaagagaattgggtgtgtctctcttgctatcaggtctactgtggtcgttacatcaatggccacatgctccaacaccatggaaattctggacacccgctggtcctcagctacatcgacctgtcagcctggtgttactactgtcaggcctatgtccaccaccaggctctcctagatgtgaagaacatcgcccaccagaacaagtttggggaggatatgccccacccacactaagccccagaatacggtccctcttcaccttctgaggcccacgatagaccagctgtagctcattccagcctgtaccttggatgaggggtagcctcccactgcatcccatcctgaatatcctttgcaactccccaagagtgcttatttaagtgttaatacttttaagagaactgcgacgattaattgtggatctccccctgcccattgcctgcttgaggggcaccactactccagcccagaaggaaaggggggcagctcagtggccccaagagggagctgatatcatgaggataacattggcgggaggggagttaactggcaggcatggcaaggttgcatatgtaataaagtacaagctgttaaaaaa

SEQ ID NO: 457583 - DNA, 4127 bp, Homo sapiens
tcgcgtccccacaggtcgccagaaacttggtggagcgagccaagggcggagtttgagaaaggggctgcgtccaatgagtggagcgaaccgcggcaggggccaagcctcctcaactatgacctcaaccggccaggattccaccacaaccaggcagcgaagaagtaggcagaacccccagtcgccccctcaggactccagtgtcacttcgaagcgaaatattaaaaagggagccgttccccgctctatccccaatctagcggaggtaaagaagaaaggcaaaatgaagaagctcggccaagcaatggaagaagacctaatcgtgggactgcaagggatggatctgaaccttgaggctgaagcactggctggcactggcttggtgttggatgagcagttaaatgaattccattgcctctgggatgacagcttcccggaaggccctgagcggctccatgccatcaaggagcaactgatccaggagggcctcctagatcgctgcgtgtcctttcaggcccggtttgctgaaaaggaagagctgatgttggttcacagcctagaatatattgatctgatggaaacaacccagtacatgaatgagggagaactccgtgtcctagcagacacctacgactcagtttatctgcatccgaactcatactcctgtgcctgcctggcctcaggctctgtcctcaggctggtggatgcggtcctgggggctgagatccggaatggcatggccatcattaggcctcctggacatcacgcccagcacagtcttatggatggctattgcatgttcaaccacgtggctgtggcagcccgctatgctcaacagaaacaccgcatccggagggtccttatcgtagattgggatgtgcaccacggtcaaggaacacagttcaccttcgaccaggaccccagtgtcctctatttctccatccaccgctacgagcagggtaggttctggccccacctgaaggcctctaactggtccaccacaggtttcggccaaggccaaggatataccatcaatgtgccttggaaccaggtggggatgcgggatgctgactacattgctgctttcctgcacgtcctgctgccagtcgccctcgagttccagcctcagctggtcctggtggctgctggatttgatgccctgcaaggggaccccaagggtgagatggccgccactccggcagggttcgcccagctaacccacctgctcatgggtctggcaggaggcaagctgatcctgtctctggagggtggctacaacctccgcgccctggctgaaggcgtcagtgcttcgctccacacccttctgggagacccttgccccatgctggagtcacctggtgccccctgccggagtgcccaggcttcagtttcctgtgctctggaagcccttgagcccttctgggaggttcttgtgagatcaactgagaccgtggagagggacaacatggaggaggacaatgtagaggagagcgaggaggaaggaccctgggagccccctgtgctcccaatcctgacatggccagtgctacagtctcgcacagggctggtctatgaccaaaatatgatgaatcactgcaacttgtgggacagccaccaccctgaggtaccccagcgcatcttgcggatcatgtgccgtctggaggagctgggccttgccgggcgctgcctcaccctgacaccgcgccctgccacagaggctgagctgctcacctgtcacagtgctgagtacgtgggtcatctccgggccacagagaaaatgaaaacccgggagctgcaccgtgagagttccaactttgactccatctatatctgccccagtaccttcgcctgtgcacagcttgccactggcgctgcctgccgcctggtggaggctgtgctctcaggagaggttctgaatggtgctgctgtggtgcgtcccccaggacaccacgcagagcaggatgcagcttgcggtttttgctttttcaactctgtggctgtggctgctcgccatgcccagactatcagtgggcatgccctacggatcctgattgtggattgggatgtccaccacggtaatggaactcagcacatgtttgaggatgaccccagtgtgctatatgtgtccctgcaccgctatgatcatggcaccttcttccccatgggggatgagggtgccagcagccagatcggccgggctgcgggcacaggcttcaccgtcaacgtggcatggaacgggccccgcatgggtgatgctgactacctagctgcctggcatcgcctggtgcttcccattgcctacgagtttaacccagaactggtgctggtctcagctggctttgatgctgcacggggggatccgctggggggctgccaggtgtcacctgagggttatgcccacctcacccacctgctgatgggccttgccagtggccgcattatccttatcctagagggtggctataacctgacatccatctcagagtccatggctgcctgcactcgctccctccttggagacccaccacccctgctgaccctgccacggcccccactatcaggggccctggcctcaatcactgagaccatccaagtccatcgcagatactggcgcagcttacgggtcatgaaggtagaagacagagaaggaccctccagttctaagttggtcaccaagaaggcaccccaaccagccaaacctaggttagctgagcggatgaccacacgagaaaagaaggttctggaagcaggcatggggaaagtcacctcggcatcatttggggaagagtccactccaggccagactaactcagagacagctgtggtggccctcactcaggaccagccctcagaggcagccacagggggagccactctggcccagaccatttctgaggcagccattgggggagccatgctgggccagaccacctcagaggaggctgtcgggggagccactccggaccagaccacctcagaggagactgtgggaggagccattctggaccagaccacctcagaggatgctgttgggggagccacgctgggccagactacctcagaggaggctgtaggaggagctacactggcccagaccacctcggaggcagccatggagggagccacactggaccagactacgtcagaggaggctccagggggcaccgagctgatccaaactcctctagcctcgagcacagaccaccagacccccccaacctcacctgtgcagggaactacaccccagatatctcccagtacactgattgggagtctcaggaccttggagctaggcagcgaatctcagggggcctcagaatctcaggccccaggagaggagaacctactaggagaggcagctggaggtcaggacatggctgattcgatgctgatgcagggatctaggggcctcactgatcaggccatattttatgctgtgacaccactgccctggtgtccccatttggtggcagtatgccccatacctgcagcaggcctagacgtgacccaaccttgtggggactgtggaacaatccaagagaattgggtgtgtctctcttgctatcaggtctactgtggtcgttacatcaatggccacatgctccaacaccatggaaattctggacacccgctggtcctcagctacatcgacctgtcagcctggtgttactactgtcaggcctatgtccaccaccaggctctcctagatgtgaagaacatcgcccaccagaacaagtttggggaggatatgccccacccacactaagccccagaatacggtccctcttcaccttctgaggcccacgatagaccagctgtagctcattccagcctgtaccttggatgaggggtagcctcccactgcatcccatcctgaatatcctttgcaactccccaagagtgcttatttaagtgttaatacttttaagagaactgcgacgattaattgtggatctccccctgcccattgcctgcttgaggggcaccactactccagcccagaaggaaaggggggcagctcagtggccccaagagggagctgatatcatgaggataacattggcgggaggggagttaactggcaggcatggcaaggttgcatatgtaataaagtacaagctgttaaaaaa

SEQ ID NO: 457584 - DNA, 4113 bp, Homo sapiens
gtgcatgtatctcctgctgcataattagcctaagaccaacattgccccagtgcagtggctcatgcctgtaatccctacactttgttcggttgagcggagatctccgctcaaccggccaggattccaccacaaccaggcagcgaagaagtaggcagaacccccagtcgccccctcaggactccagtgtcacttcgaagcgaaatattaaaaagggagccgttccccgctctatccccaatctagcggaggtaaagaagaaaggcaaaatgaagaagctcggccaagcaatggaagaagacctaatcgtgggactgcaagggatggatctgaaccttgaggctgaagcactggctggcactggcttggtgttggatgagcagttaaatgaattccattgcctctgggatgacagcttcccggaaggccctgagcggctccatgccatcaaggagcaactgatccaggagggcctcctagatcgctgcgtgtcctttcaggcccggtttgctgaaaaggaagagctgatgttggttcacagcctagaatatattgatctgatggaaacaacccagtacatgaatgagggagaactccgtgtcctagcagacacctacgactcagtttatctgcatccgaactcatactcctgtgcctgcctggcctcaggctctgtcctcaggctggtggatgcggtcctgggggctgagatccggaatggcatggccatcattaggcctcctggacatcacgcccagcacagtcttatggatggctattgcatgttcaaccacgtggctgtggcagcccgctatgctcaacagaaacaccgcatccggagggtccttatcgtagattgggatgtgcaccacggtcaaggaacacagttcaccttcgaccaggaccccagtgtcctctatttctccatccaccgctacgagcagggtaggttctggccccacctgaaggcctctaactggtccaccacaggtttcggccaaggccaaggatataccatcaatgtgccttggaaccaggtggggatgcgggatgctgactacattgctgctttcctgcacgtcctgctgccagtcgccctcgagttccagcctcagctggtcctggtggctgctggatttgatgccctgcaaggggaccccaagggtgagatggccgccactccggcagggttcgcccagctaacccacctgctcatgggtctggcaggaggcaagctgatcctgtctctggagggtggctacaacctccgcgccctggctgaaggcgtcagtgcttcgctccacacccttctgggagacccttgccccatgctggagtcacctggtgccccctgccggagtgcccaggcttcagtttcctgtgctctggaagcccttgagcccttctgggaggttcttgtgagatcaactgagaccgtggagagggacaacatggaggaggacaatgtagaggagagcgaggaggaaggaccctgggagccccctgtgctcccaatcctgacatggccagtgctacagtctcgcacagggctggtctatgaccaaaatatgatgaatcactgcaacttgtgggacagccaccaccctgaggtaccccagcgcatcttgcggatcatgtgccgtctggaggagctgggccttgccgggcgctgcctcaccctgacaccgcgccctgccacagaggctgagctgctcacctgtcacagtgctgagtacgtgggtcatctccgggccacagagaaaatgaaaacccgggagctgcaccgtgagagttccaactttgactccatctatatctgccccagtaccttcgcctgtgcacagcttgccactggcgctgcctgccgcctggtggaggctgtgctctcaggagaggttctgaatggtgctgctgtggtgcgtcccccaggacaccacgcagagcaggatgcagcttgcggtttttgctttttcaactctgtggctgtggctgctcgccatgcccagactatcagtgggcatgccctacggatcctgattgtggattgggatgtccaccacggtaatggaactcagcacatgtttgaggatgaccccagtgtgctatatgtgtccctgcaccgctatgatcatggcaccttcttccccatgggggatgagggtgccagcagccagatcggccgggctgcgggcacaggcttcaccgtcaacgtggcatggaacgggccccgcatgggtgatgctgactacctagctgcctggcatcgcctggtgcttcccattgcctacgagtttaacccagaactggtgctggtctcagctggctttgatgctgcacggggggatccgctggggggctgccaggtgtcacctgagggttatgcccacctcacccacctgctgatgggccttgccagtggccgcattatccttatcctagagggtggctataacctgacatccatctcagagtccatggctgcctgcactcgctccctccttggagacccaccacccctgctgaccctgccacggcccccactatcaggggccctggcctcaatcactgagaccatccaagtccatcgcagatactggcgcagcttacgggtcatgaaggtagaagacagagaaggaccctccagttctaagttggtcaccaagaaggcaccccaaccagccaaacctaggttagctgagcggatgaccacacgagaaaagaaggttctggaagcaggcatggggaaagtcacctcggcatcatttggggaagagtccactccaggccagactaactcagagacagctgtggtggccctcactcaggaccagccctcagaggcagccacagggggagccactctggcccagaccatttctgaggcagccattgggggagccatgctgggccagaccacctcagaggaggctgtcgggggagccactccggaccagaccacctcagaggagactgtgggaggagccattctggaccagaccacctcagaggatgctgttgggggagccacgctgggccagactacctcagaggaggctgtaggaggagctacactggcccagaccacctcggaggcagccatggagggagccacactggaccagactacgtcagaggaggctccagggggcaccgagctgatccaaactcctctagcctcgagcacagaccaccagacccccccaacctcacctgtgcagggaactacaccccagatatctcccagtacactgattgggagtctcaggaccttggagctaggcagcgaatctcagggggcctcagaatctcaggccccaggagaggagaacctactaggagaggcagctggaggtcaggacatggctgattcgatgctgatgcagggatctaggggcctcactgatcaggccatattttatgctgtgacaccactgccctggtgtccccatttggtggcagtatgccccatacctgcagcaggcctagacgtgacccaaccttgtggggactgtggaacaatccaagagaattgggtgtgtctctcttgctatcaggtctactgtggtcgttacatcaatggccacatgctccaacaccatggaaattctggacacccgctggtcctcagctacatcgacctgtcagcctggtgttactactgtcaggcctatgtccaccaccaggctctcctagatgtgaagaacatcgcccaccagaacaagtttggggaggatatgccccacccacactaagccccagaatacggtccctcttcaccttctgaggcccacgatagaccagctgtagctcattccagcctgtaccttggatgaggggtagcctcccactgcatcccatcctgaatatcctttgcaactccccaagagtgcttatttaagtgttaatacttttaagagaactgcgacgattaattgtggatctccccctgcccattgcctgcttgaggggcaccactactccagcccagaaggaaaggggggcagctcagtggccccaagagggagctgatatcatgaggataacattggcgggaggggagttaactggcaggcatggcaaggttgcatatgtaataaagtacaagctgttaaaaaa

SEQ ID NO: 457585 - DNA, 4708 bp, Homo sapiens
gggcagggggtggagctggttgaaggaacggggcagtcccctgaggagcggggctggttgaaacgctaggggcgggatctggcggagtggaagaagcgaaatattaaaaagggagccgttccccgctctatccccaatctagcggaggtaaagaagaaaggcaaaatgaagaagctcggccaagcaatggaagaagacctaatcgtgggactgcaagggatggatctgaaccttgaggctgaagcactggctggcactggcttggtgttggatgagcagttaaatgaattccattgcctctgggatgacagcttcccggaaggccctgagcggctccatgccatcaaggagcaactgatccaggagggcctcctagatcgctgcgtgtcctttcaggcccggtttgctgaaaaggaagagctgatgttggttcacaggtgaaggcttgggagccttgtagggatggggaggagcctgccctggacaaaccagggcaagctaaacgctttgggaagcaatgtcatggtctctgcagccagccttgggcaagtcgctgagcctttctgaatctgtgtcatcgcctgtaacaaggggaccagtaaacataagttcctcaggagagtttgatgtgtgtcaggtgcttagaacagggcctgatatataatcagcccatgatgagctattactgttatcatgatctgattgtgtgaatagatggtggatgtgtggacagagtgatcggggttcccccaggggcttccagatttagaggcctagtgctatgtggcttgaggaaagctagcttccagagcaggtatctgagctgaactttaagaggagaaaaagagtgagtcagatgaagagggtgactgagggaagggaagaacagacagctgaaccagtgtggccaaaggcctgaaagtaggatttggtgtggctactgcaggggagcagagaacattacctgaactgaggcgggctagggaagaaacagaatgtgtcttatatcctggctattccttcaggttgacagttgggggagccaagccctaatttgaccagggggttggtgtatggacagctcagttggggaagagacagggccctgaatctcatctcccatctgtgtctagcctagaatatattgatctgatggaaacaacccagtacatgaatgagggagaactccgtgtcctagcagacacctacgactcagtttatctgcatccgaactcatactcctgtgcctgcctggcctcaggctctgtcctcaggctggtggatgcggtcctgggggctgagatccggaatggcatggccatcattaggcctcctggacatcacgcccagcacagtcttatggatggctattgcatgttcaaccacgtggctgtggcagcccgctatgctcaacagaaacaccgcatccggagggtccttatcgtagattgggatgtgcaccacggtcaaggaacacagttcaccttcgaccaggaccccagtgtcctctatttctccatccaccgctacgagcagggtaggttctggccccacctgaaggcctctaactggtccaccacaggtttcggccaaggccaaggatataccatcaatgtgccttggaaccaggtggggatgcgggatgctgactacattgctgctttcctgcacgtcctgctgccagtcgccctcgagttccagcctcagctggtcctggtggctgctggatttgatgccctgcaaggggaccccaagggtgagatggccgccactccggcagggttcgcccagctaacccacctgctcatgggtctggcaggaggcaagctgatcctgtctctggagggtggctacaacctccgcgccctggctgaaggcgtcagtgcttcgctccacacccttctgggagacccttgccccatgctggagtcacctggtgccccctgccggagtgcccaggcttcagtttcctgtgctctggaagcccttgagcccttctgggaggttcttgtgagatcaactgagaccgtggagagggacaacatggaggaggacaatgtagaggagagcgaggaggaaggaccctgggagccccctgtgctcccaatcctgacatggccagtgctacagtctcgcacagggctggtctatgaccaaaatatgatgaatcactgcaacttgtgggacagccaccaccctgaggtaccccagcgcatcttgcggatcatgtgccgtctggaggagctgggccttgccgggcgctgcctcaccctgacaccgcgccctgccacagaggctgagctgctcacctgtcacagtgctgagtacgtgggtcatctccgggccacagagaaaatgaaaacccgggagctgcaccgtgagagttccaactttgactccatctatatctgccccagtaccttcgcctgtgcacagcttgccactggcgctgcctgccgcctggtggaggctgtgctctcaggagaggttctgaatggtgctgctgtggtgcgtcccccaggacaccacgcagagcaggatgcagcttgcggtttttgctttttcaactctgtggctgtggctgctcgccatgcccagactatcagtgggcatgccctacggatcctgattgtggattgggatgtccaccacggtaatggaactcagcacatgtttgaggatgaccccagtgtgctatatgtgtccctgcaccgctatgatcatggcaccttcttccccatgggggatgagggtgccagcagccagatcggccgggctgcgggcacaggcttcaccgtcaacgtggcatggaacgggccccgcatgggtgatgctgactacctagctgcctggcatcgcctggtgcttcccattgcctacgagtttaacccagaactggtgctggtctcagctggctttgatgctgcacggggggatccgctggggggctgccaggtgtcacctgagggttatgcccacctcacccacctgctgatgggccttgccagtggccgcattatccttatcctagagggtggctataacctgacatccatctcagagtccatggctgcctgcactcgctccctccttggagacccaccacccctgctgaccctgccacggcccccactatcaggggccctggcctcaatcactgagaccatccaagtccatcgcagatactggcgcagcttacgggtcatgaaggtagaagacagagaaggaccctccagttctaagttggtcaccaagaaggcaccccaaccagccaaacctaggttagctgagcggatgaccacacgagaaaagaaggttctggaagcaggcatggggaaagtcacctcggcatcatttggggaagagtccactccaggccagactaactcagagacagctgtggtggccctcactcaggaccagccctcagaggcagccacagggggagccactctggcccagaccatttctgaggcagccattgggggagccatgctgggccagaccacctcagaggaggctgtcgggggagccactccggaccagaccacctcagaggagactgtgggaggagccattctggaccagaccacctcagaggatgctgttgggggagccacgctgggccagactacctcagaggaggctgtaggaggagctacactggcccagaccacctcggaggcagccatggagggagccacactggaccagactacgtcagaggaggctccagggggcaccgagctgatccaaactcctctagcctcgagcacagaccaccagacccccccaacctcacctgtgcagggaactacaccccagatatctcccagtacactgattgggagtctcaggaccttggagctaggcagcgaatctcagggggcctcagaatctcaggccccaggagaggagaacctactaggagaggcagctggaggtcaggacatggctgattcgatgctgatgcagggatctaggggcctcactgatcaggccatattttatgctgtgacaccactgccctggtgtccccatttggtggcagtatgccccatacctgcagcaggcctagacgtgacccaaccttgtggggactgtggaacaatccaagagaattgggtgtgtctctcttgctatcaggtctactgtggtcgttacatcaatggccacatgctccaacaccatggaaattctggacacccgctggtcctcagctacatcgacctgtcagcctggtgttactactgtcaggcctatgtccaccaccaggctctcctagatgtgaagaacatcgcccaccagaacaagtttggggaggatatgccccacccacactaagccccagaatacggtccctcttcaccttctgaggcccacgatagaccagctgtagctcattccagcctgtaccttggatgaggggtagcctcccactgcatcccatcctgaatatcctttgcaactccccaagagtgcttatttaagtgttaatacttttaagagaactgcgacgattaattgtggatctccccctgcccattgcctgcttgaggggcaccactactccagcccagaaggaaaggggggcagctcagtggccccaagagggagctgatatcatgaggataacattggcgggaggggagttaactggcaggcatggcaaggttgcatatgtaataaagtacaagctgttaaaaaa

SEQ ID NO: 457586 - DNA, 4139 bp, Homo sapiens
  misc_feature (4057)..(4058): n is a, c, g, or t
  misc_feature (4061)..(4064): n is a, c, g, or t
  misc_feature (4076)..(4076): n is a, c, g, or t
  misc_feature (4126)..(4126): n is a, c, g, or t
gggcagggggtggagctggttgaaggaacggggcagtcccctgaggagcggggctggttgaaacgctaggggcgggatctggcggagtggaaggtaccggtccggcccgataaggggtggagttaagtgaatcgttaagggtggagtcgaaaccggggtcggggccggggccggctgagtgaaaggaaccgcggcaggggccaagcctcctcaactatgacctcaaccggccaggattccaccacaaccaggcagcgaagaagtaggcagaacccccagtcgccccctcaggactccagtgtcacttcgaagcgaaatattaaaaagggagccgttccccgctctatccccaatctagcggaggtaaagaagaaaggcaaaatgaagaagctcggccaagcaatggaagaagacctaatcgtgggactgcaagggatggatctgaaccttgaggctgaagcactggctggcactggcttggtgttggatgagcagttaaatgaattccattgcctctgggatgacagcttcccggaaggccctgagcggctccatgccatcaaggagcaactgatccaggagggcctcctagatcgctgcgtgtcctttcaggcccggtttgctgaaaaggaagagctgatgttggttcacagcctagaatatattgatctgatggaaacaacccagtacatgaatgagggagaactccgtgtcctagcagacacctacgactcagtttatctgcatccgaactcatactcctgtgcctgcctggcctcaggctctgtcctcaggctggtggatgcggtcctgggggctgagatccggaatggcatggccatcattaggcctcctggacatcacgcccagcacagtcttatggatggctattgcatgttcaaccacgtggctgtggcagcccgctatgctcaacagaaacaccgcatccggagggtccttatcgtagattgggatgtgcaccacggtcaaggaacacagttcaccttcgaccaggaccccagtgtcctctatttctccatccaccgctacgagcagggtaggttctggccccacctgaaggcctctaactggtccaccacaggtttcggccaaggccaaggatataccatcaatgtgccttggaaccaggtggggatgcgggatgctgactacattgctgctttcctgcacgtcctgctgccagtcgccctcgagttccagcctcagctggtcctggtggctgctggatttgatgccctgcaaggggaccccaagggtgagatggccgccactccggcagggttcgcccagctaacccacctgctcatgggtctggcaggaggcaagctgatcctgtctctggagggtggctacaacctccgcgccctggctgaaggcgtcagtgcttcgctccacacccttctgggagacccttgccccatgctggagtcacctggtgccccctgccggagtgcccaggcttcagtttcctgtgctctggaagcccttgagcccttctgggaggttcttgtgagatcaactgagaccgtggagagggacaacatggaggaggacaatgtagaggagagcgaggaggaaggaccctgggagccccctgtgctcccaatcctgacatggccagtgctacagtctcgcacagggctggtctatgaccaaaatatgatgaatcactgcaacttgtgggacagccaccaccctgaggtaccccagcgcatcttgcggatcatgtgccgtctggaggagctgggccttgccgggcgctgcctcaccctgacaccgcgccctgccacagaggctgagctgctcacctgtcacagtgctgagtacgtgggtcatctccgggccacagagaaaatgaaaacccgggagctgcaccgtgagagttccaactttgactccatctatatctgccccagtaccttcgcctgtgcacagcttgccactggcgctgcctgccgcctggtggaggctgtgctctcaggagaggttctgaatggtgctgctgtggtgcgtcccccaggacaccacgcagagcaggatgcagcttgcggtttttgctttttcaactctgtggctgtggctgctcgccatgcccagactatcagtgggcatgccctacggatcctgattgtggattgggatgtccaccacggtaatggaactcagcacatgtttgaggatgaccccagtgtgctatatgtgtccctgcaccgctatgatcatggcaccttcttccccatgggggatgagggtgccagcagccagatcggccgggctgcgggcacaggcttcaccgtcaacgtggcatggaacgggccccgcatgggtgatgctgactacctagctgcctggcatcgcctggtgcttcccattgcctacgagtttaacccagaactggtgctggtctcagctggctttgatgctgcacggggggatccgctggggggctgccaggtgtcacctgagggttatgcccacctcacccacctgctgatgggccttgccagtggccgcattatccttatcctagagggtggctataacctgacatccatctcagagtccatggctgcctgcactcgctccctccttggagacccaccacccctgctgaccctgccacggcccccactatcaggggccctggcctcaatcactgagaccatccaagtccatcgcagatactggcgcagcttacgggtcatgaaggtagaagacagagaaggaccctccagttctaagttggtcaccaagaaggcaccccaaccagccaaacctaggttagctgagcggatgaccacacgagaaaagaaggttctggaagcaggcatggggaaagtcacctcggcatcatttggggaagagtccactccaggccagactaactcagagacagctgtggtggccctcactcaggaccagccctcagaggcagccacagggggagccactctggcccagaccatttctgaggcagccattgggggagccatgctgggccagaccacctcagaggaggctgtcgggggagccactccggaccagaccacctcagaggagactgtgggaggagccattctggaccagaccacctcagaggatgctgttgggggagccacgctgggccagactacctcagaggaggctgtaggaggagctacactggcccagaccacctcggaggcagccatggagggagccacactggaccagactacgtcagaggaggctccagggggcaccgagctgatccaaactcctctagcctcgagcacagaccaccagacccccccaacctcacctgtgcagggaactacaccccagatatctcccagtacactgattgggagtctcaggaccttggagctaggcagcgaatctcagggggcctcagaatctcaggccccaggagaggagaacctactaggagaggcagctggaggtcaggacatggctgattcgatgctgatgcagggatctaggggcctcactgatcaggccatattttatgctgtgacaccactgccctggtgtccccatttggtggcagtatgccccatacctgcagcaggcctagacgtgacccaaccttgtggggactgtggaacaatccaagagaattgggtgtgtctctcttgctatcaggtctactgtggtcgttacatcaatggccacatgctccaacaccatggaaattctggacacccgctggtcctcagctacatcgacctgtcagcctggtgttactactgtcaggcctatgtccaccaccaggctctcctagatgtgaagaacatcgcccaccagaacaagtttggggaggatatgccccacccacactaagccccagaatacggtccctcttcaccttctgaggcccacgatagaccagctgtagctcattccagcctgtaccttggatgaggggtagcctcccactgcatcccatcctgaatatcctttgcaactccccaagagtgcttatttaagtgttaatacttttaagagaactgcgacgattaattgtggatctccnnaannnnatttcctttttnaggtgcttttttttttcttttttttttttttttttttttttttttttctnttttttggttctt

SEQ ID NO: 457587 - DNA, 4112 bp, Homo sapiens
gggcagggggtggagctggttgaaggaacggggcagtcccctgaggagcggggctggttgaaacgctaggggcgggatctggcggagtggaaggtaccggtccggcccgataaggggtggagttaagtgaatcgttaagggtggagtcgaaaccggggtcggggccggggccggctgagtgaaaggaaccgcggcaggggccaagcctcctcaactatgacctcaaccggccaggattccaccacaaccaggcagcgaagaagtaggcagaacccccagtcgccccctcaggactccagtgtcacttcgaagcgaaatattaaaaagggagccgttccccgctctatccccaatctagcggaggtaaagaagaaaggcaaaatgaagaagctcggccaagcaatggaagaagacctaatcgtgggactgcaagggatggatctgaaccttgaggctgaagcactggctggcactggcttggtgttggatgagcagttaaatgaattccattgcctctgggatgacagcttcccggaaggccctgagcggctccatgccatcaaggagcaactgatccaggagggcctcctagatcgctgcgtgtcctttcaggcccggtttgctgaaaaggaagagctgatgttggttcacagcctagaatatattgatctgatggaaacaacccagtacatgaatgagggagaactccgtgtcctagcagacacctacgactcagtttatctgcatccgaactcatactcctgtgcctgcctggcctcaggctctgtcctcaggctggtggatgcggtcctgggggctgagatccggaatggcatggccatcattaggcctcctggacatcacgcccagcacagtcttatggatggctattgcatgttcaaccacgtggctgtggcagcccgctatgctcaacagaaacaccgcatccggagggtccttatcgtagattgggatgtgcaccacggtcaaggaacacagttcaccttcgaccaggaccccagtgtcctctatttctccatccaccgctacgagcagggtaggttctggccccacctgaaggcctctaactggtccaccacaggtttcggccaaggccaaggatataccatcaatgtgccttggaaccaggtggggatgcgggatgctgactacattgctgctttcctgcacgtcctgctgccagtcgccctcgagttccagcctcagctggtcctggtggctgctggatttgatgccctgcaaggggaccccaagggtgagatggccgccactccggcagggttcgcccagctaacccacctgctcatgggtctggcaggaggcaagctgatcctgtctctggagggtggctacaacctccgcgccctggctgaaggcgtcagtgcttcgctccacacccttctgggagacccttgccccatgctggagtcacctggtgccccctgccggagtgcccaggcttcagtttcctgtgctctggaagcccttgagcccttctgggaggttcttgtgagatcaactgagaccgtggagagggacaacatggaggaggacaatgtagaggagagcgaggaggaaggaccctgggagccccctgtgctcccaatcctgacatggccagtgctacagtctcgcacagggctggtctatgaccaaaatatgatgaatcactgcaacttgtgggacagccaccaccctgaggtaccccagcgcatcttgcggatcatgtgccgtctggaggagctgggccttgccgggcgctgcctcaccctgacaccgcgccctgccacagaggctgagctgctcacctgtcacagtgctgagtacgtgggtcatctccgggccacagagaaaatgaaaacccgggagctgcaccgtgagagttccaactttgactccatctatatctgccccagtaccttcgcctgtgcacagcttgccactggcgctgcctgccgcctggtggaggctgtgctctcaggagaggttctgaatggtgctgctgtggtgcgtcccccaggacaccacgcagagcaggatgcagcttgcggtttttgctttttcaactctgtggctgtggctgctcgccatgcccagactatcagtgggcatgccctacggatcctgattgtggattgggatgtccaccacggtaatggaactcagcacatgtttgaggatgaccccagtgtgctatatgtgtccctgcaccgctatgatcatggcaccttcttccccatgggggatgagggtgccagcagccagatcggccgggctgcgggcacaggcttcaccgtcaacgtggcatggaacgggccccgcatgggtgatgctgactacctagctgcctggcatcgcctggtgcttcccattgcctacgagtttaacccagaactggtgctggtctcagctggctttgatgctgcacggggggatccgctggggggctgccaggtgtcacctgagggttatgcccacctcacccacctgctgatgggccttgccagtggccgcattatccttatcctagagggtggctataacctgacatccatctcagagtccatggctgcctgcactcgctccctccttggagacccaccacccctgctgaccctgccacggcccccactatcaggggccctggcctcaatcactgagaccatccaagtccatcgcagatactggcgcagcttacgggtcatgaaggtagaagacagagaaggaccctccagttctaagttggtcaccaagaaggcaccccaaccagccaaacctaggttagctgagcggatgaccacacgagaaaagaaggttctggaagcaggcatggggaaagtcacctcggcatcatttggggaagagtccactccaggccagactaactcagagacagctgtggtggccctcactcaggaccagccctcagaggcagccacagggggagccactctggcccagaccatttctgaggcagccattgggggagccatgctgggccagaccacctcagaggaggctgtcgggggagccactccggaccagaccacctcagaggagactgtgggaggagccattctggaccagaccacctcagaggatgctgttgggggagccacgctgggccagactacctcagaggaggctgtaggaggagctacactggcccagaccacctcggaggcagccatggagggagccacactggaccagactacgtcagaggaggctccagggggcaccgagctgatccaaactcctctagcctcgagcacagaccaccagacccccccaacctcacctgtgcagggaactacaccccagatatctcccagtacactgattgggagtctcaggaccttggagctaggcagcgaatctcagggggcctcagaatctcaggccccaggagaggagaacctactaggagaggcagctggaggtcaggacatggctgattcgatgctgatgcagggatctaggggcctcactgatcaggccatattttatgctgtgacaccactgccctggtgtccccatttggtggcagtatgccccatacctgcagcaggcctagacgtgacccaaccttgtggggactgtggaacaatccaagagaattgggtgtgtctctcttgctatcaggtctactgtggtcgttacatcaatggccacatgctccaacaccatggaaattctggacacccgctggtcctcagctacatcgacctgtcagcctggtgttactactgtcaggcctatgtccaccaccaggctctcctagatgtgaagaacatcgcccaccagaacaagtttggggaggatatgccccacccacactaagccccagaatacggtccctcttcaccttctgaggcccacgatagaccagctgtagctcattccagcctgtaccttggatgaggggtagcctcccactgcatcccatcctgaatatcctttgcaactccccaagagtctcagtggccccaagagggagctgatatcatgaggataacattggcgggaggggagttaactggcaggcatggcaaggttgcatatgtaataaagtacaagctgttaaaaaa

SEQ ID NO: 457588 - DNA, 3153 bp, Homo sapiens
gggcagggggtggagctggttgaaggaacggggcagtcccctgaggagcggggctggttgaaacgctaggggcgggatctggcggagtggaaggtaccggtccggcccgataaggggtggagttaagtgaatcgttaagggtggagtcgaaaccggggtcggggccggggccggctgagtgaaaggaaccgcggcaggggccaagcctcctcaactatgacctcaaccggccaggattccaccacaaccaggcagcgaagaagtaggcagaacccccagtcgccccctcaggactccagtgtcacttcgaagcgaaatattaaaaagggagccgttccccgctctatccccaatctagcggaggtaaagaagaaaggcaaaatgaagaagctcggccaagcaatggaagaagacctaatcgtgggactgcaagggatggatctgaaccttgaggctgaagcactggctggcactggcttggtgttggatgagcagttaaatgaattccattgcctctgggatgacagcttcccggaaggccctgagcggctccatgccatcaaggagcaactgatccaggagggcctcctagatcgctgcgtgtcctttcaggcccggtttgctgaaaaggaagagctgatgttggttcacagcctagaatatattgatctgatggaaacaacccagtacatgaatgagggagaactccgtgtcctagcagacacctacgactcagtttatctgcatccgaactcatactcctgtgcctgcctggcctcaggctctgtcctcaggctggtggatgcggtcctgggggctgagatccggaatggcatggccatcattaggcctcctggacatcacgcccagcacagtcttatggatggctattgcatgttcaaccacgtggctgtggcagcccgctatgctcaacagaaacaccgcatccggagggtccttatcgtagattgggatgtgcaccacggtcaaggaacacagttcaccttcgaccaggaccccagtgtcctctatttctccatccaccgctacgagcagggtaggttctggccccacctgaaggcctctaactggtccaccacaggtttcggccaaggccaaggatataccatcaatgtgccttggaaccaggtggggatgcgggatgctgactacattgctgctttcctgcacgtcctgctgccagtcgccctcgagttccagcctcagctggtcctggtggctgctggatttgatgccctgcaaggggaccccaagggtgagatggccgccactccggcagggttcgcccagctaacccacctgctcatgggtctggcaggaggcaagctgatcctgtctctggagggtggctacaacctccgcgccctggctgaaggcgtcagtgcttcgctccacacccttctgggagacccttgccccatgctggagtcacctggtgccccctgccggagtgcccaggcttcagtttcctgtgctctggaagcccttgagcccttctgggaggttcttgtgagatcaactgagaccgtggagagggacaacatggaggaggacaatgtagaggagagcgaggaggaaggaccctgggagccccctgtgctcccaatcctgacatggccagtgctacagtctcgcacagggctggtctatgaccaaaatatgatgaatcactgcaacttgtgggacagccaccaccctgaggtaccccagcgcatcttgcggatcatgtgccgtctggaggagctgggccttgccgggcgctgcctcaccctgacaccgcgccctgccacagaggctgagctgctcacctgtcacagtgctgagtacgtgggtcatctccgggccacagagaaaatgaaaacccgggagctgcaccgtgagagttccaactttgactccatctatatctgccccagtaccttcgcctgtgcacagcttgccactggcgctgcctgccgcctggtggaggctgtgctctcaggagaggttctgaatggtgctgctgtggtgcgtcccccaggacaccacgcagagcaggatgcagcttgcggtttttgctttttcaactctgtggctgtggctgctcgccatgcccagactatcagtgggcatgccctacgggagccacactggaccagactacgtcagaggaggctccagggggcaccgagctgatccaaactcctctagcctcgagcacagaccaccagacccccccaacctcacctgtgcagggaactacaccccagatatctcccagtacactgattgggagtctcaggaccttggagctaggcagcgaatctcagggggcctcagaatctcaggccccaggagaggagaacctactaggagaggcagctggaggtcaggacatggctgattcgatgctgatgcagggatctaggggcctcactgatcaggccatattttatgctgtgacaccactgccctggtgtccccatttggtggcagtatgccccatacctgcagcaggcctagacgtgacccaaccttgtggggactgtggaacaatccaagagaattgggtgtgtctctcttgctatcaggtctactgtggtcgttacatcaatggccacatgctccaacaccatggaaattctggacacccgctggtcctcagctacatcgacctgtcagcctggtgttactactgtcaggcctatgtccaccaccaggctctcctagatgtgaagaacatcgcccaccagaacaagtttggggaggatatgccccacccacactaagccccagaatacggtccctcttcaccttctgaggcccacgatagaccagctgtagctcattccagcctgtaccttggatgaggggtagcctcccactgcatcccatcctgaatatcctttgcaactccccaagagtgcttatttaagtgttaatacttttaagagaactgcgacgattaattgtggatctccccctgcccattgcctgcttgaggggcaccactactccagcccagaaggaaaggggggcagctcagtggccccaagagggagctgatatcatgaggataacattggcgggaggggagttaactggcaggcatggcaaggttgcatatgtaataaagtacaagctgttaaaaaa

SEQ ID NO: 457589 - DNA, 2963 bp, Homo sapiens
gggcagggggtggagctggttgaaggaacggggcagtcccctgaggagcggggctggttgaaacgctaggggcgggatctggcggagtggaaggtaccggtccggcccgataaggggtggagttaagtgaatcgttaagggtggagtcgaaaccggggtcggggccggggccggctgagtgaaaggaaccgcggcaggggccaagcctcctcaactatgacctcaaccggccaggattccaccacaaccaggcagcgaagaagtaggcagaacccccagtcgccccctcaggactccagtgtcacttcgaagcgaaatattaaaaagggagccgttccccgctctatccccaatctagcggaggtaaagaagaaaggcaaaatgaagaagctcggccaagcaatggaagaagacctaatcgtgggactgcaagggatggatctgaaccttgaggctgaagcactggctggcactggcttggtgttggatgagcagttaaatgaattccattgcctctgggatgacagcttcccggaaggccctgagcggctccatgccatcaaggagcaactgatccaggagggcctcctagatcgctgcgtgtcctttcaggcccggtttgctgaaaaggaagagctgatgttggttcacagcctagaatatattgatctgatggaaacaacccagtacatgaatgagggagaactccgtgtcctagcagacacctacgactcagtttatctgcatccgaactcatactcctgtgcctgcctggcctcaggctctgtcctcaggctggtggatgcggtcctgggggctgagatccggaatggcatggccatcattaggcctcctggacatcacgcccagcacagtcttatggatggctattgcatgttcaaccacgtggctgtggcagcccgctatgctcaacagaaacaccgcatccggagggtccttatcgtagattgggatgtgcaccacggtcaaggaacacagttcaccttcgaccaggaccccagtgtcctctatttctccatccaccgctacgagcagggtaggttctggccccacctgaaggcctctaactggtccaccacaggtttcggccaaggccaaggatataccatcaatgtgccttggaaccaggtggggatgcgggatgctgactacattgctgctttcctgcacgtcctgctgccagtcgccctcgagttccagcctcagctggtcctggtggctgctggatttgatgccctgcaaggggaccccaagggtgagatggccgccactccggcagggttcgcccagctaacccacctgctcatgggtctggcaggaggcaagctgatcctgtctctggagggtggctacaacctccgcgccctggctgaaggcgtcagtgcttcgctccacacccttctgggagacccttgccccatgctggagtcacctggtgccccctgccggagtgcccaggcttcagtttcctgtgctctggaagcccttgagcccttctgggaggttcttgtgagatcaactgagaccgtggagagggacaacatggaggaggacaatgtagaggagagcgaggaggaaggaccctgggagccccctgtgctcccaatcctgacatggccagtgctacagtctcgcacagggctggtctatgaccaaaatatgatgaatcactgcaacttgtgggacagccaccaccctgaggtaccccagcgcatcttgcggatcatgtgccgtctggaggagctgggccttgccgggcgctgcctcaccctgacaccgcgccctgccacagaggctgagctgctcacctgtcacagtgctgagtacgtgggtcatctccgggccacagagaaaatgaaaacccgggagctgcaccgtgagagttccaactttgactccatctatatctgccccagtaccttcgcctgtgcacagcttgccactggcgctgcctgccgcctggtggaggctgtgctctcaggagaggttctgaatggtgctgctgtggtgcgtcccccaggacaccacgcagagcaggatgcagcttgcggtttttgctttttcaactctgtggctgtggctgctcgccatgcccagactatcagtgggcatgccctacggatcctgattgtggattgggatgtccaccacggtaatggaactcagcacatgtttgaggatgaccccagtgtgctatatgtgtccctgcaccgctatgatcatggcaccttcttccccatgggggatgagggtgccagcagccagatcggccgggctgcgggcacaggcttcaccgtcaacgtggcatggaacgggccccgcatgggtgatgctgactacctagctgcctggcatcgcctggtgcttcccattgcctacgagtttaacccagaactggtgctggtctcagctggctttgatgctgcacggggggatccgctggggggctgccaggtgtcacctgagggttatgcccacctcacccacctgctgatgggccttgccagtggccgcattatccttatcctagagggtggctataacctgacatccatctcagagtccatggctgcctgcactcgctccctccttggagacccaccacccctgctgaccctgccacggcccccactatcaggggccctggcctcaatcactgagaccatccaagtccatcgcagatactggcgcagcttacgggtcatgaaggtagaagacagagaaggaccctccagttctaagttggtcaccaagaaggcaccccaaccagccaaacctaggttagctgagcggatgaccactactccagcccagaaggaaaggggggcagctcagtggccccaagagggagctgatatcatgaggataacattggcgggaggggagttaactggcaggcatggcaaggttgcatatgtaataaagtacaagctgttaaaaaa

SEQ ID NO: 457590 - DNA, 1978 bp, Homo sapiens
gggcagggggtggagctggttgaaggaacggggcagtcccctgaggagcggggctggttgaaacgctaggggcgggatctggcggagtggaaggtaccggtccggcccgataaggggtggagttaagtgaatcgttaagggtggagtcgaaaccggggtcggggccggggccggctgagtgaaagggtgggtgattatcccgggagataggccgaaagggcagaaccgcggcaggggccaagcctcctcaactatgacctcaaccggccaggattccaccacaaccaggcagcgaagaagtaggcagaacccccagtcgccccctcaggactccagtgtcacttcgaagcgaaatattaaaaagggagccgttccccgctctatccccaatctagcggaggtaaagaagaaaggcaaaatgaagaagctcggccaagcaatggaagaagacctaatcgtgggactgcaagggatggatctgaaccttgaggctgaagcactggctggcactggcttggtgttggatgagcagttaaatgaattccattgcctctgggatgacagcttcccggaaggccctgagcggctccatgccatcaaggagcaactgatccaggagggcctcctagatcgctgcgtgtcctttcaggcccggtttgctgaaaaggaagagctgatgttggttcacaggtgaaggcttgggagccttgtagggatggggaggagcctgccctggacaaaccagggcaagctaaacgctttgggaagcaatgtcatggtctctgcagccagccttgggcaagtcgctgagcctttctgaatctgtgtcatcgcctgtaacaaggggaccagtaaacataagttcctcaggagagtttgatgtgtgtcaggtgcttagaacagggcctgatatataatcagcccatgatgagctattactgttatcatgatctgattgtgtgaatagatggtggatgtgtggacagagtgatcggggttcccccaggggcttccagatttagaggcctagtgctatgtggcttgaggaaagctagcttccagagcaggtatctgagctgaactttaagaggagaaaaagagtgagtcagatgaagagggtgactgagggaagggaagaacagacagctgaaccagtgtggccaaaggcctgaaagtaggatttggtgtggctactgcaggggagcagagaacattacctgaactgaggcgggctagggaagaaacagaatgtgtcttatatcctggctattccttcaggttgacagttgggggagccaagccctaatttgaccagggggttggtgtatggacagctcagttggggaagagacagggccctgaatctcatctcccatctgtgtctagcctagaatatattgatctgatggaaacaacccagtacatgaatgagggagaactccgtgtcctagcagacacctacgactcagtttatctgcatccggtatggatgagaactctgcgggcagggaatggtggcaatcttggggtccccatccctatgcccaccccaccctgggggaagcagctgagtggatagggctgttctctcccttactccctttctggctccccactgtctctccagaactcatactcctgtgcctgcctggcctcaggctctgtcctcaggctggtggatgcggtcctgggggctgagatccggaatggcatggccatcattaggtaggactctacagcatttgactttttacattgttttaaagtccttccttcaagtgtaaaatgtattgatatgggtaatatattcatgtgattcaagaatccaaaggtaaaaaagagaatataattaaaaatctgtctcccatccttgtcacccagacacctgcctcctctcatgggaggtagtcattggaaccactgactcatgtgtcctcccacaaagtcttattcaagaaataaataccatatttcattg

SEQ ID NO: 457591 - DNA, 1008 bp, Homo sapiens
gggcagggggtggagctggttgaaggaacggggcagtcccctgaggagcggggctggttgaaacgctaggggcgggatctggcggagtggaagaaccgcggcaggggccaagcctcctcaactatgacctcaaccggccaggattccaccacaaccaggcagcgaagaagtaggcagaacccccagtcgccccctcaggactccagtgtcacttcgaagcgaaatattaaaaagggagccgttccccgctctatccccaatctagcggaggtaaagaagaaaggcaaaatgaagaagctcggccaagcaatggaagaagacctaatcgtgggactgcaagggatggatctgaaccttgaggctgaagcactggctggcactggcttggtgttggatgagcagttaaatgaattccattgcctctgggatgacagcttcccggaaggccctgagcggctccatgccatcaaggagcaactgatccaggagggcctcctagatcgctgcgtgtcctttcaggcccggtttgctgaaaaggaagagctgatgttggttcacagcctagaatatattgatctgatggaaacaacccagtacatgaatgagggagaactccgtgtcctagcagacacctacgactcagtttatctgcatccgaactcatactcctgtgcctgcctggcctcaggctctgtcctcaggctggtggatgcggtcctgggggctgagatccggaatggcatggccatcattaggtaggactctacagcatttgactttttacattgttttaaagtccttccttcaagtgtaaaatgtattgatatgggtaatatattcatgtgattcaagaatccaaaggtaaaaaagagaatataattaaaaatctgtctcccatccttgtcacccagacacctgcctcctctcatgggaggtagtcattggaaccactgactcatgtgtcctcccacaaagtcttattcaagaaataaataccatatttcattg

SEQ ID NO: 457592 - DNA, 401 bp, Homo sapiens
gggcagggggtggagctggttgaaggaacggggcagtcccctgaggagcggggctggttgaaacgctaggggcgggatctggcggagtggaaggtaccggtccggcccgataaggggtggagttaagtgaatcgttaagggtggagtcgaaaccggggtcggggccggggccggctgagtgaaagggtgggtgattatcccgggagataggccgaaagggcagaaccgcggcaggggccaagcctcctcaactatgacctcaaccggccaggattccaccacaaccaggcagcgaagaagtaggcagggttcgcccagctaacccacctgctcatgggtctggcaggaggcaagctgatcctgtctctggaggtgagtgactcaccttcgtccctcagcct

SEQ ID NO: 457593 - DNA, 358 bp, Homo sapiens
caatggccacatgctccaacaccatggaaattctggacacccgctggtcctcagctacatcgacctgtcagcctggtgttactactgtcaggcctatgtccaccaccaggtgggccctgggtagacccttcgacacgtgcacactcaccccccacacacacaccccttctgtgattgggtaaagggagaccacaggcccctctgcatggctgcctcatgtgattattttgcatggggcgggggctgtgggatagtccagaagacagagtggttgagggctggagtgggggcagccctgcagccgaggtagaggggtcctcactctctctcacctgccctattcttgcctcctcctcag

SEQ ID NO: 457594 - DNA, 358 bp, Homo sapiens
tgcatctatttcttctacctctgagtctgtatttcttttcttcccttcttcattttcagtctctgcttttgtgtctcctagtctccaggttctgtgtctccatctctctgacttgcatctccatgtcttcatttgtccttttctccatgtctctgggtcgccatcacttactgcctaccaaaagcccctaccctcatgcttatacatctcttctctccctgcctcagtttaacccagaactggtgctggtctcagctggctttgatgctgcacggggggatccgctggggggctgccaggtgtcacctgagggttatgcccacctcacccacctgctgatgggccttgccagtggccg

SEQ ID NO: 457595 - DNA, 4135 bp, Homo sapiens
gggcagggggtggagctggttgaaggaacggggcagtcccctgaggagcggggctggttgaaacgctaggggcgggatctggcggagtggaagaaccgcggcaggggccaagcctcctcaactatgacctcaaccggccaggattccaccacaaccaggcagcgaagaagtaggcagaacccccagtcgccccctcaggactccagtgtcacttcgaagcgaaatattaaaaagggagccgttccccgctctatccccaatctagcggaggtaaagaagaaaggcaaaatgaagaagctcggccaagcaatggaagaagacctaatcgtgggactgcaagggatggatctgaaccttgaggctgaagcactggctggcactggcttggtgttggatgagcagttaaatgaattccattgcctctgggatgacagcttcccggaaggccctgagcggctccatgccatcaaggagcaactgatccaggagggcctcctagatcgctgcgtgtcctttcaggcccggtttgctgaaaaggaagagctgatgttggttcacagcctagaatatattgatctgatggaaacaacccagtacatgaatgagggagaactccgtgtcctagcagacacctacgactcagtttatctgcatccgaactcatactcctgtgcctgcctggcctcaggctctgtcctcaggctggtggatgcggtcctgggggctgagatccggaatggcatggccatcattaggcctcctggacatcacgcccagcacagtcttatggatggctattgcatgttcaaccacgtggctgtggcagcccgctatgctcaacagaaacaccgcatccggagggtccttatcgtagattgggatgtgcaccacggtcaaggaacacagttcaccttcgaccaggaccccagtgtcctctatttctccatccaccgctacgagcagggtaggttctggccccacctgaaggcctctaactggtccaccacaggtttcggccaaggccaaggatataccatcaatgtgccttggaaccaggtggggatgcgggatgctgactacattgctgctttcctgcacgtcctgctgccagtcgccctcgagttccagcctcagctggtcctggtggctgctggatttgatgccctgcaaggggaccccaagggtgagatggccgccactccggcagggttcgcccagctaacccacctgctcatgggtctggcaggaggcaagctgatcctgtctctggagggtggctacaacctccgcgccctggctgaaggcgtcagtgcttcgctccacacccttctgggagacccttgccccatgctggagtcacctggtgccccctgccggagtgcccaggcttcagtttcctgtgctctggaagcccttgagcccttctgggaggttcttgtgagatcaactgagaccgtggagagggacaacatggaggaggacaatgtagaggagagcgaggaggaaggaccctgggagccccctgtgctcccaatcctgacatggccagtgctacagtctcgcacagggctggtctatgaccaaaatatgatgaatcactgcaacttgtgggacagccaccaccctgaggtaccccagcgcatcttgcggatcatgtgccgtctggaggagctgggccttgccgggcgctgcctcaccctgacaccgcgccctgccacagaggctgagctgctcacctgtcacagtgctgagtacgtgggtcatctccgggccacagagaaaatgaaaacccgggagctgcaccgtgagagttccaactttgactccatctatatctgccccagtaccttcgcctgtgcacagcttgccactggcgctgcctgccgcctggtggaggctgtgctctcaggagaggttctgaatggtgctgctgtggtgcgtcccccaggacaccacgcagagcaggatgcagcttgcggtttttgctttttcaactctgtggctgtggctgctcgccatgcccagactatcagtgggcatgccctacggatcctgattgtggattgggatgtccaccacggtaatggaactcagcacatgtttgaggatgaccccagtgtgctatatgtgtccctgcaccgctatgatcatggcaccttcttccccatgggggatgagggtgccagcagccagatcggccgggctgcgggcacaggcttcaccgtcaacgtggcatggaacgggccccgcatgggtgatgctgactacctagctgcctggcatcgcctggtgcttcccattgcctacgagtttaacccagaactggtgctggtctcagctggctttgatgctgcacggggggatccgctggggggctgccaggtgtcacctgagggttatgcccacctcacccacctgctgatgggccttgccagtggccgcattatccttatcctagagggtggctataacctgacatccatctcagagtccatggctgcctgcactcgctccctccttggagacccaccacccctgctgaccctgccacggcccccactatcaggggccctggcctcaatcactgagaccatccaagtccatcgcagatactggcgcagcttacgggtcatgaaggtagaagacagagaaggaccctccagttctaagttggtcaccaagaaggcaccccaaccagccaaacctaggttagctgagcggatgaccacacgagaaaagaaggttctggaagcaggcatggggaaagtcacctcggcatcatttggggaagagtccactccaggccagactaactcagagacagctgtggtggccctcactcaggaccagccctcagaggcagccacagggggagccactctggcccagaccatttctgaggcagccattgggggagccatgctgggccagaccacctcagaggaggctgtcgggggagccactccggaccagaccacctcagaggagactgtgggaggagccattctggaccagaccacctcagaggatgctgttgggggagccacgctgggccagactacctcagaggaggctgtaggaggagctacactggcccagaccacctcggaggcagccatggagggagccacactggaccagactacgtcagaggaggctccagggggcaccgagctgatccaaactcctctagcctcgagcacagaccaccagacccccccaacctcacctgtgcagggaactacaccccagatatctcccagtacactgattgggagtctcaggaccttggagctaggcagcgaatctcagggggcctcagaatctcaggccccaggagaggagaacctactaggagaggcagctggaggtcaggacatggctgattcgatgctgatgcagggatctaggggcctcactgatcaggccatattttatgctgtgacaccactgccctggtgtccccatttggtggcagtatgccccatacctgcagcaggcctagacgtgacccaaccttgtggggactgtggaacaatccaagagaattgggtgtgtctctcttgctatcaggtctactgtggtcgttacatcaatggccacatgctccaacaccatggaaattctggacacccgctggtcctcagctacatcgacctgtcagcctggtgttactactgtcaggcctatgtccaccaccaggctctcctagatgtgaagaacatcgcccaccagaacaagtttggggaggatatgccccacccacactaagccccagaatacggtccctcttcaccttctgaggcccacgatagaccagctgtagctcattccagcctgtaccttggatgaggggtagcctcccactgcatcccatcctgaatatcctttgcaactccccaagagtgcttatttaagtgttaatacttttaagagaactgcgacgattaattgtggatctccccctgcccattgcctgcttgaggggcaccactactccagcccagaaggaaaggggggcagctcagtggccccaagagggagctgatatcatgaggataacattggcgggaggggagttaactggcaggcatggcaaggttgcatatgtaataaagtacaagctgttaaaaaa

SEQ ID NO: 457596 - DNA, 743 bp, Homo sapiens
gggcagggggtggagctggttgaaggaacggggcagtcccctgaggagcggggctggttgaaacgctaggggcgggatctggcggagtggaagaaccgcggcaggggccaagcctcctcaactatgacctcaaccggccaggattccaccacaaccaggcagcgaagaagtaggcagaacccccagtcgccccctcaggactccagtgtcacttcgaagcgaaatattaaaaagggagccgttccccgctctatccccaatctagcggaggtaaagaagaaaggcaaaatgaagaagctcggccaagcaatggaagaagacctaatcgtgggactgcaagggatggatctgaaccttgaggctgaagcactggctggcactggcttggtgttggatgagcagttaaatgaattccattgcctctgggatgacagcttcccggaaggccctgagcggctccatgccatcaaggagcaactgatccaggagggcctcctagatcgctgcgtgtcctttcaggcccggtttgctgaaaaggaagagctgatgttggttcacaggtgaaggcttgggagccttgtagggatggggaggagcctgccctggacaaaccagggcaagctaaacgctttgggaagcaatgtcatggtctctgcagccagccttgggcaagtcgctgagcctttctgaatctgtgtcatcgcctgtaacaaggggaccagtaaacataagttcctcaggag

SEQ ID NO: 457597 - DNA, 4228 bp, Homo sapiens
gggcagggggtggagctggttgaaggaacggggcagtcccctgaggagcggggctggttgaaacgctaggggcgggatctggcggagtggaaggtaccggtccggcccgataaggggtggagttaagtgaatcgttaagggtggagtcgaaaccggggtcggggccggggccggctgagtgaaaggaaccgcggcaggggccaagcctcctcaactatgacctcaaccggccaggattccaccacaaccaggcagcgaagaagtaggcagaacccccagtcgccccctcaggactccagtgtcacttcgaagcgaaatattaaaaagggagccgttccccgctctatccccaatctagcggaggtaaagaagaaaggcaaaatgaagaagctcggccaagcaatggaagaagacctaatcgtgggactgcaagggatggatctgaaccttgaggctgaagcactggctggcactggcttggtgttggatgagcagttaaatgaattccattgcctctgggatgacagcttcccggaaggccctgagcggctccatgccatcaaggagcaactgatccaggagggcctcctagatcgctgcgtgtcctttcaggcccggtttgctgaaaaggaagagctgatgttggttcacagcctagaatatattgatctgatggaaacaacccagtacatgaatgagggagaactccgtgtcctagcagacacctacgactcagtttatctgcatccgaactcatactcctgtgcctgcctggcctcaggctctgtcctcaggctggtggatgcggtcctgggggctgagatccggaatggcatggccatcattaggcctcctggacatcacgcccagcacagtcttatggatggctattgcatgttcaaccacgtggctgtggcagcccgctatgctcaacagaaacaccgcatccggagggtccttatcgtagattgggatgtgcaccacggtcaaggaacacagttcaccttcgaccaggaccccagtgtcctctatttctccatccaccgctacgagcagggtaggttctggccccacctgaaggcctctaactggtccaccacaggtttcggccaaggccaaggatataccatcaatgtgccttggaaccaggtggggatgcgggatgctgactacattgctgctttcctgcacgtcctgctgccagtcgccctcgagttccagcctcagctggtcctggtggctgctggatttgatgccctgcaaggggaccccaagggtgagatggccgccactccggcagggttcgcccagctaacccacctgctcatgggtctggcaggaggcaagctgatcctgtctctggagggtggctacaacctccgcgccctggctgaaggcgtcagtgcttcgctccacacccttctgggagacccttgccccatgctggagtcacctggtgccccctgccggagtgcccaggcttcagtttcctgtgctctggaagcccttgagcccttctgggaggttcttgtgagatcaactgagaccgtggagagggacaacatggaggaggacaatgtagaggagagcgaggaggaaggaccctgggagccccctgtgctcccaatcctgacatggccagtgctacagtctcgcacagggctggtctatgaccaaaatatgatgaatcactgcaacttgtgggacagccaccaccctgaggtaccccagcgcatcttgcggatcatgtgccgtctggaggagctgggccttgccgggcgctgcctcaccctgacaccgcgccctgccacagaggctgagctgctcacctgtcacagtgctgagtacgtgggtcatctccgggccacagagaaaatgaaaacccgggagctgcaccgtgagagttccaactttgactccatctatatctgccccagtaccttcgcctgtgcacagcttgccactggcgctgcctgccgcctggtggaggctgtgctctcaggagaggttctgaatggtgctgctgtggtgcgtcccccaggacaccacgcagagcaggatgcagcttgcggtttttgctttttcaactctgtggctgtggctgctcgccatgcccagactatcagtgggcatgccctacggatcctgattgtggattgggatgtccaccacggtaatggaactcagcacatgtttgaggatgaccccagtgtgctatatgtgtccctgcaccgctatgatcatggcaccttcttccccatgggggatgagggtgccagcagccagatcggccgggctgcgggcacaggcttcaccgtcaacgtggcatggaacgggccccgcatgggtgatgctgactacctagctgcctggcatcgcctggtgcttcccattgcctacgagtttaacccagaactggtgctggtctcagctggctttgatgctgcacggggggatccgctggggggctgccaggtgtcacctgagggttatgcccacctcacccacctgctgatgggccttgccagtggccgcattatccttatcctagagggtggctataacctgacatccatctcagagtccatggctgcctgcactcgctccctccttggagacccaccacccctgctgaccctgccacggcccccactatcaggggccctggcctcaatcactgagaccatccaagtccatcgcagatactggcgcagcttacgggtcatgaaggtagaagacagagaaggaccctccagttctaagttggtcaccaagaaggcaccccaaccagccaaacctaggttagctgagcggatgaccacacgagaaaagaaggttctggaagcaggcatggggaaagtcacctcggcatcatttggggaagagtccactccaggccagactaactcagagacagctgtggtggccctcactcaggaccagccctcagaggcagccacagggggagccactctggcccagaccatttctgaggcagccattgggggagccatgctgggccagaccacctcagaggaggctgtcgggggagccactccggaccagaccacctcagaggagactgtgggaggagccattctggaccagaccacctcagaggatgctgttgggggagccacgctgggccagactacctcagaggaggctgtaggaggagctacactggcccagaccacctcggaggcagccatggagggagccacactggaccagactacgtcagaggaggctccagggggcaccgagctgatccaaactcctctagcctcgagcacagaccaccagacccccccaacctcacctgtgcagggaactacaccccagatatctcccagtacactgattgggagtctcaggaccttggagctaggcagcgaatctcagggggcctcagaatctcaggccccaggagaggagaacctactaggagaggcagctggaggtcaggacatggctgattcgatgctgatgcagggatctaggggcctcactgatcaggccatattttatgctgtgacaccactgccctggtgtccccatttggtggcagtatgccccatacctgcagcaggcctagacgtgacccaaccttgtggggactgtggaacaatccaagagaattgggtgtgtctctcttgctatcaggtctactgtggtcgttacatcaatggccacatgctccaacaccatggaaattctggacacccgctggtcctcagctacatcgacctgtcagcctggtgttactactgtcaggcctatgtccaccaccaggctctcctagatgtgaagaacatcgcccaccagaacaagtttggggaggatatgccccacccacactaagccccagaatacggtccctcttcaccttctgaggcccacgatagaccagctgtagctcattccagcctgtaccttggatgaggggtagcctcccactgcatcccatcctgaatatcctttgcaactccccaagagtgcttatttaagtgttaatacttttaagagaactgcgacgattaattgtggatctccccctgcccattgcctgcttgaggggcaccactactccagcccagaaggaaaggggggcagctcagtggccccaagagggagctgatatcatgaggataacattggcgggaggggagttaactggcaggcatggcaaggttgcatatgtaataaagtacaagctgttaaaaaa

SEQ ID NO: 457598 - DNA, 4544 bp, Homo sapiens
gggcagggggtggagctggttgaaggaacggggcagtcccctgaggagcggggctggttgaaacgctaggggcgggatctggcggagtggaaggtaccggtccggcccgataaggggtggagttaagtgaatcgttaagggtggagtcgaaaccggggtcggggccggggccggctgagtgaaagggtgggtgattatcccgggagataggccgaaagggcaggttcgtgaaggaatggggtctgggctgggcttagagggtctgggaatggggcttaggagagtagaaggggcggtgattggttggaaagggcaggccctaagacggactgtgtgagcccgggggctcattgctccgtgaaagggcaagaccagggaaagagaatcgtgtaaaaggggtggagtctagcgggccgggcggggccgggtagaatggccacctgagtggagggagaaggcctgagagaggcggagtttggaaggctgtggagaatcagatcgcaaccgcggcaggggccaagcctcctcaactatgacctcaaccggccaggattccaccacaaccaggcagcgaagaagtaggcagaacccccagtcgccccctcaggactccagtgtcacttcgaagcgaaatattaaaaagggagccgttccccgctctatccccaatctagcggaggtaaagaagaaaggcaaaatgaagaagctcggccaagcaatggaagaagacctaatcgtgggactgcaagggatggatctgaaccttgaggctgaagcactggctggcactggcttggtgttggatgagcagttaaatgaattccattgcctctgggatgacagcttcccggaaggccctgagcggctccatgccatcaaggagcaactgatccaggagggcctcctagatcgctgcgtgtcctttcaggcccggtttgctgaaaaggaagagctgatgttggttcacagcctagaatatattgatctgatggaaacaacccagtacatgaatgagggagaactccgtgtcctagcagacacctacgactcagtttatctgcatccgaactcatactcctgtgcctgcctggcctcaggctctgtcctcaggctggtggatgcggtcctgggggctgagatccggaatggcatggccatcattaggcctcctggacatcacgcccagcacagtcttatggatggctattgcatgttcaaccacgtggctgtggcagcccgctatgctcaacagaaacaccgcatccggagggtccttatcgtagattgggatgtgcaccacggtcaaggaacacagttcaccttcgaccaggaccccagtgtcctctatttctccatccaccgctacgagcagggtaggttctggccccacctgaaggcctctaactggtccaccacaggtttcggccaaggccaaggatataccatcaatgtgccttggaaccaggtggggatgcgggatgctgactacattgctgctttcctgcacgtcctgctgccagtcgccctcgagttccagcctcagctggtcctggtggctgctggatttgatgccctgcaaggggaccccaagggtgagatggccgccactccggcagggttcgcccagctaacccacctgctcatgggtctggcaggaggcaagctgatcctgtctctggagggtggctacaacctccgcgccctggctgaaggcgtcagtgcttcgctccacacccttctgggagacccttgccccatgctggagtcacctggtgccccctgccggagtgcccaggcttcagtttcctgtgctctggaagcccttgagcccttctgggaggttcttgtgagatcaactgagaccgtggagagggacaacatggaggaggacaatgtagaggagagcgaggaggaaggaccctgggagccccctgtgctcccaatcctgacatggccagtgctacagtctcgcacagggctggtctatgaccaaaatatgatgaatcactgcaacttgtgggacagccaccaccctgaggtaccccagcgcatcttgcggatcatgtgccgtctggaggagctgggccttgccgggcgctgcctcaccctgacaccgcgccctgccacagaggctgagctgctcacctgtcacagtgctgagtacgtgggtcatctccgggccacagagaaaatgaaaacccgggagctgcaccgtgagagttccaactttgactccatctatatctgccccagtaccttcgcctgtgcacagcttgccactggcgctgcctgccgcctggtggaggctgtgctctcaggagaggttctgaatggtgctgctgtggtgcgtcccccaggacaccacgcagagcaggatgcagcttgcggtttttgctttttcaactctgtggctgtggctgctcgccatgcccagactatcagtgggcatgccctacggatcctgattgtggattgggatgtccaccacggtaatggaactcagcacatgtttgaggatgaccccagtgtgctatatgtgtccctgcaccgctatgatcatggcaccttcttccccatgggggatgagggtgccagcagccagatcggccgggctgcgggcacaggcttcaccgtcaacgtggcatggaacgggccccgcatgggtgatgctgactacctagctgcctggcatcgcctggtgcttcccattgcctacgagtttaacccagaactggtgctggtctcagctggctttgatgctgcacggggggatccgctggggggctgccaggtgtcacctgagggttatgcccacctcacccacctgctgatgggccttgccagtggccgcattatccttatcctagagggtggctataacctgacatccatctcagagtccatggctgcctgcactcgctccctccttggagacccaccacccctgctgaccctgccacggcccccactatcaggggccctggcctcaatcactgagaccatccaagtccatcgcagatactggcgcagcttacgggtcatgaaggtagaagacagagaaggaccctccagttctaagttggtcaccaagaaggcaccccaaccagccaaacctaggttagctgagcggatgaccacacgagaaaagaaggttctggaagcaggcatggggaaagtcacctcggcatcatttggggaagagtccactccaggccagactaactcagagacagctgtggtggccctcactcaggaccagccctcagaggcagccacagggggagccactctggcccagaccatttctgaggcagccattgggggagccatgctgggccagaccacctcagaggaggctgtcgggggagccactccggaccagaccacctcagaggagactgtgggaggagccattctggaccagaccacctcagaggatgctgttgggggagccacgctgggccagactacctcagaggaggctgtaggaggagctacactggcccagaccacctcggaggcagccatggagggagccacactggaccagactacgtcagaggaggctccagggggcaccgagctgatccaaactcctctagcctcgagcacagaccaccagacccccccaacctcacctgtgcagggaactacaccccagatatctcccagtacactgattgggagtctcaggaccttggagctaggcagcgaatctcagggggcctcagaatctcaggccccaggagaggagaacctactaggagaggcagctggaggtcaggacatggctgattcgatgctgatgcagggatctaggggcctcactgatcaggccatattttatgctgtgacaccactgccctggtgtccccatttggtggcagtatgccccatacctgcagcaggcctagacgtgacccaaccttgtggggactgtggaacaatccaagagaattgggtgtgtctctcttgctatcaggtctactgtggtcgttacatcaatggccacatgctccaacaccatggaaattctggacacccgctggtcctcagctacatcgacctgtcagcctggtgttactactgtcaggcctatgtccaccaccaggctctcctagatgtgaagaacatcgcccaccagaacaagtttggggaggatatgccccacccacactaagccccagaatacggtccctcttcaccttctgaggcccacgatagaccagctgtagctcattccagcctgtaccttggatgaggggtagcctcccactgcatcccatcctgaatatcctttgcaactccccaagagtgcttatttaagtgttaatacttttaagagaactgcgacgattaattgtggatctccccctgcccattgcctgcttgaggggcaccactactccagcccagaaggaaaggggggcagctcagtggccccaagagggagctgatatcatgaggataacattggcgggaggggagttaactggcaggcatggcaaggttgcatatgtaataaagtacaagctgttaaaaaa

SEQ ID NO: 457599 - DNA, 4961 bp, Homo sapiens
gggcagggggtggagctggttgaaggaacggggcagtcccctgaggagcggggctggttgaaacgctaggggcgggatctggcggagtggaaggtaccggtccggcccgataaggggtggagttaagtgaatcgttaagggtggagtcgaaaccggggtcggggccggggccggctgagtgaaagggtgggtgattatcccgggagataggccgaaagggcagaaccgcggcaggggccaagcctcctcaactatgacctcaaccggccaggattccaccacaaccaggcagcgaagaagtaggcagaacccccagtcgccccctcaggactccagtgtcacttcgaagcgaaatattaaaaagggagccgttccccgctctatccccaatctagcggaggtaaagaagaaaggcaaaatgaagaagctcggccaagcaatggaagaagacctaatcgtgggactgcaagggatggatctgaaccttgaggctgaagcactggctggcactggcttggtgttggatgagcagttaaatgaattccattgcctctgggatgacagcttcccggaaggccctgagcggctccatgccatcaaggagcaactgatccaggagggcctcctagatcgctgcgtgtcctttcaggcccggtttgctgaaaaggaagagctgatgttggttcacaggtgaaggcttgggagccttgtagggatggggaggagcctgccctggacaaaccagggcaagctaaacgctttgggaagcaatgtcatggtctctgcagccagccttgggcaagtcgctgagcctttctgaatctgtgtcatcgcctgtaacaaggggaccagtaaacataagttcctcaggagagtttgatgtgtgtcaggtgcttagaacagggcctgatatataatcagcccatgatgagctattactgttatcatgatctgattgtgtgaatagatggtggatgtgtggacagagtgatcggggttcccccaggggcttccagatttagaggcctagtgctatgtggcttgaggaaagctagcttccagagcaggtatctgagctgaactttaagaggagaaaaagagtgagtcagatgaagagggtgactgagggaagggaagaacagacagctgaaccagtgtggccaaaggcctgaaagtaggatttggtgtggctactgcaggggagcagagaacattacctgaactgaggcgggctagggaagaaacagaatgtgtcttatatcctggctattccttcaggttgacagttgggggagccaagccctaatttgaccagggggttggtgtatggacagctcagttggggaagagacagggccctgaatctcatctcccatctgtgtctagcctagaatatattgatctgatggaaacaacccagtacatgaatgagggagaactccgtgtcctagcagacacctacgactcagtttatctgcatccgaactcatactcctgtgcctgcctggcctcaggctctgtcctcaggctggtggatgcggtcctgggggctgagatccggaatggcatggccatcattaggcctcctggacatcacgcccagcacagtcttatggatggctattgcatgttcaaccacgtggctgtggcagcccgctatgctcaacagaaacaccgcatccggagggtccttatcgtagattgggatgtgcaccacggtcaaggaacacagttcaccttcgaccaggaccccagtgtcctctatttctccatccaccgctacgagcagggtaggttctggccccacctgaaggcctctaactggtccaccacaggtttcggccaaggccaaggatataccatcaatgtgccttggaaccaggtggggatgcgggatgctgactacattgctgctttcctgcacgtcctgctgccagtcgccctcgagttccagcctcagctggtcctggtggctgctggatttgatgccctgcaaggggaccccaagggtgagatggccgccactccggcagggttcgcccagctaacccacctgctcatgggtctggcaggaggcaagctgatcctgtctctggagggtggctacaacctccgcgccctggctgaaggcgtcagtgcttcgctccacacccttctgggagacccttgccccatgctggagtcacctggtgccccctgccggagtgcccaggcttcagtttcctgtgctctggaagcccttgagcccttctgggaggttcttgtgagatcaactgagaccgtggagagggacaacatggaggaggacaatgtagaggagagcgaggaggaaggaccctgggagccccctgtgctcccaatcctgacatggccagtgctacagtctcgcacagggctggtctatgaccaaaatatgatgaatcactgcaacttgtgggacagccaccaccctgaggtaccccagcgcatcttgcggatcatgtgccgtctggaggagctgggccttgccgggcgctgcctcaccctgacaccgcgccctgccacagaggctgagctgctcacctgtcacagtgctgagtacgtgggtcatctccgggccacagagaaaatgaaaacccgggagctgcaccgtgagagttccaactttgactccatctatatctgccccagtaccttcgcctgtgcacagcttgccactggcgctgcctgccgcctggtggaggctgtgctctcaggagaggttctgaatggtgctgctgtggtgcgtcccccaggacaccacgcagagcaggatgcagcttgcggtttttgctttttcaactctgtggctgtggctgctcgccatgcccagactatcagtgggcatgccctacggatcctgattgtggattgggatgtccaccacggtaatggaactcagcacatgtttgaggatgaccccagtgtgctatatgtgtccctgcaccgctatgatcatggcaccttcttccccatgggggatgagggtgccagcagccagatcggccgggctgcgggcacaggcttcaccgtcaacgtggcatggaacgggccccgcatgggtgatgctgactacctagctgcctggcatcgcctggtgcttcccattgcctacgagtttaacccagaactggtgctggtctcagctggctttgatgctgcacggggggatccgctggggggctgccaggtgtcacctgagggttatgcccacctcacccacctgctgatgggccttgccagtggccgcattatccttatcctagagggtggctataacctgacatccatctcagagtccatggctgcctgcactcgctccctccttggagacccaccacccctgctgaccctgccacggcccccactatcaggggccctggcctcaatcactgagaccatccaagtccatcgcagatactggcgcagcttacgggtcatgaaggtagaagacagagaaggaccctccagttctaagttggtcaccaagaaggcaccccaaccagccaaacctaggttagctgagcggatgaccacacgagaaaagaaggttctggaagcaggcatggggaaagtcacctcggcatcatttggggaagagtccactccaggccagactaactcagagacagctgtggtggccctcactcaggaccagccctcagaggcagccacagggggagccactctggcccagaccatttctgaggcagccattgggggagccatgctgggccagaccacctcagaggaggctgtcgggggagccactccggaccagaccacctcagaggagactgtgggaggagccattctggaccagaccacctcagaggatgctgttgggggagccacgctgggccagactacctcagaggaggctgtaggaggagctacactggcccagaccacctcggaggcagccatggagggagccacactggaccagactacgtcagaggaggctccagggggcaccgagctgatccaaactcctctagcctcgagcacagaccaccagacccccccaacctcacctgtgcagggaactacaccccagatatctcccagtacactgattgggagtctcaggaccttggagctaggcagcgaatctcagggggcctcagaatctcaggccccaggagaggagaacctactaggagaggcagctggaggtcaggacatggctgattcgatgctgatgcagggatctaggggcctcactgatcaggccatattttatgctgtgacaccactgccctggtgtccccatttggtggcagtatgccccatacctgcagcaggcctagacgtgacccaaccttgtggggactgtggaacaatccaagagaattgggtgtgtctctcttgctatcaggtctactgtggtcgttacatcaatggccacatgctccaacaccatggaaattctggacacccgctggtcctcagctacatcgacctgtcagcctggtgttactactgtcaggcctatgtccaccaccaggctctcctagatgtgaagaacatcgcccaccagaacaagtttggggaggatatgccccacccacactaagccccagaatacggtccctcttcaccttctgaggcccacgatagaccagctgtagctcattccagcctgtaccttggatgaggggtagcctcccactgcatcccatcctgaatatcctttgcaactccccaagagtgcttatttaagtgttaatacttttaagagaactgcgacgattaattgtggatctccccctgcccattgcctgcttgaggggcaccactactccagcccagaaggaaaggggggcagctcagtggccccaagagggagctgatatcatgaggataacattggcgggaggggagttaactggcaggcatggcaaggttgcatatgtaataaagtacaagctgttaaaaaa

SEQ ID NO: 457600 - DNA, 3885 bp, Homo sapiens
gggcagggggtggagctggttgaaggaacggggcagtcccctgaggagcggggctggttgaaacgctaggggcgggatctggcggagtggaaggtaccggtccggcccgataaggggtggagttaagtgaatcgttaagggtggagtcgaaaccggggtcggggccggggccggctgagtgaaaggaaccgcggcaggggccaagcctcctcaactatgacctcaaccggccaggattccaccacaaccaggcagcgaagaagtaggcagaacccccagtcgccccctcaggactccagtgtcacttcgaagcgaaatattaaaaagggagccgttccccgctctatccccaatctagcggaggtaaagaagaaaggcaaaatgaagaagctcggccaagcaatggaagaagacctaatcgtgggactgcaagggatggatctgaaccttgaggctgaagcactggctggcactggcttggtgttggatgagcagttaaatgaattccattgcctctgggatgacagcttcccggaaggccctgagcggctccatgccatcaaggagcaactgatccaggagggcctcctagatcgctgcgtgtcctttcaggcccggtttgctgaaaaggaagagctgatgttggttcacagcctagaatatattgatctgatggaaacaacccagtacatgaatgagggagaactccgtgtcctagcagacacctacgactcagtttatctgcatccgaactcatactcctgtgcctgcctggcctcaggctctgtcctcaggctggtggatgcggtcctgggggctgagatccggaatggcatggccatcattaggcctcctggacatcacgcccagcacagtcttatggatggctattgcatgttcaaccacgtggctgtggcagcccgctatgctcaacagaaacaccgcatccggagggtccttatcgtagattgggatgtgcaccacggtcaaggaacacagttcaccttcgaccaggaccccagtgtcctctatttctccatccaccgctacgagcagggtaggttctggccccacctgaaggcctctaactggtccaccacaggtttcggccaaggccaaggatataccatcaatgtgccttggaaccaggtggggatgcgggatgctgactacattgctgctttcctgcacgtcctgctgccagtcgccctcgagttccagcctcagctggtcctggtggctgctggatttgatgccctgcaaggggaccccaagggtgagatggccgccactccggcagggttcgcccagctaacccacctgctcatgggtctggcaggaggcaagctgatcctgtctctggagggtggctacaacctccgcgccctggctgaaggcgtcagtgcttcgctccacacccttctgggagacccttgccccatgctggagtcacctggtgccccctgccggagtgcccaggcttcagtttcctgtgctctggaagcccttgagcccttctgggaggttcttgtgagatcaactgagaccgtggagagggacaacatggaggaggacaatgtagaggagagcgaggaggaaggaccctgggagccccctgtgctcccaatcctgacatggccagtgctacagtctcgcacagggctggtctatgaccaaaatatgatgaatcactgcaacttgtgggacagccaccaccctgaggtaccccagcgcatcttgcggatcatgtgccgtctggaggagctgggccttgccgggcgctgcctcaccctgacaccgcgccctgccacagaggctgagctgctcacctgtcacagtgctgagtacgtgggtcatctccgggccacagagaaaatgaaaacccgggagctgcaccgtgagagttccaactttgactccatctatatctgccccagtaccttcgcctgtgcacagcttgccactggcgctgcctgccgcctggtggaggctgtgctctcaggagaggttctgaatggtgctgctgtggtgcgtcccccaggacaccacgcagagcaggatgcagcttgcggtttttgctttttcaactctgtggctgtggctgctcgccatgcccagactatcagtgggcatgccctacggatcctgattgtggattgggatgtccaccacggtaatggaactcagcacatgtttgaggatgaccccagggtggctataacctgacatccatctcagagtccatggctgcctgcactcgctccctccttggagacccaccacccctgctgaccctgccacggcccccactatcaggggccctggcctcaatcactgagaccatccaagtccatcgcagatactggcgcagcttacgggtcatgaaggtagaagacagagaaggaccctccagttctaagttggtcaccaagaaggcaccccaaccagccaaacctaggttagctgagcggatgaccacacgagaaaagaaggttctggaagcaggcatggggaaagtcacctcggcatcatttggggaagagtccactccaggccagactaactcagagacagctgtggtggccctcactcaggaccagccctcagaggcagccacagggggagccactctggcccagaccatttctgaggcagccattgggggagccatgctgggccagaccacctcagaggaggctgtcgggggagccactccggaccagaccacctcagaggagactgtgggaggagccattctggaccagaccacctcagaggatgctgttgggggagccacgctgggccagactacctcagaggaggctgtaggaggagctacactggcccagaccacctcggaggcagccatggagggagccacactggaccagactacgtcagaggaggctccagggggcaccgagctgatccaaactcctctagcctcgagcacagaccaccagacccccccaacctcacctgtgcagggaactacaccccagatatctcccagtacactgattgggagtctcaggaccttggagctaggcagcgaatctcagggggcctcagaatctcaggccccaggagaggagaacctactaggagaggcagctggaggtcaggacatggctgattcgatgctgatgcagggatctaggggcctcactgatcaggccatattttatgctgtgacaccactgccctggtgtccccatttggtggcagtatgccccatacctgcagcaggcctagacgtgacccaaccttgtggggactgtggaacaatccaagagaattgggtgtgtctctcttgctatcaggtctactgtggtcgttacatcaatggccacatgctccaacaccatggaaattctggacacccgctggtcctcagctacatcgacctgtcagcctggtgttactactgtcaggcctatgtccaccaccaggctctcctagatgtgaagaacatcgcccaccagaacaagtttggggaggatatgccccacccacactaagccccagaatacggtccctcttcaccttctgaggcccacgatagaccagctgtagctcattccagcctgtaccttggatgaggggtagcctcccactgcatcccatcctgaatatcctttgcaactccccaagagtgcttatttaagtgttaatacttttaagagaactgcgacgattaattgtggatctccccctgcccattgcctgcttgaggggcaccactactccagcccagaaggaaaggggggcagctcagtggccccaagagggagctgatatcatgaggataacattggcgggaggggagttaactggcaggcatggcaaggttgcatatgtaataaagtacaagctgttaaaaaa

SEQ ID NO: 457601 - DNA, 4161 bp, Homo sapiens
gggcagggggtggagctggttgaaggaacggggcagtcccctgaggagcggggctggttgaaacgctaggggcgggatctggcggagtggaaggtaccggtccggcccgataaggggtggagttaagtgaatcgttaagggtggagtcgaaaccggggtcggggccggggccggctgagtgaaaggaaccgcggcaggggccaagcctcctcaactatgacctcaaccggccaggattccaccacaaccaggcagcgaagaagtaggcagaacccccagtcgccccctcaggactccagtgtcacttcgaagcgaaatattaaaaagggagccgttccccgctctatccccaatctagcggaggtaaagaagaaaggcaaaatgaagaagctcggccaagcaatggaagaagacctaatcgtgggactgcaagggatggatctgaaccttgaggctgaagcactggctggcactggcttggtgttggatgagcagttaaatgaattccattgcctctgggatgacagcttcccggaaggccctgagcggctccatgccatcaaggagcaactgatccaggagggcctcctagatcgctgcgtgtcctttcaggcccggtttgctgaaaaggaagagctgatgttggttcacagcctagaatatattgatctgatggaaacaacccagtacatgaatgagggagaactccgtgtcctagcagacacctacgactcagtttatctgcatccgaactcatactcctgtgcctgcctggcctcaggctctgtcctcaggctggtggatgcggtcctgggggctgagatccggaatggcatggccatcattaggcctcctggacatcacgcccagcacagtcttatggatggctattgcatgttcaaccacgtggctgtggcagcccgctatgctcaacagaaacaccgcatccggagggtccttatcgtagattgggatgtgcaccacggtcaaggaacacagttcaccttcgaccaggaccccagtgtcctctatttctccatccaccgctacgagcagggtaggttctggccccacctgaaggcctctaactggtccaccacaggtttcggccaaggccaaggatataccatcaatgtgccttggaaccaggtggggatgcgggatgctgactacattgctgctttcctgcacgtcctgctgccagtcgccctcgagttccagcctcagctggtcctggtggctgctggatttgatgccctgcaaggggaccccaagggtgagatggccgccactccggcagggttcgcccagctaacccacctgctcatgggtctggcaggaggcaagctgatcctgtctctggagggtggctacaacctccgcgccctggctgaaggcgtcagtgcttcgctccacacccttctgggagacccttgccccatgctggagtcacctggtgccccctgccggagtgcccaggcttcagtttcctgtgctctggaagcccttgagcccttctgggaggttcttgtgagatcaactgagaccgtggagagggacaacatggaggaggacaatgtagaggagagcgaggaggaaggaccctgggagccccctgtgctcccaatcctgacatggccagtgctacagtctcgcacagggctggtctatgaccaaaatatgatgaatcactgcaacttgtgggacagccaccaccctgaggtaccccagcgcatcttgcggatcatgtgccgtctggaggagctgggccttgccgggcgctgcctcaccctgacaccgcgccctgccacagaggctgagctgctcacctgtcacagtgctgagtacgtgggtcatctccgggccacagagaaaatgaaaacccgggagctgcaccgtgagagttccaactttgactccatctatatctgccccagtaccttcgcctgtgcacagcttgccactggcgctgcctgccgcctggtggaggctgtgctctcaggagaggttctgaatggtgctgctgtggtgcgtcccccaggacaccacgcagagcaggatgcagcttgcggtttttgctttttcaactctgtggctgtggctgctcgccatgcccagactatcagtgggcatgccctacggatcctgattgtggattgggatgtccaccacggtaatggaactcagcacatgtttgaggatgaccccagtgtgctatatgtgtccctgcaccgctatgatcatggcaccttcttccccatgggggatgagggtgccagcagccagatcggccgggctgcgggcacaggcttcaccgtcaacgtggcatggaacgggccccgcatgggtgatgctgactacctagctgcctggcatcgcctggtgcttcccattgcctacgagtttaacccagaactggtgctggtctcagctggctttgatgctgcacggggggatccgctggggggctgccaggtgtcacctgagggttatgcccacctcacccacctgctgatgggccttgccagtggccgcattatccttatcctagagggtggctataacctgacatccatctcagagtccatggctgcctgcactcgctccctccttggagacccaccacccctgctgaccctgccacggcccccactatcaggggccctggcctcaatcactgagaccatccaagtccatcgcagatactggcgcagcttacgggtcatgaaggtagaagacagagaaggaccctccagttctaagttggtcaccaagaaggcaccccaaccagccaaacctaggttagctgagcggatgaccacacgagaaaagaaggttctggaagcaggcatggggaaagtcacctcggcatcatttggggaagagtccactccaggccagactaactcagagacagctgtggtggccctcactcaggaccagccctcagaggcagccacagggggagccactctggcccagaccatttctgaggcagccattgggggagccatgctgggccagaccacctcagaggaggctgtcgggggagccactccggaccagaccacctcagaggagactgtgggaggagccattctggaccagaccacctcagaggatgctgttgggggagccacgctgggccagactacctcagaggaggctgtaggaggagctacactggcccagaccacctcggaggcagccatggagggagccacactggaccagactacgtcagaggaggctccagggggcaccgagctgatccaaactcctctagcctcgagcacagaccaccagacccccccaacctcacctgtgcagggaactacaccccagatatctcccagtacactgattgggagtctcaggaccttggagctaggcagcgaatctcagggggcctcagaatctcaggccccaggagaggagaacctactaggagaggcagctggaggtcaggacatggctgattcgatgctgatgcagggatctaggggcctcactgatcaggccatattttatgctgtgacaccactgccctggtgtccccatttggtggcagtatgccccatacctgcagcaggcctagacgtgacccaaccttgtggggactgtggaacaatccaagagaattgggtgtgtctctcttgctatcaggtctactgtggtcgttacatcaatggccacatgctccaacaccatggaaattctggacacccgctggtcctcagctacatcgacctgtcagcctggtgttactactgtcaggcctatgtccaccaccaggctctcctagatgtgaagaacatcgcccaccagaacaagtttggggaggatatgccccacccacactaagccccagaatacggtccctcttcaccttctgaggcccatcctgaatatcctttgcaactccccaagagtgcttatttaagtgttaatacttttaagagaactgcgacgattaattgtggatctccccctgcccattgcctgcttgaggggcaccactactccagcccagaaggaaaggggggcagctcagtggccccaagagggagctgatatcatgaggataacattggcgggaggggagttaactggcaggcatggcaaggttgcatatgtaataaagtacaagctgttaaaaaa

SEQ ID NO: 457602 - DNA, 3755 bp, Homo sapiens
gggcagggggtggagctggttgaaggaacggggcagtcccctgaggagcggggctggttgaaacgctaggggcgggatctggcggagtggaaggtaccggtccggcccgataaggggtggagttaagtgaatcgttaagggtggagtcgaaaccggggtcggggccggggccggctgagtgaaaggaaccgcggcaggggccaagcctcctcaactatgacctcaaccggccaggattccaccacaaccaggcagcgaagaagtaggcagaacccccagtcgccccctcaggactccagtgtcacttcgaagcgaaatattaaaaagggagccgttccccgctctatccccaatctagcggaggtaaagaagaaaggcaaaatgaagaagctcggccaagcaatggaagaagacctaatcgtgggactgcaagggatggatctgaaccttgaggctgaagcactggctggcactggcttggtgttggatgagcagttaaatgaattccattgcctctgggatgacagcttcccggaaggccctgagcggctccatgccatcaaggagcaactgatccaggagggcctcctagatcgctgcgtgtcctttcaggcccggtttgctgaaaaggaagagctgatgttggttcacagcctagaatatattgatctgatggaaacaacccagtacatgaatgagggagaactccgtgtcctagcagacacctacgactcagtttatctgcatccgaactcatactcctgtgcctgcctggcctcaggctctgtcctcaggctggtggatgcggtcctgggggctgagatccggaatggcatggccatcattaggcctcctggacatcacgcccagcacagtcttatggatggctattgcatgttcaaccacgtggctgtggcagcccgctatgctcaacagaaacaccgcatccggagggtccttatcgtagattgggatgtgcaccacggtcaaggaacacagttcaccttcgaccaggaccccagtgtcctctatttctccatccaccgctacgagcagggtaggttctggccccacctgaaggcctctaactggtccaccacaggtttcggccaaggccaaggatataccatcaatgtgccttggaaccaggtggggatgcgggatgctgactacattgctgctttcctgcacgtcctgctgccagtcgccctcgagttccagcctcagctggtcctggtggctgctggatttgatgccctgcaaggggaccccaagggtgagatggccgccactccggcagggttcgcccagctaacccacctgctcatgggtctggcaggaggcaagctgatcctgtctctggagggtggctacaacctccgcgccctggctgaaggcgtcagtgcttcgctccacacccttctgggagacccttgccccatgctggagtcacctggtgccccctgccggagtgcccaggcttcagtttcctgtgctctggaagcccttgagcccttctgggaggttcttgtgagatcaactgagaccgtggagagggacaacatggaggaggacaatgtagaggagagcgaggaggaaggaccctgggagccccctgtgctcccaatcctgacatggccagtgctacagtctcgcacagggctggtctatgaccaaaatatgatgaatcactgcaacttgtgggacagccaccaccctgaggtaccccagcgcatcttgcggatcatgtgccgtctggaggagctgggccttgccgggcgctgcctcaccctgacaccgcgccctgccacagaggctgagctgctcacctgtcacagtgctgagtacgtgggtcatctccgggccacagagaaaatgaaaacccgggagctgcaccgtgagagttccaactttgactccatctatatctgccccagtaccttcgcctgtgcacagcttgccactggcgctgcctgccgcctggtggaggctgtgctctcaggagaggttctgaatggtgctgctgtggtgcgtcccccaggacaccacgcagagcaggatgcagcttgcggtttttgctttttcaactctgtggctgtggctgctcgccatgcccagactatcagtgggcatgccctacggatcctgattgtggattgggatgtccaccacggtaatggaactcagcacatgtttgaggatgaccccagtgtgctatatgtgtccctgcaccgctatgatcatggcaccttcttccccatgggggatgagggtgccagcagccagatcggccgggctgcgggcacaggcttcaccgtcaacgtggcatggaacgggccccgcatgggtgatgctgactacctagctgcctggcatcgcctggtgcttcccattgcctacgagtttaacccagaactggtgctggtctcagctggctttgatgctgcacggggggatccgctggggggctgccaggtgtcacctgagggttatgcccacctcacccacctgctgatgggccttgccagtggccgcattatccttatcctagagggtggctataacctgacatccatctcagagtccatggctgcctgcactcgctccctccttggagacccaccacccctgctgaccctgccacggcccccactatcaggggccctggcctcaatcactgagaccatccaagtccatcgcagatactggcgcagcttacgggtcatgaaggtagaagacagagaaggaccctccagttctaagttggtcaccaagaaggcaccccaaccagccaaacctaggttagctgagcggatgaccacacgagaaaagaaggttctggaagcaggcatggggaaagtcacctcggcatcatttggggaagagtccactccaggccagactaactcagagacagctgtggtggccctcactcaggaccagccctcagaggcagccacagggggagccactctggcccagaccatttctgaggcagccattgggggagccatgctgggccagaccacctcagaggaggctgtcgggggagccactccggaccagaccacctcagaggagactgtgggaggagccattctggaccagaccacctcagaggatgctgttgggggagccacgctgggccagactacctcagaggaggctgtaggaggagctacactggcccagaccacctcggaggcagccatggagggagccacactggaccagactacgtcagaggaggctccagggggcaccgagctgatccaaactcctctagcctcgagcacagaccaccagacccccccaacctcacctgtgcagggaactacaccccagatatctcccagtacactgattgggagtctcaggaccttggagctaggcagcgaatctcagggggcctcagaatctcaggccccaggagaggagaacctactaggagaggcagctggaggtcaggacatggctgattcgatgctgatgcagggatctaggggcctcactgatcaggccatattttatgctgtgacaccactgccctggtgtccccatttggtggcagtatgccccatacctgcagcaggcctagacgtgacccaaccttgtggggactgtggaacaatccaagagaattgggtgtgtctctcttgctatcagtctactgtgtcggtaactaatggcaaatgctcacacatggaattttgaacccgctgctctagtactgacttagctgtttatatgtaggc

SEQ ID NO: 457603 - DNA, 2327 bp, Homo sapiens
gggcagggggtggagctggttgaaggaacggggcagtcccctgaggagcggggctggttgaaacgctaggggcgggatctggcggagtggaaggtaccggtccggcccgataaggggtggagttaagtgaatcgttaagggtggagtcgaaaccggggtcggggccggggccggctgagtgaaaggaaccgcggcaggggccaagcctcctcaactatgacctcaaccggccaggattccaccacaaccaggcagcgaagaagtaggcagaacccccagtcgccccctcaggactccagtgtcacttcgaagcgaaatattaaaaagggagccgttccccgctctatccccaatctagcggaggtaaagaagaaaggcaaaatgaagaagctcggccaagcaatggaagaagacctaatcgtgggactgcaagggatggatctgaaccttgaggctgaagcactggctggcactggcttggtgttggatgagcagttaaatgaattccattgcctctgggatgacagcttcccggaaggccctgagcggctccatgccatcaaggagcaactgatccaggagggcctcctagatcgctgcgtgtcctttcaggcccggtttgctgaaaaggaagagctgatgttggttcacagcctagaatatattgatctgatggaaacaacccagtacatgaatgagggagaactccgtgtcctagcagacacctacgactcagtttatctgcatccgaactcatactcctgtgcctgcctggcctcaggctctgtcctcaggctggtggatgcggtcctgggggctgagatccggaatggcatggccatcattaggcctcctggacatcacgcccagcacagtcttatggatggctattgcatgttcaaccacgtggctgtggcagcccgctatgctcaacagaaacaccgcatccggagggtccttatcgtagattgggatgtgcaccacggtcaaggaacacagttcaccttcgaccaggaccccagtgtcctctatttctccatccaccgctacgagcagggtaggttctggccccacctgaaggcctctaactggtccaccacaggtttcggccaaggccaaggatataccatcaatgtgccttggaaccaggtggggatgcgggatgctgactacattgctgctttcctgcacgtcctgctgccagtcgccctcgagttccagcctcagctggtcctggtggctgctggatttgatgccctgcaaggggaccccaagggtgagatggccgccactccggcagggttcgcccagctaacccacctgctcatgggtctggcaggaggcaagctgatcctgtctctggagggtggctacaacctccgcgccctggctgaaggcgtcagtgcttcgctccacacccttctgggagacccttgccccatgctggagtcacctggtgccccctgccggagtgcccaggcttcagtttcctgtgctctggaagcccttgagcccttctgggaggttcttgtgagatcaactgagaccgtggagagggacaacatggaggaggacaatgtagaggagagcgaggaggaaggaccctgggagccccctgtgctcccaatcctgacatggccagtgctacagtctcgcacagggctggtctatgaccaaaatatgatgaatcactgcaacttgtgggacagccaccaccctgaggtaccccagcgcatcttgcggatcatgtgccgtctggaggagctgggccttgccgggcgctgcctcaccctgacaccgcgccctgccacagaggctgagctgctcacctgtcacagtgctgagtacgtgggtcatctccgggccacagagaaaatgaaaacccgggagctgcaccgtgagagttccaactttgactccatctatatctgccccagtaccttcgcctgtgcacagcttgccactggcgctgcctgccgcctggtggaggctgtgctctcaggagaggtgtgtcctctgtgggctggggagaggaggacctggggggaatggaaaaagagagccatctgctgtttctggaggctctgagagagtcaagcagggcctgaggaaaggggccatggggaggggcacgggagggggtgggcctagaggctgggggaataatggaaggaactggagaaagggaagggtggccaagtgcagtggctcacgtctgtaatcctagcgctttgagaagctgaggtgagctcaggaggtcaaggctgcagtaagccatgattgcaccactgcactctagcctgggcaacagagtgagaccctgtgtc

SEQ ID NO: 457604 - DNA, 1072 bp, Homo sapiens
gggcagggggtggagctggttgaaggaacggggcagtcccctgaggagcggggctggttgaaacgctaggggcgggatctggcggagtggaaggtaccggtccggcccgataaggggtggagttaagtgaatcgttaagggtggagtcgaaaccggggtcggggccggggccggctgagtgaaagggtgggtgattatcccgggagataggccgaaagggcaggttcgtgaaggaatggggtctgggctgggcttagagggtctgggaatggggcttaggagagtagaaggggcggtgattggttggaaagggcaggccctaagacggactgtgtgagcccgggggctcattgctccgtgaaagggcaagaccagggaaagagaatcgtgtaaaaggggtggagtctagcgggccgggcggggccgggtagaatggccacctgagtggagggagaaggcctgagagaggcggagtttggaaggctgtggagaatcagatcgcaaccgcggcaggggccaagcctcctcaactatgacctcaaccggccaggattccaccacaaccaggcagcgaagaagtaggcagaacccccagtcgccccctcaggactccagtgtcacttcgaagcgaaatattaaaaagggagccgttccccgctctatccccaatctagcggaggtaaagaagaaaggcaaaatgaagaagctcggccaagcaatggaagaagacctaatcgtgggactgcaagggatggatctgaaccttgaggctgaagcactggctggcactggcttggtgttggatgagcagttaaatgaattccattgcctctgggatgacaggtgaggctgggtcctccaggctgtctccaaaccacaaaaatacacacacttagagcccattagcaagaataaatcttttcttaccccagcctggatactggaagcagatgatttggggaggtagggctcacacttgaaagggttcttttatgtagctaacaaacatttattgagtgcctattgtgtgccaagagttggtgatacaaatgtaccaaacaacagacagggg

SEQ ID NO: 457605 - DNA, 4330 bp, Homo sapiens
gaattccgcgccagggccgaccgttcttcctgtactacgcttcccaccacactcactaccctcagttcagtggacaaagcttcaccaagcgctcaggccgtgggccatttggggactccttgatggagctggatggagctgtaggggccttgatgacaactgtgggggacctcggtctgctggaagagacactagtcatcttcactgcagataacggtcctgagttgatgcgcatgtccaatggcggctgctctggcctcttgagatgtggaaaaggaacaacttttgaaggtggcgtccgagagcctgccttggtctactggccaggtcacattactcctggtgtaacccatgagctggccagctctctggacctgctgcccaccctggcagccctgaccggggtccgctgcccaacgtcaccttggatggtgttgacatcagccccttgctgctaggcacaggcaagagcccacggaagtctgtcttcttctacccgccctacccagacgagatccatggggtctttgctgttcggaatgggaaatacaaggctcatttcttcacccagggctccgcccacagtgacaccacttcagatcctgcctgtcatgctgccaaccgtctgacggctcatgagcccccactgctctacgacttatctcaggaccctggggagaactacaatgttttggaaaaccacagagggaagagatgggaaaatggctgtccaggagttttcggaattcggggaaccgcttactgctgcagcttttggggtcgcccggccgccgctattacagtcttcccccgcatcagaaggttccattgccttctctttcccccacaatgcaggcaggcaccatagcccgttgggaaaaaaaagagggggacaaaatcaatgaaggtgacctaattgcagaggttgaaactgataaagccactgttggatttgagagcctggaggagtgttatatggcaaagatacttgttgctgaaggtaccagggatgttcccatcggagcgatcatctgtatcacagttggcaagcctgaggatattgaggcctttaaaaattatacactggattcctcagcagcacctaccccacaagcggccccagcaccaacccctgctgccactgcttcgccacctacaccttctgctcaggctcctggtagctcatatccccctcacatgcaggtacttcttcctgccctctctcccaccatgaccatgggcacagttcagagatgggaaaaaaaagtgggtgagaagctaagtgaaggagacttactggcagagatagaaactgacaaagccactataggttttgaagtacaggaagaaggttatctggcaaaaatcctggtccctgaaggcacaagagatgtccctctaggaaccccactctgtatcattgtagaaaaagaggcagatatatcagcatttgctgactataggccaaccgaagtaacagatttaaaaccacaagtgccaccacctaccccacccccggtggccgctgttcctccaactccccagcctttagctcctacaccttcagcaccctgcccagctactcctgctggaccaaagggaagggtgtttgttagccctcttgcaaagaagttggcagtagagaaagggattgatcttacacaagtaaaagggacaggaccagatggtagaatcaccaagaaggatatcgactcttttgtgcctagtaaagttgctcctgctccggcagctgttgtgcctcccacaggtcctggaatggcaccagttcctacaggtgtcttcacagatatcccaatcagcaacattcgtcgggttattgcacagcgattaatgcaatcaaagcaaaccatacctcattattacctttctatcgatgtaaatatgggagaagttttgttggtacggaaagaacttaataagatattagaagggagaagcaaaatttctgtcaatgacttcatcataaaagcttcagctttggcatgtttaaaagttcccgaagcaaattcttcttggatggacacagttataagacaaaatcatgttgttgatgtcagtgttgcggtcagtactcctgcaggactcatcacacctattgtgtttaatgcacatataaaaggagtggaaaccattgctaatgatgttgtttctttagcaaccaaagcaagagagggtaaactacagccacatgaattccagggtggcacttttacgatctccaatttaggaatgtttggaattaagaatttctctgctattattaacccacctcaagcatgtattttggcaattggtgcttcagaggataaactggtccctgcagataatgaaaaagggtttgatgtggctagcatgatgtctgttacactcagttgtgatcaccgggtggtggatggagcagttggagcccagtggcttgctgagtttagaaagtaccttgaaaaacctatcactatgttgttgtaactaactcaagaatttctaaactctcccaggtcacactgattcattcttaacaagatatttatatgttattaaacaggtggttctttttattttaaccagttatttttattattgagtctgtccagataagttatttataatgggcattactgaatttttaaaatgccgattacacccaaatattgtgcacatttaataatcagacaccagatttttagctctgtactcctaattaagggacatgtatgtggccttgcctagccctttggtgataagtacttcctctaggaaatgtacgataggtagaattgtggttccctaaagacaagtacataaaggtgaccctgatgaaaccttgaagttctgaaatttaactgcctaaaatgttctccttagatgtgagagaaagagaaatcaggaaaattaattctcttgggggaagggcttgaattgaagctttactttagaatttagccctggtttgaaattttccattacatgatcttggtttatcatcgatgggaagggtagaaaacttcaaggaaaataagtgaaattttaaaagtcagcattttcttagacctcttcagctgattgtttatttttctatgaattcctacacatggttattcccccctacttgagataatctaaatataaaccagctacttgatgtaactgagaatttgtgtggatatttatttaaacaaatgtgtaattttgagtacagaattcaacagttacctccaaaaaagaaacattgttaatataatttaacagaagttgtgaaactaaaattttctaagattaactggtagttcattgtaaatgaacataatgaacagaatttatgactccactgtggaaaatgctatcaaataactaaggaatatatatggaataagtgtacatatgtaaaatattgttactagagttagatatgtgccaaagtccatttatcccaaatcctgtctgaaaaggaggggtacattggtaaacattttggagtgcttaaaaatgccaaaaacaaaatggtaatttctactttgataaagtaaaaaagttaaatgtgtgtaaaaaagtgttctgtgtccttctactccagcatcgtctcatgtaaaataagaaagccctaaaatactattggagagaaaaaattaactaggttgctactttatttgcctaaatacttttttctattttgttagattttgcctttcttttggaaggaaggaggcgatattctggattataaaaatgaattgggaacattatcacaattccagactttctattaatatttatgtgttttaataaacgtttgaaattatttatgactacttaaaatgaatctgaccagtgcttcctggtatatgtaatatgtggagttagcccctgaaatttgctttaagtgtttcagtgttgaatctgtttctaaatattcattattacatggtacacaagtgacactccatatattccacacagacttttaccttgctgtattattatgaaaacaatacattaatttgatttttcagttgaagattatccaaaagaaacaagcttatcacaagggaccatcatcaatatgatccaaatctggttcaaacattcaaaacttcaaagataattcatctttcgctaatgcttgtggttctgttgttcccttgaaaaaaaataaaaacagttgccttctaataaacattgttgagttaaaaattaatctgagctataatctaaatcgattcagtctcttaccagaactgaaagaaaaaagttagaaatagtgtttttggttcatatgattatttaaaaattaaagtataaatcttcaatatgt

SEQ ID NO: 457606 - DNA, 3849 bp, Homo sapiens
tccggagacggcgttggttttggggtgtggggggttggtggcactatgtggcgcgtctgtgcgcgacgggctcagaatgtagccccatgggcgggactcgaggctcggtggacggccttgcaggaggtacccggaactccacgagtgacctcgcgatctggcccggctcccgctcgtcgcaacagcgtgactacagggtatggcggggtccgggcactgtgcggctggacccccagttctggggccacgccgcggaaccgcttactgctgcagcttttggggtcgcccggccgccgctattacagtcttcccccgcatcagaaggttccattgccttctctttcccccacaatgcaggcaggcaccatagcccgttgggaaaaaaaagagggggacaaaatcaatgaaggtgacctaattgcagaggttgaaactgataaagccactgttggatttgagagcctggaggagtgttatatggcaaagatacttgttgctgaaggtaccagggatgttcccatcggagcgatcatctgtatcacagttggcaagcctgaggatattgaggcctttaaaaattatacactggattcctcagcagcacctaccccacaagcggccccagcaccaacccctgctgccactgcttcgccacctacaccttctgctcaggctcctggtagctcatatccccctcacatgcaggtacttcttcctgccctctctcccaccatgaccatgggcacagttcagagatgggaaaaaaaagtgggtgagaagctaagtgaaggagacttactggcagagatagaaactgacaaagccactataggttttgaagtacaggaagaaggttatctggcaaaaatcctggtccctgaaggcacaagagatgtccctctaggaaccccactctgtatcattgtagaaaaagaggcagatatatcagcatttgctgactataggccaaccgaagtaacagatttaaaaccacaagtgccaccacctaccccacccccggtggccgctgttcctccaactccccagcctttagctcctacaccttcagcaccctgcccagctactcctgctggaccaaagggaagggtgtttgttagccctcttgcaaagaagttggcagtagagaaagggattgatcttacacaagtaaaagggacaggaccagatggtagaatcaccaagaaggatatcgactcttttgtgcctagtaaagttgctcctgctccggcagctgttgtgcctcccacaggtcctggaatggcaccagttcctacaggtgtcttcacagatatcccaatcagcaacattcgtcgggttattgcacagcgattaatgcaatcaaagcaaaccatacctcattattacctttctatcgatgtaaatatgggagaagttttgttggtacggaaagaacttaataagatattagaagggagaagcaaaatttctgtcaatgacttcatcataaaagcttcagctttggcatgtttaaaagttcccgaagcaaattcttcttggatggacacagttataagacaaaatcatgttgttgatgtcagtgttgcggtcagtactcctgcaggactcatcacacctattgtgtttaatgcacatataaaaggagtggaaaccattgctaatgatgttgtttctttagcaaccaaagcaagagagggtaaactacagccacatgaattccagggtggcacttttacgatctccaatttaggaatgtttggaattaagaatttctctgctattattaacccacctcaagcatgtattttggcaattggtgcttcagaggataaactggtccctgcagataatgaaaaagggtttgatgtggctagcatgatgtctgttacactcagttgtgatcaccgggtggtggatggagcagttggagcccagtggcttgctgagtttagaaagtaccttgaaaaacctatcactatgttgttgtaactaactcaagaatttctaaactctcccaggtcacactgattcattcttaacaagatatttatatgttattaaacaggtggttctttttattttaaccagttatttttattattgagtctgtccagataagttatttataatgggcattactgaatttttaaaatgccgattacacccaaatattgtgcacatttaataatcagacaccagatttttagctctgtactcctaattaagggacatgtatgtggccttgcctagccctttggtgataagtacttcctctaggaaatgtacgataggtagaattgtggttccctaaagacaagtacataaaggtgaccctgatgaaaccttgaagttctgaaatttaactgcctaaaatgttctccttagatgtgagagaaagagaaatcaggaaaattaattctcttgggggaagggcttgaattgaagctttactttagaatttagccctggtttgaaattttccattacatgatcttggtttatcatcgatgggaagggtagaaaacttcaaggaaaataagtgaaattttaaaagtcagcattttcttagacctcttcagctgattgtttatttttctatgaattcctacacatggttattcccccctacttgagataatctaaatataaaccagctacttgatgtaactgagaatttgtgtggatatttatttaaacaaatgtgtaattttgagtacagaattcaacagttacctccaaaaaagaaacattgttaatataatttaacagaagttgtgaaactaaaattttctaagattaactggtagttcattgtaaatgaacataatgaacagaatttatgactccactgtggaaaatgctatcaaataactaaggaatatatatggaataagtgtacatatgtaaaatattgttactagagttagatatgtgccaaagtccatttatcccaaatcctgtctgaaaaggaggggtacattggtaaacattttggagtgcttaaaaatgccaaaaacaaaatggtaatttctactttgataaagtaaaaaagttaaatgtgtgtaaaaaagtgttctgtgtccttctactccagcatcgtctcatgtaaaataagaaagccctaaaatactattggagagaaaaaattaactaggttgctactttatttgcctaaatacttttttctattttgttagattttgcctttcttttggaaggaaggaggcgatattctggattataaaaatgaattgggaacattatcacaattccagactttctattaatatttatgtgttttaataaacgtttgaaattatttatgactacttaaaatgaatctgaccagtgcttcctggtatatgtaatatgtggagttagcccctgaaatttgctttaagtgtttcagtgttgaatctgtttctaaatattcattattacatggtacacaagtgacactccatatattccacacagacttttaccttgctgtattattatgaaaacaatacattaatttgatttttcagtaattagtaattttaggttgaagattatccaaaagaaacaagcttatcacaagggaccatcatcaatatgatccaaatctggttcaaacattcaaaacttcaaagataattcatctttcgctaatgcttgtggttctgttgttcccttgaaaaaaaataaaaacagttgccttctaataaacattgttgagttaaaaattaatctgagctataatctaaatcgattcagtctcttaccagaactgaaagaaaaaagttagaaatagtgtttttggttcatatgattatttaaaaattaaagtataaatcttcaatatgt

SEQ ID NO: 457607 - DNA, 3633 bp, Homo sapiens
ggccgaggatggcaacactccagattcagcctcagacagaaccgcttactgctgcagcttttggggtcgcccggccgccgctattacagtcttcccccgcatcagaaggttccattgccttctctttcccccacaatgcaggcaggcaccatagcccgttgggaaaaaaaagagggggacaaaatcaatgaaggtgacctaattgcagaggttgaaactgataaagccactgttggatttgagagcctggaggagtgttatatggcaaagatacttgttgctgaaggtaccagggatgttcccatcggagcgatcatctgtatcacagttggcaagcctgaggatattgaggcctttaaaaattatacactggattcctcagcagcacctaccccacaagcggccccagcaccaacccctgctgccactgcttcgccacctacaccttctgctcaggctcctggtagctcatatccccctcacatgcaggtacttcttcctgccctctctcccaccatgaccatgggcacagttcagagatgggaaaaaaaagtgggtgagaagctaagtgaaggagacttactggcagagatagaaactgacaaagccactataggttttgaagtacaggaagaaggttatctggcaaaaatcctggtccctgaaggcacaagagatgtccctctaggaaccccactctgtatcattgtagaaaaagaggcagatatatcagcatttgctgactataggccaaccgaagtaacagatttaaaaccacaagtgccaccacctaccccacccccggtggccgctgttcctccaactccccagcctttagctcctacaccttcagcaccctgcccagctactcctgctggaccaaagggaagggtgtttgttagccctcttgcaaagaagttggcagtagagaaagggattgatcttacacaagtaaaagggacaggaccagatggtagaatcaccaagaaggatatcgactcttttgtgcctagtaaagttgctcctgctccggcagctgttgtgcctcccacaggtcctggaatggcaccagttcctacaggtgtcttcacagatatcccaatcagcaacattcgtcgggttattgcacagcgattaatgcaatcaaagcaaaccatacctcattattacctttctatcgatgtaaatatgggagaagttttgttggtacggaaagaacttaataagatattagaagggagaagcaaaatttctgtcaatgacttcatcataaaagcttcagctttggcatgtttaaaagttcccgaagcaaattcttcttggatggacacagttataagacaaaatcatgttgttgatgtcagtgttgcggtcagtactcctgcaggactcatcacacctattgtgtttaatgcacatataaaaggagtggaaaccattgctaatgatgttgtttctttagcaaccaaagcaagagagggtaaactacagccacatgaattccagggtggcacttttacgatctccaatttaggaatgtttggaattaagaatttctctgctattattaacccacctcaagcatgtattttggcaattggtgcttcagaggataaactggtccctgcagataatgaaaaagggtttgatgtggctagcatgatgtctgttacactcagttgtgatcaccgggtggtggatggagcagttggagcccagtggcttgctgagtttagaaagtaccttgaaaaacctatcactatgttgttgtaactaactcaagaatttctaaactctcccaggtcacactgattcattcttaacaagatatttatatgttattaaacaggtggttctttttattttaaccagttatttttattattgagtctgtccagataagttatttataatgggcattactgaatttttaaaatgccgattacacccaaatattgtgcacatttaataatcagacaccagatttttagctctgtactcctaattaagggacatgtatgtggccttgcctagccctttggtgataagtacttcctctaggaaatgtacgataggtagaattgtggttccctaaagacaagtacataaaggtgaccctgatgaaaccttgaagttctgaaatttaactgcctaaaatgttctccttagatgtgagagaaagagaaatcaggaaaattaattctcttgggggaagggcttgaattgaagctttactttagaatttagccctggtttgaaattttccattacatgatcttggtttatcatcgatgggaagggtagaaaacttcaaggaaaataagtgaaattttaaaagtcagcattttcttagacctcttcagctgattgtttatttttctatgaattcctacacatggttattcccccctacttgagataatctaaatataaaccagctacttgatgtaactgagaatttgtgtggatatttatttaaacaaatgtgtaattttgagtacagaattcaacagttacctccaaaaaagaaacattgttaatataatttaacagaagttgtgaaactaaaattttctaagattaactggtagttcattgtaaatgaacataatgaacagaatttatgactccactgtggaaaatgctatcaaataactaaggaatatatatggaataagtgtacatatgtaaaatattgttactagagttagatatgtgccaaagtccatttatcccaaatcctgtctgaaaaggaggggtacattggtaaacattttggagtgcttaaaaatgccaaaaacaaaatggtaatttctactttgataaagtaaaaaagttaaatgtgtgtaaaaaagtgttctgtgtccttctactccagcatcgtctcatgtaaaataagaaagccctaaaatactattggagagaaaaaattaactaggttgctactttatttgcctaaatacttttttctattttgttagattttgcctttcttttggaaggaaggaggcgatattctggattataaaaatgaattgggaacattatcacaattccagactttctattaatatttatgtgttttaataaacgtttgaaattatttatgactacttaaaatgaatctgaccagtgcttcctggtatatgtaatatgtggagttagcccctgaaatttgctttaagtgtttcagtgttgaatctgtttctaaatattcattattacatggtacacaagtgacactccatatattccacacagacttttaccttgctgtattattatgaaaacaatacattaatttgatttttcagtaattagtaattttaggttgaagattatccaaaagaaacaagcttatcacaagggaccatcatcaatatgatccaaatctggttcaaacattcaaaacttcaaagataattcatctttcgctaatgcttgtggttctgttgttcccttgaaaaaaaataaaaacagttgccttctaataaacattgttgagttaaaaattaatctgagctataatctaaatcgattcagtctcttaccagaactgaaagaaaaaagttagaaatagtgtttttggttcatatgattatttaaaaattaaagtataaatcttcaatatgt

SEQ ID NO: 457608 - DNA, 3563 bp, Homo sapiens
gaattccgcgccagggccgaccgttcttcctgtactacgcttcccaccacactcactaccctcagttcagtggacaaagcttcaccaagcgctcaggccgtgggccatttggggactccttgatggagctggatggagctgtaggggccttgatgacaactgtgggggacctcggtctgctggaagagacactagtcatcttcactgcagataacggtcctgagttgatgcgcatgtccaatggcggctgctctggcctcttgagatgtggaaaaggaacaacttttgaaggtggcgtccgagagcctgccttggtctactggccaggtcacattactcctggtgtaacccatgagctggccagctctctggacctgctgcccaccctggcagccctgaccggggtccgctgcccaacgtcaccttggatggtgttgacatcagccccttgctgctaggcacaggcaagagcccacggaagtctgtcttcttctacccgccctacccagacgagatccatggggtctttgctgttcggaatgggaaatacaaggctcatttcttcacccagggctccgcccacagtgacaccacttcagatcctgcctgtcatgctgccaaccgtctgacggctcatgagcccccactgctctacgacttatctcaggaccctggggagaactacaatgttttggaaaaccacagagggaagagatgggaaaatggctgtccaggagttttcggaattcggggaaccgcttactgctgcagcttttggggtcgcccggccgccgctattacagtcttcccccgcatcagaaggttccattgccttctctttcccccacaatgcaggcaggcaccatagcccgttgggaaaaaaaagagggggacaaaatcaatgaaggtgacctaattgcagaggttgaaactgataaagccactgttggatttgagagcctggaggagtgttatatggcaaagatacttgttgctgaaggtaccagggatgttcccatcggagcgatcatctgtatcacagttggcaagcctgaggatattgaggcctttaaaaattatacactggattcctcagcagcacctaccccacaagcggccccagcaccaacccctgctgccactgcttcgccacctacaccttctgctcaggctcctggtagctcatatccccctcacatgcaggtacttcttcctgccctctctcccaccatgaccatgggcacagttcagagatgggaaaaaaaagtgggtgagaagctaagtgaaggagacttactggcagagatagaaactgacaaagccactataggttttgaagtacaggaagaaggttatctggcaaaaatcctggtccctgaaggcacaagagatgtccctctaggaaccccactctgtatcattgtagaaaaagaggcagatatatcagcatttgctgactataggccaaccgaagtaacagatttaaaaccacaagtgccaccacctaccccacccccggtggccgctgttcctccaactccccagcctttagctcctacaccttcagcaccctgcccagctactcctgctggaccaaagggaagggtgtttgttagccctcttgcaaagaagttggcagtagagaaagggattgatcttacacaagtaaaagggacaggaccagatggtagaatcaccaagaaggatatcgactcttttgtgcctagtaaagttgctcctgctccggcagctgttgtgcctcccacaggtcctggaatggcaccagttcctacaggtgtcttcacagatatcccaatcagcaacattcgtcgggttattgcacagcgattaatgcaatcaaagcaaaccatacctcattattacctttctatcgatgtaaatatgggagaagttttgttggtacggaaagaacttaataagatattagaagggagaagcaaaatttctgtcaatgacttcatcataaaagcttcagctttggcatgtttaaaagttcccgaagcaaattcttcttggatggacacagttataagacaaaatcatgttgttgatgtcagtgttgcggtcagtactcctgcaggactcatcacacctattgtgtttaatgcacatataaaaggagtggaaaccattgctaatgatgttgtttctttagcaaccaaagcaagagagggtaaactacagccacatgaattccagggtggcacttttacgatctccaatttaggaatgtttggaattaagaatttctctgctattattaacccacctcaagcatgtattttggcaattggtgcttcagaggataaactggtccctgcagataatgaaaaagggtttgatgtggctagcatgatgtctgttacactcagttgtgatcaccgggtggtggatggagcagttggagcccagtggcttgctgagtttagaaagtaccttgaaaaacctatcactatgttgttgtaactaactcaagaatttctaaactctcccaggtcacactgattcattcttaacaagatatttatatgttattaaacaggtggttctttttattttaaccagttatttttattattgagtctgtccagataagttatttataatgggcattactgaatttttaaaatgccgattacacccaaatattgtgcacatttaataatcagacaccagatttttagctctgtactcctaattaagggacatgtatgtggccttgcctagccctttggtgataagtacttcctctaggaaatgtacgataggtagaattgtggttccctaaagacaagtacataaaggtgaccctgatgaaaccttgaagttctgaaatttaactgcctaaaatgttctccttagatgtgagagaaagagaaatcaggaaaattaattctcttgggggaagggcttgaattgaagctttactttagaatttagccctggtttgaaattttccattacatgatcttggtttatcatcgatgggaagggtagaaaacttcaaggaaaataagtgaaattttaaaagtcagcattttcttagacctcttcagctgattgtttatttttctatgaattcctacacatggttattcccccctacttgagataatctaaatataaaccagctacttgatgtaactgagaatttgtgtggatatttatttaaacaaatgtgtaattttgagtacagaattcaacagttacctccaaaaaagaaacattgttaatataatttaacagaagttgtgaaactaaaattttctaagattaactggtagttcattgtaaatgaacataatgaacagaatttatgactccactgtggaaaatgctatcaaataactaaggaatatatatggaataagtgtacatatgtaaaatattgttactagagttagatatgtgccaaagtccatttatcccaaatcctgtctgaaaaggaggggtacattggtaaacattttggagtgcttaaaaatgccaaaaacaaaatggtaatttctactttgataaagtaaaaaagttaaatgtgtgta

SEQ ID NO: 457609 - DNA, 3169 bp, Homo sapiens
gaattccgcgccagggccgaccgttcttcctgtactacgcttcccaccacactcactaccctcagttcagtggacaaagcttcaccaagcgctcaggccgtgggccatttggggactccttgatggagctggatggagctgtaggggccttgatgacaactgtgggggacctcggtctgctggaagagacactagtcatcttcactgcagataacggtcctgagttgatgcgcatgtccaatggcggctgctctggcctcttgagatgtggaaaaggaacaacttttgaaggtggcgtccgagagcctgccttggtctactggccaggtcacattactcctggtgtaacccatgagctggccagctctctggacctgctgcccaccctggcagccctgaccggggtccgctgcccaacgtcaccttggatggtgttgacatcagccccttgctgctaggcacaggcaagagcccacggaagtctgtcttcttctacccgccctacccagacgagatccatggggtctttgctgttcggaatgggaaatacaaggctcatttcttcacccagggctccgcccacagtgacaccacttcagatcctgcctgtcatgctgccaaccgtctgacggctcatgagcccccactgctctacgacttatctcaggaccctggggagaactacaatgttttggaaaaccacagagggaagagatgggaaaatggctgtccaggagttttcggaattcggggaaccgcttactgctgcagcttttggggtcgcccggccgccgctattacagtcttcccccgcatcagaaggttccattgccttctctttcccccacaatgcaggcaggcaccatagcccgttgggaaaaaaaagagggggacaaaatcaatgaaggtgacctaattgcagaggttgaaactgataaagccactgttggatttgagagcctggaggagtgttatatggcaaagatacttgttgctgaaggtaccagggatgttcccatcggagcgatcatctgtatcacagttggcaagcctgaggatattgaggcctttaaaaattatacactggattcctcagcagcacctaccccacaagcggccccagcaccaacccctgctgccactgcttcgccacctacaccttctgctcaggctcctggtagctcatatccccctcacatgcaggtacttcttcctgccctctctcccaccatgaccatgggcacagttcagagatgggaaaaaaaagtgggtgagaagctaagtgaaggagacttactggcagagatagaaactgacaaagccactataggttttgaagtacaggaagaaggttatctggcaaaaatcctggtccctgaaggcacaagagatgtccctctaggaaccccactctgtatcattgtagaaaaagaggcagatatatcagcatttgctgactataggccaaccgaagtaacagatttaaaaccacaagtgccaccacctaccccacccccggtggccgctgttcctccaactccccagcctttagctcctacaccttcagcaccctgcccagctactcctgctggaccaaagggaagggtgtttgttagccctcttgcaaagaagttggcagtagagaaagggattgatcttacacaagtaaaagggacaggaccagatggtagaatcaccaagaaggatatcgactcttttgtgcctagtaaagttgctcctgctccggcagctgttgtgcctcccacaggtcctggaatggcaccagttcctacaggtgtcttcacagatatcccaatcagcaacattcgtcgggttattgcacagcgattaatgcaatcaaagcaaaccatacctcattattacctttctatcgatgtaaatatgggagaagttttgttggtacggaaagaacttaataagatattagaagggagaagcaaaatttctgtcaatgacttcatcataaaagcttcagctttggcatgtttaaaagttcccgaagcaaattcttcttggatggacacagttataagacaaaatcatgttgttgatgtcagtgttgcggtcagtactcctgcaggactcatcacacctattgtgtttaatgcacatataaaaggagtggaaaccattgctaatgatgttgtttctttagcaaccaaagcaagagagggtaaactacagccacatgaattccagggtggcacttttacgatctccaatttaggaatgtttggaattaagaatttctctgctattattaacccacctcaagcatgtattttggcaattggtgcttcagaggataaactggtccctgcagataatgaaaaagggtttgatgtggctagcatgatgtctgttacactcagttgtgatcaccgggtggtggatggagcagttggagcccagtggcttgctgagtttagaaagtaccttgaaaaacctatcactatgttgttgtaactaactcaagaatttctaaactctcccaggtcacactgattcattcttaacaagatatttatatgttattaaacaggtggttctttttattttaaccagttatttttattattgagtctgtccagataagttatttataatgggcattactgaatttttaaaatgccgattacacccaaatattgtgcacatttaataatcagacaccagatttttagctctgtactcctaattaagggacatgtatgtggccttgcctagccctttggtgataagtacttcctctaggaaatgtacgataggtagaattgtggttccctaaagacaagtacataaaggtgaccctgatgaaaccttgaagttctgaaatttaactgcctaaaatgttctccttagatgtgagagaaagagaaatcaggaaaattaattctcttgggggaagggcttgaattgaagctttactttagaatttagccctggtttgaaattttccattacatgatcttggtttatcatcgatgggaagggtagaaaacttcaaggaaaataagtgaaattttaaaagtcagcattttcttagacctcttcagctgattgtttatttttctatgaattcctacacatggttattcccccctacttgagataatctaaatataaaccagctacttgatgtaactga

SEQ ID NO: 457610 - DNA, 1776 bp, Homo sapiens
  misc_feature (1741)..(1741): n is a, c, g, or t
  misc_feature (1750)..(1750): n is a, c, g, or t
  misc_feature (1769)..(1769): n is a, c, g, or t
tccggagacggcgttggttttggggtgtggggggttggtggcactatgtggcgcgtctgtgcgcgacgggctcagaatgtagccccatgggcgggactcgaggctcggtggacggccttgcaggaggtacccggaactccacgagtgacctcgcgatctggcccggctcccgctcgtcgcaacagcgtgactacagggtatggcggggtccgggcactgtgcggctggacccccagttctggggccacgccgcggaaccgcttactgctgcagcttttggggtcgcccggccgccgctattacagtcttcccccgcatcagaaggttccattgccttctctttcccccacaatgcaggcaggcaccatagcccgttgggaaaaaaaagagggggacaaaatcaatgaaggtgacctaattgcagaggttgaaactgataaagccactgttggatttgagagcctggaggagtgttatatggcaaagatacttgttgctgaaggtaccagggatgttcccatcggagcgatcatctgtatcacagttggcaagcctgaggatattgaggcctttaaaaattatacactggattcctcagcagcacctaccccacaagcggccccagcaccaacccctgctgccactgcttcgccacctacaccttctgctcaggctcctggtagctcatatccccctcacatgcaggtacttcttcctgccctctctcccaccatgaccatgggcacagttcagagatgggaaaaaaaagtgggtgagaagctaagtgaaggagacttactggcagagatagaaactgacaaagccactataggttttgaagtacaggaagaaggttatctggcaaaaatcctggtccctgaaggcacaagagatgtccctctaggaaccccactctgtatcattgtagaaaaagaggcagatatatcagcatttgctgactataggccaaccgaagtaacagatttaaaaccacaagtgccaccacctaccccacccccggtggccgctgttcctccaactccccagcctttagctcctacaccttcagcaccctgcccagctactcctgctggaccaaagggaagggtgtttgttagccctcttgcaaagaagttggcagtagagaaagggattgatcttacacaagtaaaagggacaggaccagatggtagaatcaccaagaaggatatcgactcttttgtgcctagtaaagttgctcctgctccggcagctgttgtgcctcccacaggtcctggaatggcaccagttcctacaggtgtcttcacagatatcccaatcagcaacattcgtcgggttattgcacagcgattaatgcaatcaaagcaaaccatacctcattattacctttctatcgatgtaaatatgggagaagttttgttggtacggaaagaacttaataagatattagaagggagaagcaaaatttctgtcaatgacttcatcataaaagcttcagctttggcatgtttaaaagttcccgaagcaaattcttcttggatggacacagttataagacaaaatcatgttgttgatgtcagtgttgcggtcagtactcctgcaggactcatcacacctattgtgtttaatgcacatataaaaggagtggaaaccattgctaatgatgttgtttctttagcaaccaaagcaagagagggtaaactacagccacatgaattccagagggttgggcacttttttnaccaatctnccaatttttaaggaaaatnttttggg

SEQ ID NO: 457611 - DNA, 1290 bp, Homo sapiens
tataaaccagctacttgatgtaactggtttatatttagattatctcaagtaggggggaataaccatgtgtaggaattcatagaaatataaaccagctacttgatgtaactgagaatttgtgtggatatttatttaaacaaatgtgtaattttgagtacagaattcaacagttacctccaaaaaagaaacattgttaatataatttaacagaagttgtgaaactaaaattttctaagattaactggtagttcattgtaaatgaacataatgaacagaatttatgactccactgtggaaaatgctatcaaataactaaggaatatatatggaataagtgtacatatgtaaaatattgttactagagttagatatgtgccaaagtccatttatcccaaatcctgtctgaaaaggaggggtacattggtaaacattttggagtgcttaaaaatgccaaaaacaaaatggtaatttctactttgataaagtaaaaaagttaaatgtgtgtaaaaaagtgttctgtgtccttctactccagcatcgtctcatgtaaaataagaaagccctaaaatactattggagagaaaaaattaactaggttgctactttatttgcctaaatacttttttctattttgttagattttgcctttcttttggaaggaaggaggcgatattctggattataaaaatgaattgggaacattatcacaattccagactttctattaatatttatgtgttttaataaacgtttgaaattatttatgactacttaaaatgaatctgaccagtgcttcctggtatatgtaatatgtggagttagcccctgaaatttgctttaagtgtttcagtgttgaatctgtttctaaatattcattattacatggtacacaagtgacactccatatattccacacagacttttaccttgctgtattattatgaaaacaatacattaatttgatttttcagtaattagtaattttaggttgaagattatccaaaagaaacaagcttatcacaagggaccatcatcaatatgatccaaatctggttcaaacattcaaaacttcaaagataattcatctttcgctaatgcttgtggttctgttgttcccttgaaaaaaaataaaaacagttgccttctaataaacattgttgagttaaaaattaatctgagctataatctaaatcgattcagtctcttaccagaactgaaagaaaaaagttagaaatagtgtttttggttcatatgattatttaaaaattaaagtataaatcttcaatatgt

SEQ ID NO: 457612 - DNA, 262 bp, Homo sapiens
ctagctcccaatgtgcaatggaactgtatacactttgcatgaaattgaattgaatgaaatcttaagccagactgagagttaggtagtccttaaaaattttaatgtttcttcttttccttttccaggttccattgccttctctttcccccacaatgcaggcaggcaccatagcccgttgggaaaaaaaagagggggacaaaatcaatgaaggtgacctaattgcagaggtaagttttttttttttttttttaattaatttatt

SEQ ID NO: 457613 - DNA, 4347 bp, Homo sapiens
gaattccgcgccagggccgaccgttcttcctgtactacgcttcccaccacactcactaccctcagttcagtggacaaagcttcaccaagcgctcaggccgtgggccatttggggactccttgatggagctggatggagctgtaggggccttgatgacaactgtgggggacctcggtctgctggaagagacactagtcatcttcactgcagataacggtcctgagttgatgcgcatgtccaatggcggctgctctggcctcttgagatgtggaaaaggaacaacttttgaaggtggcgtccgagagcctgccttggtctactggccaggtcacattactcctggtgtaacccatgagctggccagctctctggacctgctgcccaccctggcagccctgaccggggtccgctgcccaacgtcaccttggatggtgttgacatcagccccttgctgctaggcacaggcaagagcccacggaagtctgtcttcttctacccgccctacccagacgagatccatggggtctttgctgttcggaatgggaaatacaaggctcatttcttcacccagggctccgcccacagtgacaccacttcagatcctgcctgtcatgctgccaaccgtctgacggctcatgagcccccactgctctacgacttatctcaggaccctggggagaactacaatgttttggaaaaccacagagggaagagatgggaaaatggctgtccaggagttttcggaattcggggaaccgcttactgctgcagcttttggggtcgcccggccgccgctattacagtcttcccccgcatcagaaggttccattgccttctctttcccccacaatgcaggcaggcaccatagcccgttgggaaaaaaaagagggggacaaaatcaatgaaggtgacctaattgcagaggttgaaactgataaagccactgttggatttgagagcctggaggagtgttatatggcaaagatacttgttgctgaaggtaccagggatgttcccatcggagcgatcatctgtatcacagttggcaagcctgaggatattgaggcctttaaaaattatacactggattcctcagcagcacctaccccacaagcggccccagcaccaacccctgctgccactgcttcgccacctacaccttctgctcaggctcctggtagctcatatccccctcacatgcaggtacttcttcctgccctctctcccaccatgaccatgggcacagttcagagatgggaaaaaaaagtgggtgagaagctaagtgaaggagacttactggcagagatagaaactgacaaagccactataggttttgaagtacaggaagaaggttatctggcaaaaatcctggtccctgaaggcacaagagatgtccctctaggaaccccactctgtatcattgtagaaaaagaggcagatatatcagcatttgctgactataggccaaccgaagtaacagatttaaaaccacaagtgccaccacctaccccacccccggtggccgctgttcctccaactccccagcctttagctcctacaccttcagcaccctgcccagctactcctgctggaccaaagggaagggtgtttgttagccctcttgcaaagaagttggcagtagagaaagggattgatcttacacaagtaaaagggacaggaccagatggtagaatcaccaagaaggatatcgactcttttgtgcctagtaaagttgctcctgctccggcagctgttgtgcctcccacaggtcctggaatggcaccagttcctacaggtgtcttcacagatatcccaatcagcaacattcgtcgggttattgcacagcgattaatgcaatcaaagcaaaccatacctcattattacctttctatcgatgtaaatatgggagaagttttgttggtacggaaagaacttaataagatattagaagggagaagcaaaatttctgtcaatgacttcatcataaaagcttcagctttggcatgtttaaaagttcccgaagcaaattcttcttggatggacacagttataagacaaaatcatgttgttgatgtcagtgttgcggtcagtactcctgcaggactcatcacacctattgtgtttaatgcacatataaaaggagtggaaaccattgctaatgatgttgtttctttagcaaccaaagcaagagagggtaaactacagccacatgaattccagggtggcacttttacgatctccaatttaggaatgtttggaattaagaatttctctgctattattaacccacctcaagcatgtattttggcaattggtgcttcagaggataaactggtccctgcagataatgaaaaagggtttgatgtggctagcatgatgtctgttacactcagttgtgatcaccgggtggtggatggagcagttggagcccagtggcttgctgagtttagaaagtaccttgaaaaacctatcactatgttgttgtaactaactcaagaatttctaaactctcccaggtcacactgattcattcttaacaagatatttatatgttattaaacaggtggttctttttattttaaccagttatttttattattgagtctgtccagataagttatttataatgggcattactgaatttttaaaatgccgattacacccaaatattgtgcacatttaataatcagacaccagatttttagctctgtactcctaattaagggacatgtatgtggccttgcctagccctttggtgataagtacttcctctaggaaatgtacgataggtagaattgtggttccctaaagacaagtacataaaggtgaccctgatgaaaccttgaagttctgaaatttaactgcctaaaatgttctccttagatgtgagagaaagagaaatcaggaaaattaattctcttgggggaagggcttgaattgaagctttactttagaatttagccctggtttgaaattttccattacatgatcttggtttatcatcgatgggaagggtagaaaacttcaaggaaaataagtgaaattttaaaagtcagcattttcttagacctcttcagctgattgtttatttttctatgaattcctacacatggttattcccccctacttgagataatctaaatataaaccagctacttgatgtaactgagaatttgtgtggatatttatttaaacaaatgtgtaattttgagtacagaattcaacagttacctccaaaaaagaaacattgttaatataatttaacagaagttgtgaaactaaaattttctaagattaactggtagttcattgtaaatgaacataatgaacagaatttatgactccactgtggaaaatgctatcaaataactaaggaatatatatggaataagtgtacatatgtaaaatattgttactagagttagatatgtgccaaagtccatttatcccaaatcctgtctgaaaaggaggggtacattggtaaacattttggagtgcttaaaaatgccaaaaacaaaatggtaatttctactttgataaagtaaaaaagttaaatgtgtgtaaaaaagtgttctgtgtccttctactccagcatcgtctcatgtaaaataagaaagccctaaaatactattggagagaaaaaattaactaggttgctactttatttgcctaaatacttttttctattttgttagattttgcctttcttttggaaggaaggaggcgatattctggattataaaaatgaattgggaacattatcacaattccagactttctattaatatttatgtgttttaataaacgtttgaaattatttatgactacttaaaatgaatctgaccagtgcttcctggtatatgtaatatgtggagttagcccctgaaatttgctttaagtgtttcagtgttgaatctgtttctaaatattcattattacatggtacacaagtgacactccatatattccacacagacttttaccttgctgtattattatgaaaacaatacattaatttgatttttcagtaattagtaattttaggttgaagattatccaaaagaaacaagcttatcacaagggaccatcatcaatatgatccaaatctggttcaaacattcaaaacttcaaagataattcatctttcgctaatgcttgtggttctgttgttcccttgaaaaaaaataaaaacagttgccttctaataaacattgttgagttaaaaattaatctgagctataatctaaatcgattcagtctcttaccagaactgaaagaaaaaagttagaaatagtgtttttggttcatatgattatttaaaaattaaagtataaatcttcaatatgt

SEQ ID NO: 457614 - DNA, 3988 bp, Homo sapiens
  misc_feature (1)..(1): n is a, c, g, or t
  misc_feature (14)..(14): n is a, c, g, or t
  misc_feature (21)..(21): n is a, c, g, or t
  misc_feature (74)..(74): n is a, c, g, or t
  misc_feature (79)..(79): n is a, c, g, or t
naaaactgccatanggctcgncgtgggggtccttccaggtgatggcaagaggaacccaggcaacaacagggaanttaanaggaaagcatatgtggaggcatggaaggatggaaagaaacagccctggagatccctgggaaactgcctaccagttcagagaggggtgtggggggttggtggcactatgtggcgcgtctgtgcgcgacgggctcagaatgtagccccatgggcgggactcgaggctcggtggacggccttgcaggaggtacccggaactccacgagtgacctcgcgatctggcccggctcccgctcgtcgcaacagcgtgactacagggtatggcggggtccgggcactgtgcggctggacccccagttctggggccacgccgcggaaccgcttactgctgcagcttttggggtcgcccggccgccgctattacagtcttcccccgcatcagaaggttccattgccttctctttcccccacaatgcaggcaggcaccatagcccgttgggaaaaaaaagagggggacaaaatcaatgaaggtgacctaattgcagaggttgaaactgataaagccactgttggatttgagagcctggaggagtgttatatggcaaagatacttgttgctgaaggtaccagggatgttcccatcggagcgatcatctgtatcacagttggcaagcctgaggatattgaggcctttaaaaattatacactggattcctcagcagcacctaccccacaagcggccccagcaccaacccctgctgccactgcttcgccacctacaccttctgctcaggctcctggtagctcatatccccctcacatgcaggtacttcttcctgccctctctcccaccatgaccatgggcacagttcagagatgggaaaaaaaagtgggtgagaagctaagtgaaggagacttactggcagagatagaaactgacaaagccactataggttttgaagtacaggaagaaggttatctggcaaaaatcctggtccctgaaggcacaagagatgtccctctaggaaccccactctgtatcattgtagaaaaagaggcagatatatcagcatttgctgactataggccaaccgaagtaacagatttaaaaccacaagtgccaccacctaccccacccccggtggccgctgttcctccaactccccagcctttagctcctacaccttcagcaccctgcccagctactcctgctggaccaaagggaagggtgtttgttagccctcttgcaaagaagttggcagtagagaaagggattgatcttacacaagtaaaagggacaggaccagatggtagaatcaccaagaaggatatcgactcttttgtgcctagtaaagttgctcctgctccggcagctgttgtgcctcccacaggtcctggaatggcaccagttcctacaggtgtcttcacagatatcccaatcagcaacattcgtcgggttattgcacagcgattaatgcaatcaaagcaaaccatacctcattattacctttctatcgatgtaaatatgggagaagttttgttggtacggaaagaacttaataagatattagaagggagaagcaaaatttctgtcaatgacttcatcataaaagcttcagctttggcatgtttaaaagttcccgaagcaaattcttcttggatggacacagttataagacaaaatcatgttgttgatgtcagtgttgcggtcagtactcctgcaggactcatcacacctattgtgtttaatgcacatataaaaggagtggaaaccattgctaatgatgttgtttctttagcaaccaaagcaagagagggtaaactacagccacatgaattccagggtggcacttttacgatctccaatttaggaatgtttggaattaagaatttctctgctattattaacccacctcaagcatgtattttggcaattggtgcttcagaggataaactggtccctgcagataatgaaaaagggtttgatgtggctagcatgatgtctgttacactcagttgtgatcaccgggtggtggatggagcagttggagcccagtggcttgctgagtttagaaagtaccttgaaaaacctatcactatgttgttgtaactaactcaagaatttctaaactctcccaggtcacactgattcattcttaacaagatatttatatgttattaaacaggtggttctttttattttaaccagttatttttattattgagtctgtccagataagttatttataatgggcattactgaatttttaaaatgccgattacacccaaatattgtgcacatttaataatcagacaccagatttttagctctgtactcctaattaagggacatgtatgtggccttgcctagccctttggtgataagtacttcctctaggaaatgtacgataggtagaattgtggttccctaaagacaagtacataaaggtgaccctgatgaaaccttgaagttctgaaatttaactgcctaaaatgttctccttagatgtgagagaaagagaaatcaggaaaattaattctcttgggggaagggcttgaattgaagctttactttagaatttagccctggtttgaaattttccattacatgatcttggtttatcatcgatgggaagggtagaaaacttcaaggaaaataagtgaaattttaaaagtcagcattttcttagacctcttcagctgattgtttatttttctatgaattcctacacatggttattcccccctacttgagataatctaaatataaaccagctacttgatgtaactgagaatttgtgtggatatttatttaaacaaatgtgtaattttgagtacagaattcaacagttacctccaaaaaagaaacattgttaatataatttaacagaagttgtgaaactaaaattttctaagattaactggtagttcattgtaaatgaacataatgaacagaatttatgactccactgtggaaaatgctatcaaataactaaggaatatatatggaataagtgtacatatgtaaaatattgttactagagttagatatgtgccaaagtccatttatcccaaatcctgtctgaaaaggaggggtacattggtaaacattttggagtgcttaaaaatgccaaaaacaaaatggtaatttctactttgataaagtaaaaaagttaaatgtgtgtaaaaaagtgttctgtgtccttctactccagcatcgtctcatgtaaaataagaaagccctaaaatactattggagagaaaaaattaactaggttgctactttatttgcctaaatacttttttctattttgttagattttgcctttcttttggaaggaaggaggcgatattctggattataaaaatgaattgggaacattatcacaattccagactttctattaatatttatgtgttttaataaacgtttgaaattatttatgactacttaaaatgaatctgaccagtgcttcctggtatatgtaatatgtggagttagcccctgaaatttgctttaagtgtttcagtgttgaatctgtttctaaatattcattattacatggtacacaagtgacactccatatattccacacagacttttaccttgctgtattattatgaaaacaatacattaatttgatttttcagtaattagtaattttaggttgaagattatccaaaagaaacaagcttatcacaagggaccatcatcaatatgatccaaatctggttcaaacattcaaaacttcaaagataattcatctttcgctaatgcttgtggttctgttgttcccttgaaaaaaaataaaaacagttgccttctaataaacattgttgagttaaaaattaatctgagctataatctaaatcgattcagtctcttaccagaactgaaagaaaaaagttagaaatagtgtttttggttcatatgattatttaaaaattaaagtataaatcttcaatatgt

SEQ ID NO: 457615 - DNA, 4184 bp, Homo sapiens
  misc_feature (3322)..(3322): n is a, c, g, or t
gaattccgcgccagggccgaccgttcttcctgtactacgcttcccaccacactcactaccctcagttcagtggacaaagcttcaccaagcgctcaggccgtgggccatttggggactccttgatggagctggatggagctgtaggggccttgatgacaactgtgggggacctcggtctgctggaagagacactagtcatcttcactgcagataacggtcctgagttgatgcgcatgtccaatggcggctgctctggcctcttgagatgtggaaaaggaacaacttttgaaggtggcgtccgagagcctgccttggtctactggccaggtcacattactcctggtgtaacccatgagctggccagctctctggacctgctgcccaccctggcagccctgaccggggtccgctgcccaacgtcaccttggatggtgttgacatcagccccttgctgctaggcacaggcaagagcccacggaagtctgtcttcttctacccgccctacccagacgagatccatggggtctttgctgttcggaatgggaaatacaaggctcatttcttcacccagggctccgcccacagtgacaccacttcagatcctgcctgtcatgctgccaaccgtctgacggctcatgagcccccactgctctacgacttatctcaggaccctggggagaactacaatgttttggaaaaccacagagggaagagatgggaaaatggctgtccaggagttttcggaattcggggaaccgcttactgctgcagcttttggggtcgcccggccgccgctattacagtcttcccccgcatcagaaggttccattgccttctctttcccccacaatgcaggcaggcaccatagcccgttgggaaaaaaaagagggggacaaaatcaatgaaggtgacctaattgcagaggttgaaactgataaagccactgttggatttgagagcctggaggagtgttatatggcaaagatacttgttgctgaaggtaccagggatgttcccatcggagcgatcatctgtatcacagttggcaagcctgaggatattgaggcctttaaaaattatacactggattcctcagcagcacctaccccacaagcggccccagcaccaacccctgctgccactgcttcgccacctacaccttctgctcaggctcctggtagctcatatccccctcacatgcaggtacttcttcctgccctctctcccaccatgaccatgggcacagttcagagatgggaaaaaaaagtgggtgagaagctaagtgaaggagacttactggcagagatagaaactgacaaagccactataggttttgaagtacaggaagaaggttatctggcaaaaatcctggtccctgaaggcacaagagatgtccctctaggaaccccactctgtatcattgtagaaaaagaggcagatatatcagcatttgctgactataggccaaccgaagtaacagatttaaaaccacaagtgccaccacctaccccacccccggtggccgctgttcctccaactccccagcctttagctcctacaccttcagcaccctgcccagctactcctgctggaccaaagggaagggtgtttgttagccctcttgcaaagaagttggcagtagagaaagggattgatcttacacaagtaaaagggacaggaccagatggtagaatcaccaagaaggatatcgactcttttgtgcctagtaaagttgctcctgctccggcagctgttgtgcctcccacaggtcctggaatggcaccagttcctacaggtgtcttcacagatatcccaatcagcaacattcgtcgggttattgcacagcgattaatgcaatcaaagcaaaccatacctcattattacctttctatcgatgtaaatatgggagaagttttgttggtacggaaagaacttaataagatattagaagggagaagcaaaatttctgtcaatgacttcatcataaaagcttcagctttggcatgtttaaaagttcccgaagcaaattcttcttggatggacacagttataagacaaaatcatgttgttgatgtcagtgttgcggtcagtactcctgcaggactcatcacacctattgtgtttaatgcacatataaaaggagtggaaaccattgctaatgatgttgtttctttagcaaccaaagcaagagagggtaaactacagccacatgaattccagggtggcacttttacgatctccaatttaggaatgtttggaattaagaatttctctgctattattaacccacctcaagcatgtattttggcaattggtgcttcagaggataaactggtccctgcagataatgaaaaagggtttgatgtggctagcatgatgtctgttacactcagttgtgatcaccgggtggtggatggagcagttggagcccagtggcttgctgagtttagaaagtaccttgaaaaacctatcactatgttgttgtaactaactcaagaatttctaaactctcccaggtcacactgattcattcttaacaagatatttatatgttattaaacaggtggttctttttattttaaccagttatttttattattgagtctgtccagataagttatttataatgggcattactgaatttttaaaatgccgattacacccaaatattgtgcacatttaataatcagacaccagatttttagctctgtactcctaattaagggacatgtatgtggccttgcctagccctttggtgataagtacttcctctaggaaatgtacgataggtagaattgtggttccctaaagacaagtacataaaggtgaccctgatgaaaccttgaagttctgaaatttaactgcctaaaatgttctccttagatgtgagagaaagagaaatcaggaaaattaattctcttgggggaagggcttgaattgaagctttactttagaatttagccctggtttgaaattttccattacatgatcttggtttatcatcgatgggaagggtagaaaacttcaaggaaaataagtgaaattttaaaagtcagcattttcttagacctcttcagctgattgtttatttttctatgaattcctacacatggttattcccccctacttgagataatctaaatataaaccagctacttgatgtaactgagaatttgtgtggatatttatttaaacaaatgtgtaattttgagtacagaattcaacagttacctccaaaaaagaaacattgttaatataatttaacagaagttgtgaaactaaaattttccacagtggagtcataaattctgttcattatgtncatttacaatgaactaccagttaatcttagaaaatggtaatttctactttgataaagtaaaaaagttaaatgtgtgtaaaaaagtgttctgtgtccttctactccagcatcgtctcatgtaaaataagaaagccctaaaatactattggagagaaaaaattaactaggttgctactttatttgcctaaatacttttttctattttgttagattttgcctttcttttggaaggaaggaggcgatattctggattataaaaatgaattgggaacattatcacaattccagactttctattaatatttatgtgttttaataaacgtttgaaattatttatgactacttaaaatgaatctgaccagtgcttcctggtatatgtaatatgtggagttagcccctgaaatttgctttaagtgtttcagtgttgaatctgtttctaaatattcattattacatggtacacaagtgacactccatatattccacacagacttttaccttgctgtattattatgaaaacaatacattaatttgatttttcagtaattagtaattttaggttgaagattatccaaaagaaacaagcttatcacaagggaccatcatcaatatgatccaaatctggttcaaacattcaaaacttcaaagataattcatctttcgctaatgcttgtggttctgttgttcccttgaaaaaaaataaaaacagttgccttctaataaacattgttgagttaaaaattaatctgagctataatctaaatcgattcagtctcttaccagaactgaaagaaaaaagttagaaatagtgtttttggttcatatgattatttaaaaattaaagtataaatcttcaatatgt

SEQ ID NO: 457616 - DNA, 3534 bp, Homo sapiens
tccggagacggcgttggttttggggtgtggggggttggtggcactatgtggcgcgtctgtgcgcgacgggctcagaatgtagccccatgggcgggactcgaggctcggtggacggccttgcaggaggtacccggaactccacgagtgacctcgcgatctggcccggctcccgctcgtcgcaacagcgtgactacagggtatggcggggtccgggcactgtgcggctggacccccagttctggggccacgccgcggaaccgcttactgctgcagcttttggggtcgcccggccgccgctattacagtcttcccccgcatcagaaggttccattgccttctctttcccccacaatgcaggcaggcaccatagcccgttgggaaaaaaaagagggggacaaaatcaatgaaggtgacctaattgcagaggttgaaactgataaagccactgttggatttgagagcctggaggagtgttatatggcaaagatacttgttgctgaaggtaccagggatgttcccatcggagcgatcatctgtatcacagttggcaagcctgaggatattgaggcctttaaaaattatacactggattcctcagcagcacctaccccacaagcggccccagcaccaacccctgctgccactgcttcgccacctacaccttctgctcaggctcctggtagctcatatccccctcacatgcaggtggccgctgttcctccaactccccagcctttagctcctacaccttcagcaccctgcccagctactcctgctggaccaaagggaagggtgtttgttagccctcttgcaaagaagttggcagtagagaaagggattgatcttacacaagtaaaagggacaggaccagatggtagaatcaccaagaaggatatcgactcttttgtgcctagtaaagttgctcctgctccggcagctgttgtgcctcccacaggtcctggaatggcaccagttcctacaggtgtcttcacagatatcccaatcagcaacattcgtcgggttattgcacagcgattaatgcaatcaaagcaaaccatacctcattattacctttctatcgatgtaaatatgggagaagttttgttggtacggaaagaacttaataagatattagaagggagaagcaaaatttctgtcaatgacttcatcataaaagcttcagctttggcatgtttaaaagttcccgaagcaaattcttcttggatggacacagttataagacaaaatcatgttgttgatgtcagtgttgcggtcagtactcctgcaggactcatcacacctattgtgtttaatgcacatataaaaggagtggaaaccattgctaatgatgttgtttctttagcaaccaaagcaagagagggtaaactacagccacatgaattccagggtggcacttttacgatctccaatttaggaatgtttggaattaagaatttctctgctattattaacccacctcaagcatgtattttggcaattggtgcttcagaggataaactggtccctgcagataatgaaaaagggtttgatgtggctagcatgatgtctgttacactcagttgtgatcaccgggtggtggatggagcagttggagcccagtggcttgctgagtttagaaagtaccttgaaaaacctatcactatgttgttgtaactaactcaagaatttctaaactctcccaggtcacactgattcattcttaacaagatatttatatgttattaaacaggtggttctttttattttaaccagttatttttattattgagtctgtccagataagttatttataatgggcattactgaatttttaaaatgccgattacacccaaatattgtgcacatttaataatcagacaccagatttttagctctgtactcctaattaagggacatgtatgtggccttgcctagccctttggtgataagtacttcctctaggaaatgtacgataggtagaattgtggttccctaaagacaagtacataaaggtgaccctgatgaaaccttgaagttctgaaatttaactgcctaaaatgttctccttagatgtgagagaaagagaaatcaggaaaattaattctcttgggggaagggcttgaattgaagctttactttagaatttagccctggtttgaaattttccattacatgatcttggtttatcatcgatgggaagggtagaaaacttcaaggaaaataagtgaaattttaaaagtcagcattttcttagacctcttcagctgattgtttatttttctatgaattcctacacatggttattcccccctacttgagataatctaaatataaaccagctacttgatgtaactgagaatttgtgtggatatttatttaaacaaatgtgtaattttgagtacagaattcaacagttacctccaaaaaagaaacattgttaatataatttaacagaagttgtgaaactaaaattttctaagattaactggtagttcattgtaaatgaacataatgaacagaatttatgactccactgtggaaaatgctatcaaataactaaggaatatatatggaataagtgtacatatgtaaaatattgttactagagttagatatgtgccaaagtccatttatcccaaatcctgtctgaaaaggaggggtacattggtaaacattttggagtgcttaaaaatgccaaaaacaaaatggtaatttctactttgataaagtaaaaaagttaaatgtgtgtaaaaaagtgttctgtgtccttctactccagcatcgtctcatgtaaaataagaaagccctaaaatactattggagagaaaaaattaactaggttgctactttatttgcctaaatacttttttctattttgttagattttgcctttcttttggaaggaaggaggcgatattctggattataaaaatgaattgggaacattatcacaattccagactttctattaatatttatgtgttttaataaacgtttgaaattatttatgactacttaaaatgaatctgaccagtgcttcctggtatatgtaatatgtggagttagcccctgaaatttgctttaagtgtttcagtgttgaatctgtttctaaatattcattattacatggtacacaagtgacactccatatattccacacagacttttaccttgctgtattattatgaaaacaatacattaatttgatttttcagtaattagtaattttaggttgaagattatccaaaagaaacaagcttatcacaagggaccatcatcaatatgatccaaatctggttcaaacattcaaaacttcaaagataattcatctttcgctaatgcttgtggttctgttgttcccttgaaaaaaaataaaaacagttgccttctaataaacattgttgagttaaaaattaatctgagctataatctaaatcgattcagtctcttaccagaactgaaagaaaaaagttagaaatagtgtttttggttcatatgattatttaaaaattaaagtataaatcttcaatatgt

SEQ ID NO: 457617 - DNA, 350 bp, Homo sapiens
gccccgtctcaccctttcggatgcctcccctagaaccctaccactttccacccctttccgtctgttatttctcccaaacttgcgcccgcacaggcccctctggaacactcctgccccgtagtgcccctcgtccccgctccgtagagaaagagcgtgcgtgccgcgcatttctggcctggggagcgggtggagtaaacctgcgggaaccattttacgacaacgtgcggctgtgcggtgtggctgacggcaacgccgctgctcttggagaggtcactccggagacggcgttggttttggggtgtggggggttggtggcactatgtggcgcgtctgtgcgcgacgggctcaga

SEQ ID NO: 457618 - DNA, 1017 bp, Homo sapiens
agcggagcgtgctcagcattcagggaggcagcggcgctcgccttcatccaggacaacaaaactgccatttccgaagagaaaggaaacggctcgcggtttctggggttcccaagcgcgcgcctgcgagggaggccgcgagccgagtcgccacgcccagaaccccgagcccgcccccgcgccacccagcccggccccgccgccccggctgcgcacgcgacgccccctccaggccccgctcctgcgccctatttggtcattcggggggcaagcggcgggaggggaaacgtgcgcggccgaaggggaagcggagccggcgccggctgcgcagaggagccgctctcgccgccgccacctcggctgggagcccacgaggctgccgcatcctgccctcggaacaatgggactcggcgcgcgaggtgcttgggccgcgctgctcctggggacgctgcaggtgctagcgctgctgggggccgcccatgaaagcgcagccatggcggcatctgcaaacatagagaattctgggcttccacacaactccagtgctaactcaacagagactctccaacatgtgccttctgaccatacaaatgaaacttccaacagtactgtgaaaccaccaacttcagttgcctcagactccagtaatacaacggtcaccaccatgaaacctacagcggcatctaatacaacaacaccagggatggtctcaacaaatatgacttctaccaccttaaagtctacacccaaaacaacaagtgtttcacagaacacatctcagatatcaacatccacaatgaccgtaacccacaatagttcagtgacatctgctgcttcatcagtaacaagtatgtattaaagctgaccttttttttcctatgctgcaagtagttaaatgccacatttaagtcattattctgtctggcaaaaataatatagaaactttatatgcctagatttcccttaattcctaattaaatgttcttaacacagaaaatcagagagctttaattacaatgt

SEQ ID NO: 457619 - DNA, 3967 bp, Homo sapiens
agcggagcgtgctcagcattcagggaggcagcggcgctcgccttcatccaggacaacaaaactgccatttccgaagagaaaggaaacggctcgcggtttctggggttcccaagcgcgcgcctgcgagggaggccgcgagccgagtcgccacgcccagaaccccgagcccgcccccgcgccacccagcccggccccgccgccccggctgcgcacgcgacgccccctccaggccccgctcctgcgccctatttggtcattcggggggcaagcggcgggaggggaaacgtgcgcggccgaaggggaagcggagccggcgccggctgcgcagaggagccgctctcgccgccgccacctcggctgggagcccacgaggctgccgcatcctgccctcggaacaatgggactcggcgcgcgaggtgcttgggccgcgctgctcctggggacgctgcaggtgctagcgctgctgggggccgcccatgaaagcgcagccatggcggcatctgcaaacatagagaattctgggcttccacacaactccagtgctaactcaacagagactctccaacatgtgccttctgaccatacaaatgaaacttccaacagtactgtgaaaccaccaacttcagttgcctcagactccagtaatacaacggtcaccaccatgaaacctacagcggcatctaatacaacaacaccagggatggtctcaacaaatatgacttctaccaccttaaagtctacacccaaaacaacaagtgtttcacagaacacatctcagatatcaacatccacaatgaccgtaacccacaatagttcagtgacatctgctgcttcatcagtaacaatcacaacaactatgcattctgaagcaaagaaaggatcaaaatttgatactgggagctttgttggtggtattgtattaacgctgggagttttatctattctttacattggatgcaaaatgtattactcaagaagaggcattcggtatcgaaccatagatgaacatgatgccatcatttaaggaaatccatggaccaaggatggaatacagattgatgctgccctatcaattaattttggtttattaatagtttaaaacaatattctctttttgaaaatagtataaacaggccatgcatataatgtacagtgtattacgtaaatatgtaaagattcttcaaggtaacaagggtttgggttttgaaataaacatctggatcttatagaccgttcatacaatggttttagcaagttcatagtaagacaaacaagtcctatctttttttttttggctggggtgggggcattggtcacatatgaccagtaattgaaagacgtcatcactgaaagacagaatgccatctgggcatacaaataagaagtttgtcacagcactcaggattttgggtatcttttgtagctcacataaagaacttcagtgcttttcagagctggatatatcttaattactaatgccacacagaaattatacaatcaaactagatctgaagcataatttaagaaaaacatcaacattttttgtgctttaaactgtagtagttggtctagaaacaaaatactccaagaaaaagaaaattttcaaataaaacccaaaataatagctttgcttagccctgttagggatccattggagcattaaggagcacatatttttattaacttcttttgagctttcaatgttgatgtaatttttgttctctgtgtaatttaggtaaactgcagtgtttaacataataatgttttaaagacttagttgtcagtattaaataatcctggcattatagggaaaaaacctcctagaagttagattatttgctactgtgagaatattgtcaccactggaagttactttagttcatttaattttaattttatattttgtgaatattttaagaactgtagagctgctttcaatatctagaaatttttaattgagtgtaaacacacctaactttaagaaaaagaaccgcttgtatgattttcaaaagaacatttagaattctatagagtcaaaactatagcgtaatgctgtgtttattaagccagggattgtgggacttcccccaggcaactaaacctgcaggatgaaaatgctatattttctttcatgcactgtcgatattactcagatttggggaaatgacatttttatactaaaacaaacaccaaaatattttagaataaattcttagaaagttttgagaggaatttttagagaggacatttcctccttcctgatttggatattccctcaaatccctcctcttactccatgctgaaggagaagtactctcagatgcattatgttaatggagagaaaaagcacagtattgtagagacaccaatattagctaatgtattttggagtgttttccattttacagtttatattccagcactcaaaactcagggtcaagttttaacaaaagaggtatgtagtcacagtaaatactaagatggcatttctatctcagagggccaaagtgaatcacaccagtttctgaaggtcctaaaaatagctcagatgtcctaatgaacatgcacctacatttaataggagtacaataaaactgttgtcagcttttgttttacagagaacgctagatattaagaattttgaaatggatcatttctacttgctgtgcattttaaccaataatctgatgaatatagaaaaaaatgatccaaaatatggatatgattggatgtatgtaacacatacatggagtatggaggaaattttctgaaaaatacatttagattagtttagtttgaaggagaggtgggctgatggctgagttgtatgttactaacttggccctgactggttgtgcaaccattgcttcatttctttgcaaaatgtagttaagatatactttattctaatgaaggccttttaaatttgtccactgcattcttggtatttcactacttcaagtcagtcagaacttcgtagaccgacctgaagtttctttttgaatacttgtttctttagcactttgaagatagaaaaaccactttttaagtactaagtcatcatttgccttgaaagtttcctctgcattgggtttgaagtagtttagttatgtctttttctctgtatgtaagtagtataatttgttactttcaaatacccgtactttgaatgtaggtttttttgttgttgttatctataaaaattgagggaaatggttatgcaaaaaaatattttgctttggaccatatttcttaagcataaaaaaaatgctcagttttgcttgcattccttgagaatgtatttatctgaagatcaaaacaaacaatccagatgtataagtactaggcagaagccaattttaaaatttccttgaataatccatgaaaggaataattcaaatacagataaacagagttggcagtatattatagtgataattttgtattttcacaaaaaaaaagttaaactcttcttttctttttattataatgaccagcttttggtatttcattgttaccaagttctatttttagaataaaattgttctccttctaaaagttaaaaaaaaaaaaaaaaaaaaaaaaaaaaaaaaaaaaaaaaaaaaaaaaaaaaaaaaaaaaaaaaaaaaaaaaaaaaaaaaaaaaaaaaaaaaacttgaaggaagcaaagttcaaaatgcttttaaaattggggatgctttggcaagcccccccaatttggggctctcttgacaatttacccttatggggattccaatggcaattaatgtgaaaacccttttaaaaccccaatttttggaaaaacctggggggtcccccaaataaatgggtttggaaaaaacccggtgttccccaactgtcgtcctttccaaaaagttcccacttttgagcctttaccgaaaaattgtaaagcccaaattgcaatgggaatttgggtttatttttggttaaatttggtccatggggc

SEQ ID NO: 457620 - DNA, 4082 bp, Homo sapiens
  misc_feature (3624)..(3624): n is a, c, g, or t
  misc_feature (3641)..(3642): n is a, c, g, or t
  misc_feature (3682)..(3682): n is a, c, g, or t
  misc_feature (3688)..(3689): n is a, c, g, or t
  misc_feature (3696)..(3697): n is a, c, g, or t
  misc_feature (3708)..(3708): n is a, c, g, or t
  misc_feature (3710)..(3710): n is a, c, g, or t
  misc_feature (3725)..(3725): n is a, c, g, or t
  misc_feature (3730)..(3731): n is a, c, g, or t
  misc_feature (3737)..(3738): n is a, c, g, or t
  misc_feature (3743)..(3743): n is a, c, g, or t
  misc_feature (3747)..(3747): n is a, c, g, or t
  misc_feature (3749)..(3754): n is a, c, g, or t
  misc_feature (3756)..(3756): n is a, c, g, or t
  misc_feature (3759)..(3759): n is a, c, g, or t
  misc_feature (3772)..(3772): n is a, c, g, or t
  misc_feature (3785)..(3786): n is a, c, g, or t
  misc_feature (3789)..(3789): n is a, c, g, or t
  misc_feature (3792)..(3792): n is a, c, g, or t
  misc_feature (3794)..(3794): n is a, c, g, or t
  misc_feature (3796)..(3796): n is a, c, g, or t
  misc_feature (3800)..(3800): n is a, c, g, or t
  misc_feature (3808)..(3808): n is a, c, g, or t
  misc_feature (3810)..(3811): n is a, c, g, or t
  misc_feature (3825)..(3825): n is a, c, g, or t
  misc_feature (3835)..(3835): n is a, c, g, or t
  misc_feature (3839)..(3839): n is a, c, g, or t
  misc_feature (3842)..(3842): n is a, c, g, or t
  misc_feature (3849)..(3849): n is a, c, g, or t
  misc_feature (3855)..(3856): n is a, c, g, or t
  misc_feature (3862)..(3862): n is a, c, g, or t
  misc_feature (3865)..(3865): n is a, c, g, or t
  misc_feature (3869)..(3870): n is a, c, g, or t
  misc_feature (3877)..(3877): n is a, c, g, or t
  misc_feature (3879)..(3879): n is a, c, g, or t
  misc_feature (3882)..(3882): n is a, c, g, or t
  misc_feature (3885)..(3885): n is a, c, g, or t
  misc_feature (3888)..(3888): n is a, c, g, or t
  misc_feature (3891)..(3891): n is a, c, g, or t
  misc_feature (3895)..(3895): n is a, c, g, or t
  misc_feature (3907)..(3908): n is a, c, g, or t
agcggagcgtgctcagcattcagggaggcagcggcgctcgccttcatccaggacaacaaaactgccatttccgaagagaaaggaaacggctcgcggtttctggggttcccaagcgcgcgcctgcgagggaggccgcgagccgagtcgccacgcccagaaccccgagcccgcccccgcgccacccagcccggccccgccgccccggctgcgcacgcgacgccccctccaggccccgctcctgcgccctatttggtcattcggggggcaagcggcgggaggggaaacgtgcgcggccgaaggggaagcggagccggcgccggctgcgcagaggagccgctctcgccgccgccacctcggctgggagcccacgaggctgccgcatcctgccctcggaacaatgggactcggcgcgcgaggtgcttgggccgcgctgctcctggggacgctgcaggtgctagcgctgctgggggccgcccatgaaagcgcagccatggcggagactctccaacatgtgccttctgaccatacaaatgaaacttccaacagtactgtgaaaccaccaacttcagttgcctcagactccagtaatacaacggtcaccaccatgaaacctacagcggcatctaatacaacaacaccagggatggtctcaacaaatatgacttctaccaccttaaagtctacacccaaaacaacaagtgtttcacagaacacatctcagatatcaacatccacaatgaccgtaacccacaatagttcagtgacatctgctgcttcatcagtaacaatcacaacaactatgcattctgaagcaaagaaaggatcaaaatttgatactgggagctttgttggtggtattgtattaacgctgggagttttatctattctttacattggatgcaaaatgtattactcaagaagaggcattcggtatcgaaccatagatgaacatgatgccatcatttaaggaaatccatggaccaaggatggaatacagattgatgctgccctatcaattaattttggtttattaatagtttaaaacaatattctctttttgaaaatagtataaacaggccatgcatataatgtacagtgtattacgtaaatatgtaaagattcttcaaggtaacaagggtttgggttttgaaataaacatctggatcttatagaccgttcatacaatggttttagcaagttcatagtaagacaaacaagtcctatctttttttttttggctggggtgggggcattggtcacatatgaccagtaattgaaagacgtcatcactgaaagacagaatgccatctgggcatacaaataagaagtttgtcacagcactcaggattttgggtatcttttgtagctcacataaagaacttcagtgcttttcagagctggatatatcttaattactaatgccacacagaaattatacaatcaaactagatctgaagcataatttaagaaaaacatcaacattttttgtgctttaaactgtagtagttggtctagaaacaaaatactccaagaaaaagaaaattttcaaataaaacccaaaataatagctttgcttagccctgttagggatccattggagcattaaggagcacatatttttattaacttcttttgagctttcaatgttgatgtaatttttgttctctgtgtaatttaggtaaactgcagtgtttaacataataatgttttaaagacttagttgtcagtattaaataatcctggcattatagggaaaaaacctcctagaagttagattatttgctactgtgagaatattgtcaccactggaagttactttagttcatttaattttaattttatattttgtgaatattttaagaactgtagagctgctttcaatatctagaaatttttaattgagtgtaaacacacctaactttaagaaaaagaaccgcttgtatgattttcaaaagaacatttagaattctatagagtcaaaactatagcgtaatgctgtgtttattaagccagggattgtgggacttcccccaggcaactaaacctgcaggatgaaaatgctatattttctttcatgcactgtcgatattactcagatttggggaaatgacatttttatactaaaacaaacaccaaaatattttagaataaattcttagaaagttttgagaggaatttttagagaggacatttcctccttcctgatttggatattccctcaaatccctcctcttactccatgctgaaggagaagtactctcagatgcattatgttaatggagagaaaaagcacagtattgtagagacaccaatattagctaatgtattttggagtgttttccattttacagtttatattccagcactcaaaactcagggtcaagttttaacaaaagaggtatgtagtcacagtaaatactaagatggcatttctatctcagagggccaaagtgaatcacaccagtttctgaaggtcctaaaaatagctcagatgtcctaatgaacatgcacctacatttaataggagtacaataaaactgttgtcagcttttgttttacagagaacgctagatattaagaattttgaaatggatcatttctacttgctgtgcattttaaccaataatctgatgaatatagaaaaaaatgatccaaaatatggatatgattggatgtatgtaacacatacatggagtatggaggaaattttctgaaaaatacatttagattagtttagtttgaaggagaggtgggctgatggctgagttgtatgttactaacttggccctgactggttgtgcaaccattgcttcatttctttgcaaaatgtagttaagatatactttattctaatgaaggccttttaaatttgtccactgcattcttggtatttcactacttcaagtcagtcagaacttcgtagaccgacctgaagtttctttttgaatacttgtttctttagcactttgaagatagaaaaaccactttttaagtactaagtcatcatttgccttgaaagtttcctctgcattgggtttgaagtagtttagttatgtctttttctctgtatgtaagtagtataatttgttactttcaaatacccgtactttgaatgtaggtttttttgttgttgttatctataaaaattgagggaaatggttatgcaaaaaaatattttgctttggaccatatttcttaagcataaaaaaaatgctcagttttgcttgcattccttgagaatgtatttatctgaagatcaaaacaaacaatccagatgtataagtactaggcagaagccaattttaaaatttccttgaataatccatgaaaggaataattcaaatacagataaacagagttggcagtatattatagtgataattttgtattttcacaaaaaaaaagttaaactcttcttttctttttattataatgaccagcttttggtatttcattgttaccaagttctatttttagaataaaattgttctccttctaaaagttaaaaaaaaaaaaaaaaaaaaaaaaaaaaaaaaaaaaaaaaaaaaaaaaaaaaaaaaaaaaaaaaaaaaaaaaaaaaaaaaaaaaaaaaaaaaaaaaaaaaaaaaaaaaaaaaaaattttnggcccttttggcccaannatttttaaactcgaaaaatttttttaatggggcccaattnggggcnnatttggnnaattccccctntnggggggcgtttaaanataannggcccnnttttntaanannnnnngnttnggaaaaccctggnttcccaaattaanngcnttngnanaaancccctttncnnaattgggaaatacnaaaaggcccnaccngtngcctttncaaaanntggcanccntaannggcaatngnaanttnaangcntaantttttgaaaaannccggtaaaaattttttaaatcacgtctttttttaaccaaatggcccaaattgtaaattcctttttaattaaaaaaattcacccttaaggtgttagagtttctccattttgaacaagattcccttttttaaaaaacggggctctaaccttgtgctacccttttttgggcgtgcct

SEQ ID NO: 457621 - DNA, 4098 bp, Homo sapiens
  misc_feature (3640)..(3640): n is a, c, g, or t
  misc_feature (3657)..(3658): n is a, c, g, or t
  misc_feature (3698)..(3698): n is a, c, g, or t
  misc_feature (3704)..(3705): n is a, c, g, or t
  misc_feature (3712)..(3713): n is a, c, g, or t
  misc_feature (3724)..(3724): n is a, c, g, or t
  misc_feature (3726)..(3726): n is a, c, g, or t
  misc_feature (3741)..(3741): n is a, c, g, or t
  misc_feature (3746)..(3747): n is a, c, g, or t
  misc_feature (3753)..(3754): n is a, c, g, or t
  misc_feature (3759)..(3759): n is a, c, g, or t
  misc_feature (3763)..(3763): n is a, c, g, or t
  misc_feature (3765)..(3770): n is a, c, g, or t
  misc_feature (3772)..(3772): n is a, c, g, or t
  misc_feature (3775)..(3775): n is a, c, g, or t
  misc_feature (3788)..(3788): n is a, c, g, or t
  misc_feature (3801)..(3802): n is a, c, g, or t
  misc_feature (3805)..(3805): n is a, c, g, or t
  misc_feature (3808)..(3808): n is a, c, g, or t
  misc_feature (3810)..(3810): n is a, c, g, or t
  misc_feature (3812)..(3812): n is a, c, g, or t
  misc_feature (3816)..(3816): n is a, c, g, or t
  misc_feature (3824)..(3824): n is a, c, g, or t
  misc_feature (3826)..(3827): n is a, c, g, or t
  misc_feature (3841)..(3841): n is a, c, g, or t
  misc_feature (3851)..(3851): n is a, c, g, or t
  misc_feature (3855)..(3855): n is a, c, g, or t
  misc_feature (3858)..(3858): n is a, c, g, or t
  misc_feature (3865)..(3865): n is a, c, g, or t
  misc_feature (3871)..(3872): n is a, c, g, or t
  misc_feature (3878)..(3878): n is a, c, g, or t
  misc_feature (3881)..(3881): n is a, c, g, or t
  misc_feature (3885)..(3886): n is a, c, g, or t
  misc_feature (3893)..(3893): n is a, c, g, or t
  misc_feature (3895)..(3895): n is a, c, g, or t
  misc_feature (3898)..(3898): n is a, c, g, or t
  misc_feature (3901)..(3901): n is a, c, g, or t
  misc_feature (3904)..(3904): n is a, c, g, or t
  misc_feature (3907)..(3907): n is a, c, g, or t
  misc_feature (3911)..(3911): n is a, c, g, or t
  misc_feature (3923)..(3924): n is a, c, g, or t
agcggagcgtgctcagcattcagggaggcagcggcgctcgccttcatccaggacaacaaaactgccatttccgaagagaaaggaaacggctcgcggtttctggggttcccaagcgcgcgcctgcgagggaggccgcgagccgagtcgccacgcccagaaccccgagcccgcccccgcgccacccagcccggccccgccgccccggctgcgcacgcgacgccccctccaggccccgctcctgcgccctatttggtcattcggggggcaagcggcgggaggggaaacgtgcgcggccgaaggggaagcggagccggcgccggctgcgcagaggagccgctctcgccgccgccacctcggctgggagcccacgaggctgccgcatcctgccctcggaacaatgggactcggcgcgcgaggtgcttgggccgcgctgctcctggggacgctgcaggtgctagcgctgctgggggccgcccatgaaagcgcagccatggcggcatctgcaaacatagagaattctgggcttccacacaactccagtgctaactcaacagagactctccaacatgtgccttctgaccatacaaatgaaacttccaacagtactgtgaaaccaccaacttcagttgcctcagactccagtaatacaacggtcaccaccatgaaacctacagcggcatctaatacaacaacaccagggatggtctcaacaaatatgacttctaccaccttaaagtctacacccaaaacaacaagtgtttcacagaacacatctcagatatcaacatccacaatgaccgtaacccacaatagttcagtgacatctgctgcttcatcagtaacaatcacaacaactatgcattctgaagcaaagaaaggatcaaaatttgatactgggagctttgttggtggtattgtattaacgctgggagttttatctattctttacattggatgcagatgaacatgatgccatcatttaaggaaatccatggaccaaggatggaatacagattgatgctgccctatcaattaattttggtttattaatagtttaaaacaatattctctttttgaaaatagtataaacaggccatgcatataatgtacagtgtattacgtaaatatgtaaagattcttcaaggtaacaagggtttgggttttgaaataaacatctggatcttatagaccgttcatacaatggttttagcaagttcatagtaagacaaacaagtcctatctttttttttttggctggggtgggggcattggtcacatatgaccagtaattgaaagacgtcatcactgaaagacagaatgccatctgggcatacaaataagaagtttgtcacagcactcaggattttgggtatcttttgtagctcacataaagaacttcagtgcttttcagagctggatatatcttaattactaatgccacacagaaattatacaatcaaactagatctgaagcataatttaagaaaaacatcaacattttttgtgctttaaactgtagtagttggtctagaaacaaaatactccaagaaaaagaaaattttcaaataaaacccaaaataatagctttgcttagccctgttagggatccattggagcattaaggagcacatatttttattaacttcttttgagctttcaatgttgatgtaatttttgttctctgtgtaatttaggtaaactgcagtgtttaacataataatgttttaaagacttagttgtcagtattaaataatcctggcattatagggaaaaaacctcctagaagttagattatttgctactgtgagaatattgtcaccactggaagttactttagttcatttaattttaattttatattttgtgaatattttaagaactgtagagctgctttcaatatctagaaatttttaattgagtgtaaacacacctaactttaagaaaaagaaccgcttgtatgattttcaaaagaacatttagaattctatagagtcaaaactatagcgtaatgctgtgtttattaagccagggattgtgggacttcccccaggcaactaaacctgcaggatgaaaatgctatattttctttcatgcactgtcgatattactcagatttggggaaatgacatttttatactaaaacaaacaccaaaatattttagaataaattcttagaaagttttgagaggaatttttagagaggacatttcctccttcctgatttggatattccctcaaatccctcctcttactccatgctgaaggagaagtactctcagatgcattatgttaatggagagaaaaagcacagtattgtagagacaccaatattagctaatgtattttggagtgttttccattttacagtttatattccagcactcaaaactcagggtcaagttttaacaaaagaggtatgtagtcacagtaaatactaagatggcatttctatctcagagggccaaagtgaatcacaccagtttctgaaggtcctaaaaatagctcagatgtcctaatgaacatgcacctacatttaataggagtacaataaaactgttgtcagcttttgttttacagagaacgctagatattaagaattttgaaatggatcatttctacttgctgtgcattttaaccaataatctgatgaatatagaaaaaaatgatccaaaatatggatatgattggatgtatgtaacacatacatggagtatggaggaaattttctgaaaaatacatttagattagtttagtttgaaggagaggtgggctgatggctgagttgtatgttactaacttggccctgactggttgtgcaaccattgcttcatttctttgcaaaatgtagttaagatatactttattctaatgaaggccttttaaatttgtccactgcattcttggtatttcactacttcaagtcagtcagaacttcgtagaccgacctgaagtttctttttgaatacttgtttctttagcactttgaagatagaaaaaccactttttaagtactaagtcatcatttgccttgaaagtttcctctgcattgggtttgaagtagtttagttatgtctttttctctgtatgtaagtagtataatttgttactttcaaatacccgtactttgaatgtaggtttttttgttgttgttatctataaaaattgagggaaatggttatgcaaaaaaatattttgctttggaccatatttcttaagcataaaaaaaatgctcagttttgcttgcattccttgagaatgtatttatctgaagatcaaaacaaacaatccagatgtataagtactaggcagaagccaattttaaaatttccttgaataatccatgaaaggaataattcaaatacagataaacagagttggcagtatattatagtgataattttgtattttcacaaaaaaaaagttaaactcttcttttctttttattataatgaccagcttttggtatttcattgttaccaagttctatttttagaataaaattgttctccttctaaaagttaaaaaaaaaaaaaaaaaaaaaaaaaaaaaaaaaaaaaaaaaaaaaaaaaaaaaaaaaaaaaaaaaaaaaaaaaaaaaaaaaaaaaaaaaaaaaaaaaaaaaaaaaaaaaaaaaaattttnggcccttttggcccaannatttttaaactcgaaaaatttttttaatggggcccaattnggggcnnatttggnnaattccccctntnggggggcgtttaaanataannggcccnnttttntaanannnnnngnttnggaaaaccctggnttcccaaattaanngcnttngnanaaancccctttncnnaattgggaaatacnaaaaggcccnaccngtngcctttncaaaanntggcanccntaannggcaatngnaanttnaangcntaantttttgaaaaannccggtaaaaattttttaaatcacgtctttttttaaccaaatggcccaaattgtaaattcctttttaattaaaaaaattcacccttaaggtgttagagtttctccattttgaacaagattcccttttttaaaaaacggggctctaaccttgtgctacccttttttgggcgtgcct

SEQ ID NO: 457622 - DNA, 4085 bp, Homo sapiens
  misc_feature (3627)..(3627): n is a, c, g, or t
  misc_feature (3644)..(3645): n is a, c, g, or t
  misc_feature (3685)..(3685): n is a, c, g, or t
  misc_feature (3691)..(3692): n is a, c, g, or t
  misc_feature (3699)..(3700): n is a, c, g, or t
  misc_feature (3711)..(3711): n is a, c, g, or t
  misc_feature (3713)..(3713): n is a, c, g, or t
  misc_feature (3728)..(3728): n is a, c, g, or t
  misc_feature (3733)..(3734): n is a, c, g, or t
  misc_feature (3740)..(3741): n is a, c, g, or t
  misc_feature (3746)..(3746): n is a, c, g, or t
  misc_feature (3750)..(3750): n is a, c, g, or t
  misc_feature (3752)..(3757): n is a, c, g, or t
  misc_feature (3759)..(3759): n is a, c, g, or t
  misc_feature (3762)..(3762): n is a, c, g, or t
  misc_feature (3775)..(3775): n is a, c, g, or t
  misc_feature (3788)..(3789): n is a, c, g, or t
  misc_feature (3792)..(3792): n is a, c, g, or t
  misc_feature (3795)..(3795): n is a, c, g, or t
  misc_feature (3797)..(3797): n is a, c, g, or t
  misc_feature (3799)..(3799): n is a, c, g, or t
  misc_feature (3803)..(3803): n is a, c, g, or t
  misc_feature (3811)..(3811): n is a, c, g, or t
  misc_feature (3813)..(3814): n is a, c, g, or t
  misc_feature (3828)..(3828): n is a, c, g, or t
  misc_feature (3838)..(3838): n is a, c, g, or t
  misc_feature (3842)..(3842): n is a, c, g, or t
  misc_feature (3845)..(3845): n is a, c, g, or t
  misc_feature (3852)..(3852): n is a, c, g, or t
  misc_feature (3858)..(3859): n is a, c, g, or t
  misc_feature (3865)..(3865): n is a, c, g, or t
  misc_feature (3868)..(3868): n is a, c, g, or t
  misc_feature (3872)..(3873): n is a, c, g, or t
  misc_feature (3880)..(3880): n is a, c, g, or t
  misc_feature (3882)..(3882): n is a, c, g, or t
  misc_feature (3885)..(3885): n is a, c, g, or t
  misc_feature (3888)..(3888): n is a, c, g, or t
  misc_feature (3891)..(3891): n is a, c, g, or t
  misc_feature (3894)..(3894): n is a, c, g, or t
  misc_feature (3898)..(3898): n is a, c, g, or t
  misc_feature (3910)..(3911): n is a, c, g, or t
agcggagcgtgctcagcattcagggaggcagcggcgctcgccttcatccaggacaacaaaactgccatttccgaagagaaaggaaacggctcgcggtttctggggttcccaagcgcgcgcctgcgagggaggccgcgagccgagtcgccacgcccagaaccccgagcccgcccccgcgccacccagcccggccccgccgccccggctgcgcacgcgacgccccctccaggccccgctcctgcgccctatttggtcattcggggggcaagcggcgggaggggaaacgtgcgcggccgaaggggaagcggagccggcgccggctgcgcagaggagccgctctcgccgccgccacctcggctgggagcccacgaggctgccgcatcctgccctcggaacaatgggactcggcgcgcgaggtgcttgggccgcgctgctcctggggacgctgcaggtgctagcgctgctgggggccgcccatgaaagcgcagccatggcggcatctgcaaacatagagaattctgggcttccacacaactccagtgctaactcaacagagactctccaacatgtgccttctgaccatacaaatgaaacttccaacagtactgtgaaaccaccaacttcagttgcctcagactccagtaatacaacggtcaccaccatgaaacctacagcggcatctaatacaacaacaccagggatggtctcaacaaatatgacttctaccaccttaaagtctacacccaaaacaacaagtgtttcacagaacacatctcagatatcaacatccacaatgaccgtaacccacaatagttcagtgacatctgctgcttcatcagtaacaatcacaacaactatgcattctgaagcaaagaaaggatcaaaatttgatactgggagctttgttggtggtattgtattaacgctgggagttttatctattctttacattggatgcaaaatgtattactcaagaagaggcattcggtatcgaaccatagatgaacatgatgccatcatttaaggaaatccatggaccaaggatggaatacagattgatgctgccctatcaattaattttggtttattaatagtttaaaacaatattctctttttgaaaatagtataaacaggccatgcatataatgtacagtgtattacgtaaatatgtaaagattcttcaaggtaacaagggtttgggttttgaaataaacatctggatcttatagaccgttcatacaatggttttagcaagttcatagtaagacaaacaagtcctatctttttttttttggctggggtgggggcattggtcacatatgaccagtaattgaaagacgtcatcactgaaagacagaatgccatctgggcatacaaataagaagtttgtcacagcactcaggattttgggtatcttttgtagctcacataaagaacttcagtgcttttcagagctggatatatcttaattactaatgccacacagaaattatacaatcaaactagatctgaagcataatttaagaaaaacatcaacattttttgtgctttaaactgtagtagttggtctagaaacaaaatactccaagaaaaagaaaattttcaaataaaaccccatatttttattaacttcttttgagctttcaatgttgatgtaatttttgttctctgtgtaatttaggtaaactgcagtgtttaacataataatgttttaaagacttagttgtcagtattaaataatcctggcattatagggaaaaaacctcctagaagttagattatttgctactgtgagaatattgtcaccactggaagttactttagttcatttaattttaattttatattttgtgaatattttaagaactgtagagctgctttcaatatctagaaatttttaattgagtgtaaacacacctaactttaagaaaaagaaccgcttgtatgattttcaaaagaacatttagaattctatagagtcaaaactatagcgtaatgctgtgtttattaagccagggattgtgggacttcccccaggcaactaaacctgcaggatgaaaatgctatattttctttcatgcactgtcgatattactcagatttggggaaatgacatttttatactaaaacaaacaccaaaatattttagaataaattcttagaaagttttgagaggaatttttagagaggacatttcctccttcctgatttggatattccctcaaatccctcctcttactccatgctgaaggagaagtactctcagatgcattatgttaatggagagaaaaagcacagtattgtagagacaccaatattagctaatgtattttggagtgttttccattttacagtttatattccagcactcaaaactcagggtcaagttttaacaaaagaggtatgtagtcacagtaaatactaagatggcatttctatctcagagggccaaagtgaatcacaccagtttctgaaggtcctaaaaatagctcagatgtcctaatgaacatgcacctacatttaataggagtacaataaaactgttgtcagcttttgttttacagagaacgctagatattaagaattttgaaatggatcatttctacttgctgtgcattttaaccaataatctgatgaatatagaaaaaaatgatccaaaatatggatatgattggatgtatgtaacacatacatggagtatggaggaaattttctgaaaaatacatttagattagtttagtttgaaggagaggtgggctgatggctgagttgtatgttactaacttggccctgactggttgtgcaaccattgcttcatttctttgcaaaatgtagttaagatatactttattctaatgaaggccttttaaatttgtccactgcattcttggtatttcactacttcaagtcagtcagaacttcgtagaccgacctgaagtttctttttgaatacttgtttctttagcactttgaagatagaaaaaccactttttaagtactaagtcatcatttgccttgaaagtttcctctgcattgggtttgaagtagtttagttatgtctttttctctgtatgtaagtagtataatttgttactttcaaatacccgtactttgaatgtaggtttttttgttgttgttatctataaaaattgagggaaatggttatgcaaaaaaatattttgctttggaccatatttcttaagcataaaaaaaatgctcagttttgcttgcattccttgagaatgtatttatctgaagatcaaaacaaacaatccagatgtataagtactaggcagaagccaattttaaaatttccttgaataatccatgaaaggaataattcaaatacagataaacagagttggcagtatattatagtgataattttgtattttcacaaaaaaaaagttaaactcttcttttctttttattataatgaccagcttttggtatttcattgttaccaagttctatttttagaataaaattgttctccttctaaaagttaaaaaaaaaaaaaaaaaaaaaaaaaaaaaaaaaaaaaaaaaaaaaaaaaaaaaaaaaaaaaaaaaaaaaaaaaaaaaaaaaaaaaaaaaaaaaaaaaaaaaaaaaaaaaaaaaaattttnggcccttttggcccaannatttttaaactcgaaaaatttttttaatggggcccaattnggggcnnatttggnnaattccccctntnggggggcgtttaaanataannggcccnnttttntaanannnnnngnttnggaaaaccctggnttcccaaattaanngcnttngnanaaancccctttncnnaattgggaaatacnaaaaggcccnaccngtngcctttncaaaanntggcanccntaannggcaatngnaanttnaangcntaantttttgaaaaannccggtaaaaattttttaaatcacgtctttttttaaccaaatggcccaaattgtaaattcctttttaattaaaaaaattcacccttaaggtgttagagtttctccattttgaacaagattcccttttttaaaaaacggggctctaaccttgtgctacccttttttgggcgtgcct

SEQ ID NO: 457623 - DNA, 4085 bp, Homo sapiens
  misc_feature (3627)..(3627): n is a, c, g, or t
  misc_feature (3644)..(3645): n is a, c, g, or t
  misc_feature (3685)..(3685): n is a, c, g, or t
  misc_feature (3691)..(3692): n is a, c, g, or t
  misc_feature (3699)..(3700): n is a, c, g, or t
  misc_feature (3711)..(3711): n is a, c, g, or t
  misc_feature (3713)..(3713): n is a, c, g, or t
  misc_feature (3728)..(3728): n is a, c, g, or t
  misc_feature (3733)..(3734): n is a, c, g, or t
  misc_feature (3740)..(3741): n is a, c, g, or t
  misc_feature (3746)..(3746): n is a, c, g, or t
  misc_feature (3750)..(3750): n is a, c, g, or t
  misc_feature (3752)..(3757): n is a, c, g, or t
  misc_feature (3759)..(3759): n is a, c, g, or t
  misc_feature (3762)..(3762): n is a, c, g, or t
  misc_feature (3775)..(3775): n is a, c, g, or t
  misc_feature (3788)..(3789): n is a, c, g, or t
  misc_feature (3792)..(3792): n is a, c, g, or t
  misc_feature (3795)..(3795): n is a, c, g, or t
  misc_feature (3797)..(3797): n is a, c, g, or t
  misc_feature (3799)..(3799): n is a, c, g, or t
  misc_feature (3803)..(3803): n is a, c, g, or t
  misc_feature (3811)..(3811): n is a, c, g, or t
  misc_feature (3813)..(3814): n is a, c, g, or t
  misc_feature (3828)..(3828): n is a, c, g, or t
  misc_feature (3838)..(3838): n is a, c, g, or t
  misc_feature (3842)..(3842): n is a, c, g, or t
  misc_feature (3845)..(3845): n is a, c, g, or t
  misc_feature (3852)..(3852): n is a, c, g, or t
  misc_feature (3858)..(3859): n is a, c, g, or t
  misc_feature (3865)..(3865): n is a, c, g, or t
  misc_feature (3868)..(3868): n is a, c, g, or t
  misc_feature (3872)..(3873): n is a, c, g, or t
  misc_feature (3880)..(3880): n is a, c, g, or t
  misc_feature (3882)..(3882): n is a, c, g, or t
  misc_feature (3885)..(3885): n is a, c, g, or t
  misc_feature (3888)..(3888): n is a, c, g, or t
  misc_feature (3891)..(3891): n is a, c, g, or t
  misc_feature (3894)..(3894): n is a, c, g, or t
  misc_feature (3898)..(3898): n is a, c, g, or t
  misc_feature (3910)..(3911): n is a, c, g, or t
agcggagcgtgctcagcattcagggaggcagcggcgctcgccttcatccaggacaacaaaactgccatttccgaagagaaaggaaacggctcgcggtttctggggttcccaagcgcgcgcctgcgagggaggccgcgagccgagtcgccacgcccagaaccccgagcccgcccccgcgccacccagcccggccccgccgccccggctgcgcacgcgacgccccctccaggccccgctcctgcgccctatttggtcattcggggggcaagcggcgggaggggaaacgtgcgcggccgaaggggaagcggagccggcgccggctgcgcagaggagccgctctcgccgccgccacctcggctgggagcccacgaggctgccgcatcctgccctcggaacaatgggactcggcgcgcgaggtgcttgggccgcgctgctcctggggacgctgcaggtgctagcgctgctgggggccgcccatgaaagcgcagccatggcggcatctgcaaacatagagaattctgggcttccacacaactccagtgctaactcaacagagactctccaacatgtgccttctgaccatacaaatgaaacttccaacagtactgtgaaaccaccaacttcagttgcctcagactccagtaatacaacggtcaccaccatgaaacctacagcggcatctaatacaacaacaccagggatggtctcaacaaatatgacttctaccaccttaaagtctacacccaaaacaacaagtgtttcacagaacacatctcagatatcaacatccacaatgaccgtaacccacaatagttcagtgacatctgctgcttcatcagtaacaatcacaacaactatgcattctgaagcaaagaaaggatcaaaatttgatactgggagctttgttggtggtattgtattaacgctgggagttttatctattctttacattggatgcaaaatgtattactcaagaagaggcattcggtatcgaaccatagatgaacatgatgccatcatttaaggaaatccatggaccaaggatggaatacagattgatgctgccctatcaattaattttggtttattaatagtttaaaacaatattctctttttgaaaatagtataaacaggccatgcatataatgtacagtgtattacgtaaatatgtaaagattcttcaaggtaacaagggtttgggttttgaaataaacatctggatcttatagaccgttcatacaatggttttagcaagttcatagtaagacaaacaagtcctatctttttttttttggctggggtgggggcattggtcacatatgaccagtaattgaaagacgtcatcactgaaagacagaatgccatctgggcatacaaataagaagtttgtcacagcactcaggattttgggtatcttttgtagctcacataaagaacttcagtgcttttcagagctggatatatcttaattactaatgccacacagaaattatacaatcaaactagatctgaagcataatttaagaaaaacatcaacattttttgtgctttaaactgtagtagttggtctagaaacaaaatactccaagaaaaagaaaattttcaaataaaacccaaaataatagctttgcttagccctgttagggatccattggagcattaaggagcacatatttttattaacttcttttgagctttcaatgttgatgtaatttttgttctctgtgtaatttaggtaaactgcagtgtttaacataataatgttttaaagacttagttgtcagtattaaataatcctggcattatagggaaaaaacctcctagaagttagattatttgctactgtgagaatattgtcaccactggaagttactttagttcatttaattttaattttatattttgtgaatattttaagaactgtagagctgctttcaatatctagaaatttttaattgagtgtaaacacacctaactttaagaaaaagaaccgcttgtatgattttcaaaagaacatttagaattctatagagtcaaaactatagcgtaatgctgtgtttattaagccagggattgtgggacttcccccaggcaactaaacctgcaggatgaaaatgctatattttctttcatgcactgtcgatattactcagatttggggaaatgacatttttatactaaaacaaacaccaaaatattttagaataaattcttagaaagttttgagaggaatttttagagaggacatttcctccttcctgatttggatattccctcaaatccctcctcttactccatgctgaaggagaagtactctcagatgcattatgttaatggagagaaaaagcacagtattgtagagacaccaatattagctaatgtattttggagtgttttccattttacagtttatattccagcactcaaaactcagggtcaagttttaacaaaagaggtatgtagtcacagtaaatactaagatggcatttctatctcagagggccaaagtgaatcacaccagtttctgaaggtcctaaaaatagctcagatgtcctaatgaacatgcacctacatttaataggagtacaataaaactgttgtcagcttttgttttacagagaacgctagatattaagaattttgaaatggatcatttctacttgctgtgcattttaaccaataatctgatgaatatagaaaaaaatgatccaaaatatggatatgattggatgtatgtaacacatacatggagtatggaggaaattttctgagtatgttactaacttggccctgactggttgtgcaaccattgcttcatttctttgcaaaatgtagttaagatatactttattctaatgaaggccttttaaatttgtccactgcattcttggtatttcactacttcaagtcagtcagaacttcgtagaccgacctgaagtttctttttgaatacttgtttctttagcactttgaagatagaaaaaccactttttaagtactaagtcatcatttgccttgaaagtttcctctgcattgggtttgaagtagtttagttatgtctttttctctgtatgtaagtagtataatttgttactttcaaatacccgtactttgaatgtaggtttttttgttgttgttatctataaaaattgagggaaatggttatgcaaaaaaatattttgctttggaccatatttcttaagcataaaaaaaatgctcagttttgcttgcattccttgagaatgtatttatctgaagatcaaaacaaacaatccagatgtataagtactaggcagaagccaattttaaaatttccttgaataatccatgaaaggaataattcaaatacagataaacagagttggcagtatattatagtgataattttgtattttcacaaaaaaaaagttaaactcttcttttctttttattataatgaccagcttttggtatttcattgttaccaagttctatttttagaataaaattgttctccttctaaaagttaaaaaaaaaaaaaaaaaaaaaaaaaaaaaaaaaaaaaaaaaaaaaaaaaaaaaaaaaaaaaaaaaaaaaaaaaaaaaaaaaaaaaaaaaaaaaaaaaaaaaaaaaaaaaaaaaaattttnggcccttttggcccaannatttttaaactcgaaaaatttttttaatggggcccaattnggggcnnatttggnnaattccccctntnggggggcgtttaaanataannggcccnnttttntaanannnnnngnttnggaaaaccctggnttcccaaattaanngcnttngnanaaancccctttncnnaattgggaaatacnaaaaggcccnaccngtngcctttncaaaanntggcanccntaannggcaatngnaanttnaangcntaantttttgaaaaannccggtaaaaattttttaaatcacgtctttttttaaccaaatggcccaaattgtaaattcctttttaattaaaaaaattcacccttaaggtgttagagtttctccattttgaacaagattcccttttttaaaaaacggggctctaaccttgtgctacccttttttgggcgtgcct

SEQ ID NO: 457624 - DNA, 1893 bp, Homo sapiens
  misc_feature (1435)..(1435): n is a, c, g, or t
  misc_feature (1452)..(1453): n is a, c, g, or t
  misc_feature (1493)..(1493): n is a, c, g, or t
  misc_feature (1499)..(1500): n is a, c, g, or t
  misc_feature (1507)..(1508): n is a, c, g, or t
  misc_feature (1519)..(1519): n is a, c, g, or t
  misc_feature (1521)..(1521): n is a, c, g, or t
  misc_feature (1536)..(1536): n is a, c, g, or t
  misc_feature (1541)..(1542): n is a, c, g, or t
  misc_feature (1548)..(1549): n is a, c, g, or t
  misc_feature (1554)..(1554): n is a, c, g, or t
  misc_feature (1558)..(1558): n is a, c, g, or t
  misc_feature (1560)..(1565): n is a, c, g, or t
  misc_feature (1567)..(1567): n is a, c, g, or t
  misc_feature (1570)..(1570): n is a, c, g, or t
  misc_feature (1583)..(1583): n is a, c, g, or t
  misc_feature (1596)..(1597): n is a, c, g, or t
  misc_feature (1600)..(1600): n is a, c, g, or t
  misc_feature (1603)..(1603): n is a, c, g, or t
  misc_feature (1605)..(1605): n is a, c, g, or t
  misc_feature (1607)..(1607): n is a, c, g, or t
  misc_feature (1611)..(1611): n is a, c, g, or t
  misc_feature (1619)..(1619): n is a, c, g, or t
  misc_feature (1621)..(1622): n is a, c, g, or t
  misc_feature (1636)..(1636): n is a, c, g, or t
  misc_feature (1646)..(1646): n is a, c, g, or t
  misc_feature (1650)..(1650): n is a, c, g, or t
  misc_feature (1653)..(1653): n is a, c, g, or t
  misc_feature (1660)..(1660): n is a, c, g, or t
  misc_feature (1666)..(1667): n is a, c, g, or t
  misc_feature (1673)..(1673): n is a, c, g, or t
  misc_feature (1676)..(1676): n is a, c, g, or t
  misc_feature (1680)..(1681): n is a, c, g, or t
  misc_feature (1688)..(1688): n is a, c, g, or t
  misc_feature (1690)..(1690): n is a, c, g, or t
  misc_feature (1693)..(1693): n is a, c, g, or t
  misc_feature (1696)..(1696): n is a, c, g, or t
  misc_feature (1699)..(1699): n is a, c, g, or t
  misc_feature (1702)..(1702): n is a, c, g, or t
  misc_feature (1706)..(1706): n is a, c, g, or t
  misc_feature (1718)..(1719): n is a, c, g, or t
cccccgggctgcaggaattcggcacgagctcaaatccctcctcttactccatgctgaaggagaagtactctcagatgcattatgttaatggagagaaaaagcacagtattgtagagacaccaatattagctaatgtattttggagtgttttccattttacagtttatattccagcactcaaaactcagggtcaagttttaacaaaagaggtatgtagtcacagtaaatactaagatggcatttctatctcagagggccaaagtgaatcacaccagtttctgaaggtcctaaaaatagctcagatgtcctaatgaacatgcacctacatttaataggagtacaataaaactgttgtcagcttttgttttacagagaacgctagatattaagaattttgaaatggatcatttctacttgctgtgcattttaaccaataatctgatgaatatagaaaaaaatgatccaaaatatggatatgattggatgtatgtaacacatacatggagtatggaggaaattttctgaaaaatacatttagattagtttagtttgaaggagaggtgggctgatggctgagttgtatgttactaacttggccctgactggttgtgcaaccattgcttcatttctttgcaaaatgtagttaagatatactttattctaatgaaggccttttaaatttgtccactgcattcttggtatttcactacttcaagtcagtcagaacttcgtagaccgacctgaagtttctttttgaatacttgtttctttagcactttgaagatagaaaaaccactttttaagtactaagtcatcatttgccttgaaagtttcctctgcattgggtttgaagtagtttagttatgtctttttctctgtatgtaagtagtataatttgttactttcaaatacccgtactttgaatgtaggtttttttgttgttgttatctataaaaattgagggaaatggttatgcaaaaaaatattttgctttggaccatatttcttaagcataaaaaaaatgctcagttttgcttgcattccttgagaatgtatttatctgaagatcaaaacaaacaatccagatgtataagtactaggcagaagccaattttaaaatttccttgaataatccatgaaaggaataattcaaatacagataaacagagttggcagtatattatagtgataattttgtattttcacaaaaaaaaagttaaactcttcttttctttttattataatgaccagcttttggtatttcattgttaccaagttctatttttagaataaaattgttctccttctaaaagttaaaaaaaaaaaaaaaaaaaaaaaaaaaaaaaaaaaaaaaaaaaaaaaaaaaaaaaaaaaaaaaaaaaaaaaaaaaaaaaaaaaaaaaaaaaaaaaaaaaaaaaaaaaaaaaaaaattttnggcccttttggcccaannatttttaaactcgaaaaatttttttaatggggcccaattnggggcnnatttggnnaattccccctntnggggggcgtttaaanataannggcccnnttttntaanannnnnngnttnggaaaaccctggnttcccaaattaanngcnttngnanaaancccctttncnnaattgggaaatacnaaaaggcccnaccngtngcctttncaaaanntggcanccntaannggcaatngnaanttnaangcntaantttttgaaaaannccggtaaaaattttttaaatcacgtctttttttaaccaaatggcccaaattgtaaattcctttttaattaaaaaaattcacccttaaggtgttagagtttctccattttgaacaagattcccttttttaaaaaacggggctctaaccttgtgctacccttttttgggcgtgcct

SEQ ID NO: 457625 - DNA, 1735 bp, Homo sapiens
  misc_feature (1277)..(1277): n is a, c, g, or t
  misc_feature (1294)..(1295): n is a, c, g, or t
  misc_feature (1335)..(1335): n is a, c, g, or t
  misc_feature (1341)..(1342): n is a, c, g, or t
  misc_feature (1349)..(1350): n is a, c, g, or t
  misc_feature (1361)..(1361): n is a, c, g, or t
  misc_feature (1363)..(1363): n is a, c, g, or t
  misc_feature (1378)..(1378): n is a, c, g, or t
  misc_feature (1383)..(1384): n is a, c, g, or t
  misc_feature (1390)..(1391): n is a, c, g, or t
  misc_feature (1396)..(1396): n is a, c, g, or t
  misc_feature (1400)..(1400): n is a, c, g, or t
  misc_feature (1402)..(1407): n is a, c, g, or t
  misc_feature (1409)..(1409): n is a, c, g, or t
  misc_feature (1412)..(1412): n is a, c, g, or t
  misc_feature (1425)..(1425): n is a, c, g, or t
  misc_feature (1438)..(1439): n is a, c, g, or t
  misc_feature (1442)..(1442): n is a, c, g, or t
  misc_feature (1445)..(1445): n is a, c, g, or t
  misc_feature (1447)..(1447): n is a, c, g, or t
  misc_feature (1449)..(1449): n is a, c, g, or t
  misc_feature (1453)..(1453): n is a, c, g, or t
  misc_feature (1461)..(1461): n is a, c, g, or t
  misc_feature (1463)..(1464): n is a, c, g, or t
  misc_feature (1478)..(1478): n is a, c, g, or t
  misc_feature (1488)..(1488): n is a, c, g, or t
  misc_feature (1492)..(1492): n is a, c, g, or t
  misc_feature (1495)..(1495): n is a, c, g, or t
  misc_feature (1502)..(1502): n is a, c, g, or t
  misc_feature (1508)..(1509): n is a, c, g, or t
  misc_feature (1515)..(1515): n is a, c, g, or t
  misc_feature (1518)..(1518): n is a, c, g, or t
  misc_feature (1522)..(1523): n is a, c, g, or t
  misc_feature (1530)..(1530): n is a, c, g, or t
  misc_feature (1532)..(1532): n is a, c, g, or t
  misc_feature (1535)..(1535): n is a, c, g, or t
  misc_feature (1538)..(1538): n is a, c, g, or t
  misc_feature (1541)..(1541): n is a, c, g, or t
  misc_feature (1544)..(1544): n is a, c, g, or t
  misc_feature (1548)..(1548): n is a, c, g, or t
  misc_feature (1560)..(1561): n is a, c, g, or t
ctcggtacccacctcctaccccaaactcagggtcaagttttaacaaaagaggtatgtagtcacagtaaatactaagatggcatttctatctcagagggccaaagtgaatcacaccagtttctgaaggtcctaaaaatagctcagatgtcctaatgaacatgcacctacatttaataggagtacaataaaactgttgtcagcttttgttttacagagaacgctagatattaagaattttgaaatggatcatttctacttgctgtgcattttaaccaataatctgatgaatatagaaaaaaatgatccaaaatatggatatgattggatgtatgtaacacatacatggagtatggaggaaattttctgaaaaatacatttagattagtttagtttgaaggagaggtgggctgatggctgagttgtatgttactaacttggccctgactggttgtgcaaccattgcttcatttctttgcaaaatgtagttaagatatactttattctaatgaaggccttttaaatttgtccactgcattcttggtatttcactacttcaagtcagtcagaacttcgtagaccgacctgaagtttctttttgaatacttgtttctttagcactttgaagatagaaaaaccactttttaagtactaagtcatcatttgccttgaaagtttcctctgcattgggtttgaagtagtttagttatgtctttttctctgtatgtaagtagtataatttgttactttcaaatacccgtactttgaatgtaggtttttttgttgttgttatctataaaaattgagggaaatggttatgcaaaaaaatattttgctttggaccatatttcttaagcataaaaaaaatgctcagttttgcttgcattccttgagaatgtatttatctgaagatcaaaacaaacaatccagatgtataagtactaggcagaagccaattttaaaatttccttgaataatccatgaaaggaataattcaaatacagataaacagagttggcagtatattatagtgataattttgtattttcacaaaaaaaaagttaaactcttcttttctttttattataatgaccagcttttggtatttcattgttaccaagttctatttttagaataaaattgttctccttctaaaagttaaaaaaaaaaaaaaaaaaaaaaaaaaaaaaaaaaaaaaaaaaaaaaaaaaaaaaaaaaaaaaaaaaaaaaaaaaaaaaaaaaaaaaaaaaaaaaaaaaaaaaaaaaaaaaaaaaattttnggcccttttggcccaannatttttaaactcgaaaaatttttttaatggggcccaattnggggcnnatttggnnaattccccctntnggggggcgtttaaanataannggcccnnttttntaanannnnnngnttnggaaaaccctggnttcccaaattaanngcnttngnanaaancccctttncnnaattgggaaatacnaaaaggcccnaccngtngcctttncaaaanntggcanccntaannggcaatngnaanttnaangcntaantttttgaaaaannccggtaaaaattttttaaatcacgtctttttttaaccaaatggcccaaattgtaaattcctttttaattaaaaaaattcacccttaaggtgttagagtttctccattttgaacaagattcccttttttaaaaaacggggctctaaccttgtgctacccttttttgggcgtgcct

SEQ ID NO: 457626 - DNA, 3586 bp, Homo sapiens
agcggagcgtgctcagcattcagggaggcagcggcgctcgccttcatccaggacaacaaaactgccatttccgaagagaaaggaaacggctcgcggtttctggggttcccaagcgcgcgcctgcgagggaggccgcgagccgagtcgccacgcccagaaccccgagcccgcccccgcgccacccagcccggccccgccgccccggctgcgcacgcgacgccccctccaggccccgctcctgcgccctatttggtcattcggggggcaagcggcgggaggggaaacgtgcgcggccgaaggggaagcggagccggcgccggctgcgcagaggagccgctctcgccgccgccacctcggctgggagcccacgaggctgccgcatcctgccctcggaacaatgggactcggcgcgcgaggtgcttgggccgcgctgctcctggggacgctgcaggtgctagcgctgctgggggccgcccatgaaagcgcagccatggcggcatctgcaaacatagagaattctgggcttccacacaactccagtgctaactcaacagagactctccaacatgtgccttctgaccatacaaatgaaacttccaacagtactgtgaaaccaccaacttcagttgcctcagactccagtaatacaacggtcaccaccatgaaacctacagcggcatctaatacaacaacaccagggatggtctcaacaaatatgacttctaccaccttaaagtctacacccaaaacaacaagtgtttcacagaacacatctcagatatcaacatccacaatgaccgtaacccacaatagttcagtgacatctgctgcttcatcagtaacaatcacaacaactatgcattctgaagcaaagaaaggatcaaaatttgatactgggagctttgttggtggtattgtattaacgctgggagttttatctattctttacattggatgcaaaatgtattactcaagaagaggcattcggtatcgaaccatagatgaacatgatgccatcatttaaggaaatccatggaccaaggatggaatacagattgatgctgccctatcaattaattttggtttattaatagtttaaaacaatattctctttttgaaaatagtataaacaggccatgcatataatgtacagtgtattacgtaaatatgtaaagattcttcaaggtaacaagggtttgggttttgaaataaacatctggatcttatagaccgttcatacaatggttttagcaagttcatagtaagacaaacaagtcctatctttttttttttggctggggtgggggcattggtcacatatgaccagtaattgaaagacgtcatcactgaaagacagaatgccatctgggcatacaaataagaagtttgtcacagcactcaggattttgggtatcttttgtagctcacataaagaacttcagtgcttttcagagctggatatatcttaattactaatgccacacagaaattatacaatcaaactagatctgaagcataatttaagaaaaacatcaacattttttgtgctttaaactgtagtagttggtctagaaacaaaatactccaagaaaaagaaaattttcaaataaaacccaaaataatagctttgcttagccctgttagggatccattggagcattaaggagcacatatttttattaacttcttttgagctttcaatgttgatgtaatttttgttctctgtgtaatttaggtaaactgcagtgtttaacataataatgttttaaagacttagttgtcagtattaaataatcctggcattatagggaaaaaacctcctagaagttagattatttgctactgtgagaatattgtcaccactggaagttactttagttcatttaattttaattttatattttgtgaatattttaagaactgtagagctgctttcaatatctagaaatttttaattgagtgtaaacacacctaactttaagaaaaagaaccgcttgtatgattttcaaaagaacatttagaattctatagagtcaaaactatagcgtaatgctgtgtttattaagccagggattgtgggacttcccccaggcaactaaacctgcaggatgaaaatgctatattttctttcatgcactgtcgatattactcagatttggggaaatgacatttttatactaaaacaaacaccaaaatattttagaataaattcttagaaagttttgagaggaatttttagagaggacatttcctccttcctgatttggatattccctcaaatccctcctcttactccatgctgaaggagaagtactctcagatgcattatgttaatggagagaaaaagcacagtattgtagagacaccaatattagctaatgtattttggagtgttttccattttacagtttatattccagcactcaaaactcagggtcaagttttaacaaaagaggtatgtagtcacagtaaatactaagatggcatttctatctcagagggccaaagtgaatcacaccagtttctgaaggtcctaaaaatagctcagatgtcctaatgaacatgcacctacatttaataggagtacaataaaactgttgtcagcttttgttttacagagaacgctagatattaagaattttgaaatggatcatttctacttgctgtgcattttaaccaataatctgatgaatatagaaaaaaatgatccaaaatatggatatgattggatgtatgtaacacatacatggagtatggaggaaattttctgaaaaatacatttagattagtttagtttgaaggagaggtgggctgatggctgagttgtatgttactaacttggccctgactggttgtgcaaccattgcttcatttctttgcaaaatgtagttaagatatactttattctaatgaaggccttttaaatttgtccactgcattcttggtatttcactacttcaagtcagtcagaacttcgtagaccgacctgaagtttctttttgaatacttgtttctttagcactttgaagatagaaaaaccactttttaagtactaagtcatcatttgccttgaaagtttcctctgcattgggtttgaagtagtttagttatgtctttttctctgtatgtaagtagtataatttgttactttcaaatacccgtactttgaatgtaggtttttttgttgttgttatctataaaaattgagggaaatggttatgcaaaaaaatattttgctttggaccatatttcttaagcataaaaaaaatgctcagttttgcttgcattccttgagaatgtatttatctgaagatcaaaacaaacaatccagatgtataagtactaggcagaagccatttaaattctgaatatcatgaaggatattcattcagtaacagagtggcgatatatagcgaaattgttttccaaaaaaagttaaccctcttctttatatatgccacgttggttcttcccgtcatttaaaaatggtccttaaaaaaaaaagaaaaagaagaaagaggagcagcaacaagagagaaaagaaagccaagttggcgggagataaatataaggcaccaagttgacg

SEQ ID NO: 457627 - DNA, 1532 bp, Homo sapiens
  misc_feature (103)..(103): n is a, c, g, or t
  misc_feature (1074)..(1074): n is a, c, g, or t
  misc_feature (1091)..(1092): n is a, c, g, or t
  misc_feature (1132)..(1132): n is a, c, g, or t
  misc_feature (1138)..(1139): n is a, c, g, or t
  misc_feature (1146)..(1147): n is a, c, g, or t
  misc_feature (1158)..(1158): n is a, c, g, or t
  misc_feature (1160)..(1160): n is a, c, g, or t
  misc_feature (1175)..(1175): n is a, c, g, or t
  misc_feature (1180)..(1181): n is a, c, g, or t
  misc_feature (1187)..(1188): n is a, c, g, or t
  misc_feature (1193)..(1193): n is a, c, g, or t
  misc_feature (1197)..(1197): n is a, c, g, or t
  misc_feature (1199)..(1204): n is a, c, g, or t
  misc_feature (1206)..(1206): n is a, c, g, or t
  misc_feature (1209)..(1209): n is a, c, g, or t
  misc_feature (1222)..(1222): n is a, c, g, or t
  misc_feature (1235)..(1236): n is a, c, g, or t
  misc_feature (1239)..(1239): n is a, c, g, or t
  misc_feature (1242)..(1242): n is a, c, g, or t
  misc_feature (1244)..(1244): n is a, c, g, or t
  misc_feature (1246)..(1246): n is a, c, g, or t
  misc_feature (1250)..(1250): n is a, c, g, or t
  misc_feature (1258)..(1258): n is a, c, g, or t
  misc_feature (1260)..(1261): n is a, c, g, or t
  misc_feature (1275)..(1275): n is a, c, g, or t
  misc_feature (1285)..(1285): n is a, c, g, or t
  misc_feature (1289)..(1289): n is a, c, g, or t
  misc_feature (1292)..(1292): n is a, c, g, or t
  misc_feature (1299)..(1299): n is a, c, g, or t
  misc_feature (1305)..(1306): n is a, c, g, or t
  misc_feature (1312)..(1312): n is a, c, g, or t
  misc_feature (1315)..(1315): n is a, c, g, or t
  misc_feature (1319)..(1320): n is a, c, g, or t
  misc_feature (1327)..(1327): n is a, c, g, or t
  misc_feature (1329)..(1329): n is a, c, g, or t
  misc_feature (1332)..(1332): n is a, c, g, or t
  misc_feature (1335)..(1335): n is a, c, g, or t
  misc_feature (1338)..(1338): n is a, c, g, or t
  misc_feature (1341)..(1341): n is a, c, g, or t
  misc_feature (1345)..(1345): n is a, c, g, or t
  misc_feature (1357)..(1358): n is a, c, g, or t
tcctggtgtgttgttttagcttgcctggtctggctgtgcgggatgttgtgtgtgtttatgtttgttagatcggtgtgtctgtttgtgtctctggctttgcttnctatttttagtcgcgtgagtatttctaataaccggagcacaatttctcgcgcgcaatcgctggcgtgaccgagtcaccggcgacgtttatattcccggactttatattctttggaggaggggtccgaatatgtgaccacgccaacgaagagggctctttcccagaagtccccaggagcaggtgttcccgcacagagctgtggtgtacgcccgcccgtgcttcgcgtttttaggtctctccctatttgggggccccctttaaaaaaaaaggggggcaatggggcccccccgggggatttttttttccccccccccctttttttttttttttttttttttttttgttttttttgtttttttttcaccaatgaacatttattgggtttgaagtagtttagttatgtctttttctctgtatgtaagtagtataatttgttactttcaaatacccgtactttgaatgtaggtttttttgttgttgttatctataaaaattgagggaaatggttatgcaaaaaaatattttgctttggaccatatttcttaagcataaaaaaaatgctcagttttgcttgcattccttgagaatgtatttatctgaagatcaaaacaaacaatccagatgtataagtactaggcagaagccaattttaaaatttccttgaataatccatgaaaggaataattcaaatacagataaacagagttggcagtatattatagtgataattttgtattttcacaaaaaaaaagttaaactcttcttttctttttattataatgaccagcttttggtatttcattgttaccaagttctatttttagaataaaattgttctccttctaaaagttaaaaaaaaaaaaaaaaaaaaaaaaaaaaaaaaaaaaaaaaaaaaaaaaaaaaaaaaaaaaaaaaaaaaaaaaaaaaaaaaaaaaaaaaaaaaaaaaaaaaaaaaaaaaaaaaaaattttnggcccttttggcccaannatttttaaactcgaaaaatttttttaatggggcccaattnggggcnnatttggnnaattccccctntnggggggcgtttaaanataannggcccnnttttntaanannnnnngnttnggaaaaccctggnttcccaaattaanngcnttngnanaaancccctttncnnaattgggaaatacnaaaaggcccnaccngtngcctttncaaaanntggcanccntaannggcaatngnaanttnaangcntaantttttgaaaaannccggtaaaaattttttaaatcacgtctttttttaaccaaatggcccaaattgtaaattcctttttaattaaaaaaattcacccttaaggtgttagagtttctccattttgaacaagattcccttttttaaaaaacggggctctaaccttgtgctacccttttttgggcgtgcct

SEQ ID NO: 457628 - DNA, 1011 bp, Homo sapiens
  misc_feature (611)..(611): n is a, c, g, or t
  misc_feature (617)..(618): n is a, c, g, or t
  misc_feature (625)..(626): n is a, c, g, or t
  misc_feature (637)..(637): n is a, c, g, or t
  misc_feature (639)..(639): n is a, c, g, or t
  misc_feature (654)..(654): n is a, c, g, or t
  misc_feature (659)..(660): n is a, c, g, or t
  misc_feature (666)..(667): n is a, c, g, or t
  misc_feature (672)..(672): n is a, c, g, or t
  misc_feature (676)..(676): n is a, c, g, or t
  misc_feature (678)..(683): n is a, c, g, or t
  misc_feature (685)..(685): n is a, c, g, or t
  misc_feature (688)..(688): n is a, c, g, or t
  misc_feature (701)..(701): n is a, c, g, or t
  misc_feature (714)..(715): n is a, c, g, or t
  misc_feature (718)..(718): n is a, c, g, or t
  misc_feature (721)..(721): n is a, c, g, or t
  misc_feature (723)..(723): n is a, c, g, or t
  misc_feature (725)..(725): n is a, c, g, or t
  misc_feature (729)..(729): n is a, c, g, or t
  misc_feature (737)..(737): n is a, c, g, or t
  misc_feature (739)..(740): n is a, c, g, or t
  misc_feature (754)..(754): n is a, c, g, or t
  misc_feature (764)..(764): n is a, c, g, or t
  misc_feature (768)..(768): n is a, c, g, or t
  misc_feature (771)..(771): n is a, c, g, or t
  misc_feature (778)..(778): n is a, c, g, or t
  misc_feature (784)..(785): n is a, c, g, or t
  misc_feature (791)..(791): n is a, c, g, or t
  misc_feature (794)..(794): n is a, c, g, or t
  misc_feature (798)..(799): n is a, c, g, or t
  misc_feature (806)..(806): n is a, c, g, or t
  misc_feature (808)..(808): n is a, c, g, or t
  misc_feature (811)..(811): n is a, c, g, or t
  misc_feature (814)..(814): n is a, c, g, or t
  misc_feature (817)..(817): n is a, c, g, or t
  misc_feature (820)..(820): n is a, c, g, or t
  misc_feature (824)..(824): n is a, c, g, or t
  misc_feature (836)..(837): n is a, c, g, or t
aagcatgctcaactgttgttaagaacgatcattgctgccctcctctttattatgacagcagctgaaaaaaggatgatctgcaacaagattaagatgtgtaataacaggatttttccagtagtcacgttgttgtacaacggccagtaaattattgttagtaggcaccataatagaacaattatgtcgcatgaaggagtaggtaatcatgtatcatctacaacagcggcctcctactactactactgctcgaattcaagcttctaacgatgtacggggaaaaggaataattcaaatacagataaacagagttggcagtatattatagtgataattttgtattttcacaaaaaaaaagttaaactcttcttttctttttattataatgaccagcttttggtatttcattgttaccaagttctatttttagaataaaattgttctccttctaaaagttaaaaaaaaaaaaaaaaaaaaaaaaaaaaaaaaaaaaaaaaaaaaaaaaaaaaaaaaaaaaaaaaaaaaaaaaaaaaaaaaaaaaaaaaaaaaacattttggcccccttggcccatgttacttttaaactgggcaatttttttttttcggcccaattnggggcnnatttggnnaattccccctntnggggggcgtttaaanataannggcccnnttttntaanannnnnngnttnggaaaaccctggnttcccaaattaanngcnttngnanaaancccctttncnnaattgggaaatacnaaaaggcccnaccngtngcctttncaaaanntggcanccntaannggcaatngnaanttnaangcntaantttttgaaaaannccggtaaaaattttttaaatcacgtctttttttaaccaaatggcccaaattgtaaattcctttttaattaaaaaaattcacccttaaggtgttagagtttctccattttgaacaagattcccttttttaaaaaacggggctctaaccttgtgctacccttttttgggcgtgcct

SEQ ID NO: 457629 - DNA, 4139 bp, Homo sapiens
  misc_feature (3681)..(3681): n is a, c, g, or t
  misc_feature (3698)..(3699): n is a, c, g, or t
  misc_feature (3739)..(3739): n is a, c, g, or t
  misc_feature (3745)..(3746): n is a, c, g, or t
  misc_feature (3753)..(3754): n is a, c, g, or t
  misc_feature (3765)..(3765): n is a, c, g, or t
  misc_feature (3767)..(3767): n is a, c, g, or t
  misc_feature (3782)..(3782): n is a, c, g, or t
  misc_feature (3787)..(3788): n is a, c, g, or t
  misc_feature (3794)..(3795): n is a, c, g, or t
  misc_feature (3800)..(3800): n is a, c, g, or t
  misc_feature (3804)..(3804): n is a, c, g, or t
  misc_feature (3806)..(3811): n is a, c, g, or t
  misc_feature (3813)..(3813): n is a, c, g, or t
  misc_feature (3816)..(3816): n is a, c, g, or t
  misc_feature (3829)..(3829): n is a, c, g, or t
  misc_feature (3842)..(3843): n is a, c, g, or t
  misc_feature (3846)..(3846): n is a, c, g, or t
  misc_feature (3849)..(3849): n is a, c, g, or t
  misc_feature (3851)..(3851): n is a, c, g, or t
  misc_feature (3853)..(3853): n is a, c, g, or t
  misc_feature (3857)..(3857): n is a, c, g, or t
  misc_feature (3865)..(3865): n is a, c, g, or t
  misc_feature (3867)..(3868): n is a, c, g, or t
  misc_feature (3882)..(3882): n is a, c, g, or t
  misc_feature (3892)..(3892): n is a, c, g, or t
  misc_feature (3896)..(3896): n is a, c, g, or t
  misc_feature (3899)..(3899): n is a, c, g, or t
  misc_feature (3906)..(3906): n is a, c, g, or t
  misc_feature (3912)..(3913): n is a, c, g, or t
  misc_feature (3919)..(3919): n is a, c, g, or t
  misc_feature (3922)..(3922): n is a, c, g, or t
  misc_feature (3926)..(3927): n is a, c, g, or t
  misc_feature (3934)..(3934): n is a, c, g, or t
  misc_feature (3936)..(3936): n is a, c, g, or t
  misc_feature (3939)..(3939): n is a, c, g, or t
  misc_feature (3942)..(3942): n is a, c, g, or t
  misc_feature (3945)..(3945): n is a, c, g, or t
  misc_feature (3948)..(3948): n is a, c, g, or t
  misc_feature (3952)..(3952): n is a, c, g, or t
  misc_feature (3964)..(3965): n is a, c, g, or t
agcggagcgtgctcagcattcagggaggcagcggcgctcgccttcatccaggacaacaaaactgccatttccgaagagaaaggaaacggctcgcggtttctggggttcccaagcgcgcgcctgcgagggaggccgcgagccgagtcgccacgcccagaaccccgagcccgcccccgcgccacccagcccggccccgccgccccggctgcgcacgcgacgccccctccaggccccgctcctgcgccctatttggtcattcggggggcaagcggcgggaggggaaacgtgcgcggccgaaggggaagcggagccggcgccggctgcgcagaggagccgctctcgccgccgccacctcggctgggagcccacgaggctgccgcatcctgccctcggaacaatgggactcggcgcgcgaggtgcttgggccgcgctgctcctggggacgctgcaggtgctagcgctgctgggggccgcccatgaaagcgcagccatggcggcatctgcaaacatagagaattctgggcttccacacaactccagtgctaactcaacagagactctccaacatgtgccttctgaccatacaaatgaaacttccaacagtactgtgaaaccaccaacttcagttgcctcagactccagtaatacaacggtcaccaccatgaaacctacagcggcatctaatacaacaacaccagggatggtctcaacaaatatgacttctaccaccttaaagtctacacccaaaacaacaagtgtttcacagaacacatctcagatatcaacatccacaatgaccgtaacccacaatagttcagtgacatctgctgcttcatcagtaacaatcacaacaactatgcattctgaagcaaagaaaggatcaaaatttgatactgggagctttgttggtggtattgtattaacgctgggagttttatctattctttacattggatgcaaaatgtattactcaagaagaggcattcggtatcgaaccatagatgaacatgatgccatcatttaaggaaatccatggaccaaggatggaatacagattgatgctgccctatcaattaattttggtttattaatagtttaaaacaatattctctttttgaaaatagtataaacaggccatgcatataatgtacagtgtattacgtaaatatgtaaagattcttcaaggtaacaagggtttgggttttgaaataaacatctggatcttatagaccgttcatacaatggttttagcaagttcatagtaagacaaacaagtcctatctttttttttttggctggggtgggggcattggtcacatatgaccagtaattgaaagacgtcatcactgaaagacagaatgccatctgggcatacaaataagaagtttgtcacagcactcaggattttgggtatcttttgtagctcacataaagaacttcagtgcttttcagagctggatatatcttaattactaatgccacacagaaattatacaatcaaactagatctgaagcataatttaagaaaaacatcaacattttttgtgctttaaactgtagtagttggtctagaaacaaaatactccaagaaaaagaaaattttcaaataaaacccaaaataatagctttgcttagccctgttagggatccattggagcattaaggagcacatatttttattaacttcttttgagctttcaatgttgatgtaatttttgttctctgtgtaatttaggtaaactgcagtgtttaacataataatgttttaaagacttagttgtcagtattaaataatcctggcattatagggaaaaaacctcctagaagttagattatttgctactgtgagaatattgtcaccactggaagttactttagttcatttaattttaattttatattttgtgaatattttaagaactgtagagctgctttcaatatctagaaatttttaattgagtgtaaacacacctaactttaagaaaaagaaccgcttgtatgattttcaaaagaacatttagaattctatagagtcaaaactatagcgtaatgctgtgtttattaagccagggattgtgggacttcccccaggcaactaaacctgcaggatgaaaatgctatattttctttcatgcactgtcgatattactcagatttggggaaatgacatttttatactaaaacaaacaccaaaatattttagaataaattcttagaaagttttgagaggaatttttagagaggacatttcctccttcctgatttggatattccctcaaatccctcctcttactccatgctgaaggagaagtactctcagatgcattatgttaatggagagaaaaagcacagtattgtagagacaccaatattagctaatgtattttggagtgttttccattttacagtttatattccagcactcaaaactcagggtcaagttttaacaaaagaggtatgtagtcacagtaaatactaagatggcatttctatctcagagggccaaagtgaatcacaccagtttctgaaggtcctaaaaatagctcagatgtcctaatgaacatgcacctacatttaataggagtacaataaaactgttgtcagcttttgttttacagagaacgctagatattaagaattttgaaatggatcatttctacttgctgtgcattttaaccaataatctgatgaatatagaaaaaaatgatccaaaatatggatatgattggatgtatgtaacacatacatggagtatggaggaaattttctgaaaaatacatttagattagtttagtttgaaggagaggtgggctgatggctgagttgtatgttactaacttggccctgactggttgtgcaaccattgcttcatttctttgcaaaatgtagttaagatatactttattctaatgaaggccttttaaatttgtccactgcattcttggtatttcactacttcaagtcagtcagaacttcgtagaccgacctgaagtttctttttgaatacttgtttctttagcactttgaagatagaaaaaccactttttaagtactaagtcatcatttgccttgaaagtttcctctgcattgggtttgaagtagtttagttatgtctttttctctgtatgtaagtagtataatttgttactttcaaatacccgtactttgaatgtaggtttttttgttgttgttatctataaaaattgagggaaatggttatgcaaaaaaatattttgctttggaccatatttcttaagcataaaaaaaatgctcagttttgcttgcattccttgagaatgtatttatctgaagatcaaaacaaacaatccagatgtataagtactaggcagaagccaattttaaaatttccttgaataatccatgaaaggaataattcaaatacagataaacagagttggcagtatattatagtgataattttgtattttcacaaaaaaaaagttaaactcttcttttctttttattataatgaccagcttttggtatttcattgttaccaagttctatttttagaataaaattgttctccttctaaaagttaaaaaaaaaaaaaaaaaaaaaaaaaaaaaaaaaaaaaaaaaaaaaaaaaaaaaaaaaaaaaaaaaaaaaaaaaaaaaaaaaaaaaaaaaaaaaaaaaaaaaaaaaaaaaaaaaaattttnggcccttttggcccaannatttttaaactcgaaaaatttttttaatggggcccaattnggggcnnatttggnnaattccccctntnggggggcgtttaaanataannggcccnnttttntaanannnnnngnttnggaaaaccctggnttcccaaattaanngcnttngnanaaancccctttncnnaattgggaaatacnaaaaggcccnaccngtngcctttncaaaanntggcanccntaannggcaatngnaanttnaangcntaantttttgaaaaannccggtaaaaattttttaaatcacgtctttttttaaccaaatggcccaaattgtaaattcctttttaattaaaaaaattcacccttaaggtgttagagtttctccattttgaacaagattcccttttttaaaaaacggggctctaaccttgtgctacccttttttgggcgtgcct

SEQ ID NO: 457630 - DNA, 4118 bp, Homo sapiens
  misc_feature (3718)..(3718): n is a, c, g, or t
  misc_feature (3724)..(3725): n is a, c, g, or t
  misc_feature (3732)..(3733): n is a, c, g, or t
  misc_feature (3744)..(3744): n is a, c, g, or t
  misc_feature (3746)..(3746): n is a, c, g, or t
  misc_feature (3761)..(3761): n is a, c, g, or t
  misc_feature (3766)..(3767): n is a, c, g, or t
  misc_feature (3773)..(3774): n is a, c, g, or t
  misc_feature (3779)..(3779): n is a, c, g, or t
  misc_feature (3783)..(3783): n is a, c, g, or t
  misc_feature (3785)..(3790): n is a, c, g, or t
  misc_feature (3792)..(3792): n is a, c, g, or t
  misc_feature (3795)..(3795): n is a, c, g, or t
  misc_feature (3808)..(3808): n is a, c, g, or t
  misc_feature (3821)..(3822): n is a, c, g, or t
  misc_feature (3825)..(3825): n is a, c, g, or t
  misc_feature (3828)..(3828): n is a, c, g, or t
  misc_feature (3830)..(3830): n is a, c, g, or t
  misc_feature (3832)..(3832): n is a, c, g, or t
  misc_feature (3836)..(3836): n is a, c, g, or t
  misc_feature (3844)..(3844): n is a, c, g, or t
  misc_feature (3846)..(3847): n is a, c, g, or t
  misc_feature (3861)..(3861): n is a, c, g, or t
  misc_feature (3871)..(3871): n is a, c, g, or t
  misc_feature (3875)..(3875): n is a, c, g, or t
  misc_feature (3878)..(3878): n is a, c, g, or t
  misc_feature (3885)..(3885): n is a, c, g, or t
  misc_feature (3891)..(3892): n is a, c, g, or t
  misc_feature (3898)..(3898): n is a, c, g, or t
  misc_feature (3901)..(3901): n is a, c, g, or t
  misc_feature (3905)..(3906): n is a, c, g, or t
  misc_feature (3913)..(3913): n is a, c, g, or t
  misc_feature (3915)..(3915): n is a, c, g, or t
  misc_feature (3918)..(3918): n is a, c, g, or t
  misc_feature (3921)..(3921): n is a, c, g, or t
  misc_feature (3924)..(3924): n is a, c, g, or t
  misc_feature (3927)..(3927): n is a, c, g, or t
  misc_feature (3931)..(3931): n is a, c, g, or t
  misc_feature (3943)..(3944): n is a, c, g, or t
agcggagcgtgctcagcattcagggaggcagcggcgctcgccttcatccaggacaacaaaactgccatttccgaagagaaaggaaacggctcgcggtttctggggttcccaagcgcgcgcctgcgagggaggccgcgagccgagtcgccacgcccagaaccccgagcccgcccccgcgccacccagcccggccccgccgccccggctgcgcacgcgacgccccctccaggccccgctcctgcgccctatttggtcattcggggggcaagcggcgggaggggaaacgtgcgcggccgaaggggaagcggagccggcgccggctgcgcagaggagccgctctcgccgccgccacctcggctgggagcccacgaggctgccgcatcctgccctcggaacaatgggactcggcgcgcgaggtgcttgggccgcgctgctcctggggacgctgcaggtgctagcgctgctgggggccgcccatgaaagcgcagccatggcggcatctgcaaacatagagaattctgggcttccacacaactccagtgctaactcaacagagactctccaacatgtgccttctgaccatacaaatgaaacttccaacagtactgtgaaaccaccaacttcagttgcctcagactccagtaatacaacggtcaccaccatgaaacctacagcggcatctaatacaacaacaccagggatggtctcaacaaatatgacttctaccaccttaaagtctacacccaaaacaacaagtgtttcacagaacacatctcagatatcaacatccacaatgaccgtaacccacaatagttcagtgacatctgctgcttcatcagtaacaatcacaacaactatgcattctgaagcaaagaaaggatcaaaatttgatactgggagctttgttggtggtattgtattaacgctgggagttttatctattctttacattggatgcaaaatgtattactcaagaagaggcattcggtatcgaaccatagatgaacatgatgccatcatttaaggaaatccatggaccaaggatggaatacagattgatgctgccctatcaattaattttggtttattaatagtttaaaacaatattctctttttgaaaatagtataaacaggccatgcatataatgtacagtgtattacgtaaatatgtaaagattcttcaaggtaacaagggtttgggttttgaaataaacatctggatcttatagaccgttcatacaatggttttagcaagttcatagtaagacaaacaagtcctatctttttttttttggctggggtgggggcattggtcacatatgaccagtaattgaaagacgtcatcactgaaagacagaatgccatctgggcatacaaataagaagtttgtcacagcactcaggattttgggtatcttttgtagctcacataaagaacttcagtgcttttcagagctggatatatcttaattactaatgccacacagaaattatacaatcaaactagatctgaagcataatttaagaaaaacatcaacattttttgtgctttaaactgtagtagttggtctagaaacaaaatactccaagaaaaagaaaattttcaaataaaacccaaaataatagctttgcttagccctgttagggatccattggagcattaaggagcacatatttttattaacttcttttgagctttcaatgttgatgtaatttttgttctctgtgtaatttaggtaaactgcagtgtttaacataataatgttttaaagacttagttgtcagtattaaataatcctggcattatagggaaaaaacctcctagaagttagattatttgctactgtgagaatattgtcaccactggaagttactttagttcatttaattttaattttatattttgtgaatattttaagaactgtagagctgctttcaatatctagaaatttttaattgagtgtaaacacacctaactttaagaaaaagaaccgcttgtatgattttcaaaagaacatttagaattctatagagtcaaaactatagcgtaatgctgtgtttattaagccagggattgtgggacttcccccaggcaactaaacctgcaggatgaaaatgctatattttctttcatgcactgtcgatattactcagatttggggaaatgacatttttatactaaaacaaacaccaaaatattttagaataaattcttagaaagttttgagaggaatttttagagaggacatttcctccttcctgatttggatattccctcaaatccctcctcttactccatgctgaaggagaagtactctcagatgcattatgttaatggagagaaaaagcacagtattgtagagacaccaatattagctaatgtattttggagtgttttccattttacagtttatattccagcactcaaaactcagggtcaagttttaacaaaagaggtatgtagtcacagtaaatactaagatggcatttctatctcagagggccaaagtgaatcacaccagtttctgaaggtcctaaaaatagctcagatgtcctaatgaacatgcacctacatttaataggagtacaataaaactgttgtcagcttttgttttacagagaacgctagatattaagaattttgaaatggatcatttctacttgctgtgcattttaaccaataatctgatgaatatagaaaaaaatgatccaaaatatggatatgattggatgtatgtaacacatacatggagtatggaggaaattttctgaaaaatacatttagattagtttagtttgaaggagaggtgggctgatggctgagttgtatgttactaacttggccctgactggttgtgcaaccattgcttcatttctttgcaaaatgtagttaagatatactttattctaatgaaggccttttaaatttgtccactgcattcttggtatttcactacttcaagtcagtcagaacttcgtagaccgacctgaagtttctttttgaatacttgtttctttagcactttgaagatagaaaaaccactttttaagtactaagtcatcatttgccttgaaagtttcctctgcattgggtttgaagtagtttagttatgtctttttctctgtatgtaagtagtataatttgttactttcaaatacccgtactttgaatgtaggtttttttgttgttgttatctataaaaattgagggaaatggttatgcaaaaaaatattttgctttggaccatatttcttaagcataaaaaaaatgctcagttttgcttgcattccttgagaatgtatttatctgaagatcaaaacaaacaatccagatgtataagtactaggcagaagccaattttaaaatttccttgaataatccatgaaaggaataattcaaatacagataaacagagttggcagtatattatagtgataattttgtattttcacaaaaaaaaagttaaactcttcttttctttttattataatgaccagcttttggtatttcattgttaccaagttctatttttagaataaaattgttctccttctaaaagttaaaaaaaaaaaaaaaaaaaaaaaaaaaaaaaaaaaaaaaaaaaaaaaaaaaaaaaaaaaaaaaaaaaaaaaaaaaaaaaaaaaaaaaaaaaaacattttggcccccttggcccatgttacttttaaactgggcaatttttttttttcggcccaattnggggcnnatttggnnaattccccctntnggggggcgtttaaanataannggcccnnttttntaanannnnnngnttnggaaaaccctggnttcccaaattaanngcnttngnanaaancccctttncnnaattgggaaatacnaaaaggcccnaccngtngcctttncaaaanntggcanccntaannggcaatngnaanttnaangcntaantttttgaaaaannccggtaaaaattttttaaatcacgtctttttttaaccaaatggcccaaattgtaaattcctttttaattaaaaaaattcacccttaaggtgttagagtttctccattttgaacaagattcccttttttaaaaaacggggctctaaccttgtgctacccttttttgggcgtgcct

SEQ ID NO: 457631 - DNA, 3835 bp, Homo sapiens
  misc_feature (3377)..(3377): n is a, c, g, or t
  misc_feature (3394)..(3395): n is a, c, g, or t
  misc_feature (3435)..(3435): n is a, c, g, or t
  misc_feature (3441)..(3442): n is a, c, g, or t
  misc_feature (3449)..(3450): n is a, c, g, or t
  misc_feature (3461)..(3461): n is a, c, g, or t
  misc_feature (3463)..(3463): n is a, c, g, or t
  misc_feature (3478)..(3478): n is a, c, g, or t
  misc_feature (3483)..(3484): n is a, c, g, or t
  misc_feature (3490)..(3491): n is a, c, g, or t
  misc_feature (3496)..(3496): n is a, c, g, or t
  misc_feature (3500)..(3500): n is a, c, g, or t
  misc_feature (3502)..(3507): n is a, c, g, or t
  misc_feature (3509)..(3509): n is a, c, g, or t
  misc_feature (3512)..(3512): n is a, c, g, or t
  misc_feature (3525)..(3525): n is a, c, g, or t
  misc_feature (3538)..(3539): n is a, c, g, or t
  misc_feature (3542)..(3542): n is a, c, g, or t
  misc_feature (3545)..(3545): n is a, c, g, or t
  misc_feature (3547)..(3547): n is a, c, g, or t
  misc_feature (3549)..(3549): n is a, c, g, or t
  misc_feature (3553)..(3553): n is a, c, g, or t
  misc_feature (3561)..(3561): n is a, c, g, or t
  misc_feature (3563)..(3564): n is a, c, g, or t
  misc_feature (3578)..(3578): n is a, c, g, or t
  misc_feature (3588)..(3588): n is a, c, g, or t
  misc_feature (3592)..(3592): n is a, c, g, or t
  misc_feature (3595)..(3595): n is a, c, g, or t
  misc_feature (3602)..(3602): n is a, c, g, or t
  misc_feature (3608)..(3609): n is a, c, g, or t
  misc_feature (3615)..(3615): n is a, c, g, or t
  misc_feature (3618)..(3618): n is a, c, g, or t
  misc_feature (3622)..(3623): n is a, c, g, or t
  misc_feature (3630)..(3630): n is a, c, g, or t
  misc_feature (3632)..(3632): n is a, c, g, or t
  misc_feature (3635)..(3635): n is a, c, g, or t
  misc_feature (3638)..(3638): n is a, c, g, or t
  misc_feature (3641)..(3641): n is a, c, g, or t
  misc_feature (3644)..(3644): n is a, c, g, or t
  misc_feature (3648)..(3648): n is a, c, g, or t
  misc_feature (3660)..(3661): n is a, c, g, or t
ttttttttcttcatatcttccccaaaatttctaactttatataaatttagacttggtttctgttgagtcttttactagtttgagacattttattgcagtatagtgcaaagtattaatgggctaagtatgttaaatgctgctgtatttgtaagatctcttgctttgtctgtgaccatgaaagtctcagtgaaatgggatcttattccctaaatcatagctctggttttaatgtttcttgatattattgcagagactctccaacatgtgccttctgaccatacaaatgaaacttccaacagtactgtgaaaccaccaacttcagttgcctcagactccagtaatacaacggtcaccaccatgaaacctacagcggcatctaatacaacaacaccagggatggtctcaacaaatatgacttctaccaccttaaagtctacacccaaaacaacaagtgtttcacagaacacatctcagatatcaacatccacaatgaccgtaacccacaatagttcagtgacatctgctgcttcatcagtaacaatcacaacaactatgcattctgaagcaaagaaaggatcaaaatttgatactgggagctttgttggtggtattgtattaacgctgggagttttatctattctttacattggatgcaaaatgtattactcaagaagaggcattcggtatcgaaccatagatgaacatgatgccatcatttaaggaaatccatggaccaaggatggaatacagattgatgctgccctatcaattaattttggtttattaatagtttaaaacaatattctctttttgaaaatagtataaacaggccatgcatataatgtacagtgtattacgtaaatatgtaaagattcttcaaggtaacaagggtttgggttttgaaataaacatctggatcttatagaccgttcatacaatggttttagcaagttcatagtaagacaaacaagtcctatctttttttttttggctggggtgggggcattggtcacatatgaccagtaattgaaagacgtcatcactgaaagacagaatgccatctgggcatacaaataagaagtttgtcacagcactcaggattttgggtatcttttgtagctcacataaagaacttcagtgcttttcagagctggatatatcttaattactaatgccacacagaaattatacaatcaaactagatctgaagcataatttaagaaaaacatcaacattttttgtgctttaaactgtagtagttggtctagaaacaaaatactccaagaaaaagaaaattttcaaataaaacccaaaataatagctttgcttagccctgttagggatccattggagcattaaggagcacatatttttattaacttcttttgagctttcaatgttgatgtaatttttgttctctgtgtaatttaggtaaactgcagtgtttaacataataatgttttaaagacttagttgtcagtattaaataatcctggcattatagggaaaaaacctcctagaagttagattatttgctactgtgagaatattgtcaccactggaagttactttagttcatttaattttaattttatattttgtgaatattttaagaactgtagagctgctttcaatatctagaaatttttaattgagtgtaaacacacctaactttaagaaaaagaaccgcttgtatgattttcaaaagaacatttagaattctatagagtcaaaactatagcgtaatgctgtgtttattaagccagggattgtgggacttcccccaggcaactaaacctgcaggatgaaaatgctatattttctttcatgcactgtcgatattactcagatttggggaaatgacatttttatactaaaacaaacaccaaaatattttagaataaattcttagaaagttttgagaggaatttttagagaggacatttcctccttcctgatttggatattccctcaaatccctcctcttactccatgctgaaggagaagtactctcagatgcattatgttaatggagagaaaaagcacagtattgtagagacaccaatattagctaatgtattttggagtgttttccattttacagtttatattccagcactcaaaactcagggtcaagttttaacaaaagaggtatgtagtcacagtaaatactaagatggcatttctatctcagagggccaaagtgaatcacaccagtttctgaaggtcctaaaaatagctcagatgtcctaatgaacatgcacctacatttaataggagtacaataaaactgttgtcagcttttgttttacagagaacgctagatattaagaattttgaaatggatcatttctacttgctgtgcattttaaccaataatctgatgaatatagaaaaaaatgatccaaaatatggatatgattggatgtatgtaacacatacatggagtatggaggaaattttctgaaaaatacatttagattagtttagtttgaaggagaggtgggctgatggctgagttgtatgttactaacttggccctgactggttgtgcaaccattgcttcatttctttgcaaaatgtagttaagatatactttattctaatgaaggccttttaaatttgtccactgcattcttggtatttcactacttcaagtcagtcagaacttcgtagaccgacctgaagtttctttttgaatacttgtttctttagcactttgaagatagaaaaaccactttttaagtactaagtcatcatttgccttgaaagtttcctctgcattgggtttgaagtagtttagttatgtctttttctctgtatgtaagtagtataatttgttactttcaaatacccgtactttgaatgtaggtttttttgttgttgttatctataaaaattgagggaaatggttatgcaaaaaaatattttgctttggaccatatttcttaagcataaaaaaaatgctcagttttgcttgcattccttgagaatgtatttatctgaagatcaaaacaaacaatccagatgtataagtactaggcagaagccaattttaaaatttccttgaataatccatgaaaggaataattcaaatacagataaacagagttggcagtatattatagtgataattttgtattttcacaaaaaaaaagttaaactcttcttttctttttattataatgaccagcttttggtatttcattgttaccaagttctatttttagaataaaattgttctccttctaaaagttaaaaaaaaaaaaaaaaaaaaaaaaaaaaaaaaaaaaaaaaaaaaaaaaaaaaaaaaaaaaaaaaaaaaaaaaaaaaaaaaaaaaaaaaaaaaaaaaaaaaaaaaaaaaaaaaaaattttnggcccttttggcccaannatttttaaactcgaaaaatttttttaatggggcccaattnggggcnnatttggnnaattccccctntnggggggcgtttaaanataannggcccnnttttntaanannnnnngnttnggaaaaccctggnttcccaaattaanngcnttngnanaaancccctttncnnaattgggaaatacnaaaaggcccnaccngtngcctttncaaaanntggcanccntaannggcaatngnaanttnaangcntaantttttgaaaaannccggtaaaaattttttaaatcacgtctttttttaaccaaatggcccaaattgtaaattcctttttaattaaaaaaattcacccttaaggtgttagagtttctccattttgaacaagattcccttttttaaaaaacggggctctaaccttgtgctacccttttttgggcgtgcct

SEQ ID NO: 457632 - DNA, 3780 bp, Homo sapiens
  misc_feature (3322)..(3322): n is a, c, g, or t
  misc_feature (3339)..(3340): n is a, c, g, or t
  misc_feature (3380)..(3380): n is a, c, g, or t
  misc_feature (3386)..(3387): n is a, c, g, or t
  misc_feature (3394)..(3395): n is a, c, g, or t
  misc_feature (3406)..(3406): n is a, c, g, or t
  misc_feature (3408)..(3408): n is a, c, g, or t
  misc_feature (3423)..(3423): n is a, c, g, or t
  misc_feature (3428)..(3429): n is a, c, g, or t
  misc_feature (3435)..(3436): n is a, c, g, or t
  misc_feature (3441)..(3441): n is a, c, g, or t
  misc_feature (3445)..(3445): n is a, c, g, or t
  misc_feature (3447)..(3452): n is a, c, g, or t
  misc_feature (3454)..(3454): n is a, c, g, or t
  misc_feature (3457)..(3457): n is a, c, g, or t
  misc_feature (3470)..(3470): n is a, c, g, or t
  misc_feature (3483)..(3484): n is a, c, g, or t
  misc_feature (3487)..(3487): n is a, c, g, or t
  misc_feature (3490)..(3490): n is a, c, g, or t
  misc_feature (3492)..(3492): n is a, c, g, or t
  misc_feature (3494)..(3494): n is a, c, g, or t
  misc_feature (3498)..(3498): n is a, c, g, or t
  misc_feature (3506)..(3506): n is a, c, g, or t
  misc_feature (3508)..(3509): n is a, c, g, or t
  misc_feature (3523)..(3523): n is a, c, g, or t
  misc_feature (3533)..(3533): n is a, c, g, or t
  misc_feature (3537)..(3537): n is a, c, g, or t
  misc_feature (3540)..(3540): n is a, c, g, or t
  misc_feature (3547)..(3547): n is a, c, g, or t
  misc_feature (3553)..(3554): n is a, c, g, or t
  misc_feature (3560)..(3560): n is a, c, g, or t
  misc_feature (3563)..(3563): n is a, c, g, or t
  misc_feature (3567)..(3568): n is a, c, g, or t
  misc_feature (3575)..(3575): n is a, c, g, or t
  misc_feature (3577)..(3577): n is a, c, g, or t
  misc_feature (3580)..(3580): n is a, c, g, or t
  misc_feature (3583)..(3583): n is a, c, g, or t
  misc_feature (3586)..(3586): n is a, c, g, or t
  misc_feature (3589)..(3589): n is a, c, g, or t
  misc_feature (3593)..(3593): n is a, c, g, or t
  misc_feature (3605)..(3606): n is a, c, g, or t
agcggagcgtgctcagcattcagggaggcagcggcgctcgccttcatccaggacaacaaaactgccatttccgaagagaaaggaaacggctcgcggtttctggggttcccaagcgcgcgcctgcgagggaggccgcgagccgagtcgccacgcccagaaccccgagcccgcccccgcgccacccagcccggccccgccgccccggctgcgcacgcgacgccccctccaggccccgctcctgcgccctatttggtcattcggggggcaagcggcgggaggggaaacgtgcgcggccgaaggggaagcggagccggcgccggctgcgcagaggagccgctctcgccgccgccacctcggctgggagcccacgaggctgccgcatcctgccctcggaacaatgggactcggcgcgcgaggtgcttgggccgcgctgctcctggggacgctgcaggtgctagcgctgctgggggccgcccatgaaagcgcagccatggcggcatctgcaaacatagagaattctgggcttccacacaactccagtgctaactcaacagagactctccaacatgtgccttctgaccatacaaatgaaacttccaacagtactgtgaaaccaccaacttcagttgcctcagactccagtaatacaacggtcaccaccatgaaacctacagcggcatctaatacaacaacaccagggatggtctcaacaaatatgacttctaccaccttaaagtctacacccaaaacaacaagtgtttcacagaacacatctcagatatcaacatccacaatgaccgtaacccacaatagttcagtgacatctgctgcttcatcagtaacaatcacaacaactatgcattctgaagcaaagaaaggatcaaaatttgatactgggagctttgttggtggtattgtattaacgctgggagttttatctattctttacattggatgcaaaatgtattactcaagaagaggcattcggtatcgaaccatagatgaacatgatgccatcatttaaggaaatccatggaccaaggatggaatacagattgatgctgccctatcaattaattttggtttattaatagtttaaaacaatattctctttttgaaaatagtataaacaggccatgcatataatgtacagtgtattacgtaaatatgtaaagattcttcaaggtaacaagggtttgggttttgaaataaacatctggatcttatagaccgttcatacaatggttttagcaagttcatagtaagacaaacaagtcctatctttttttttttggctggggtgggggcattggtcacatatgaccagtaattgaaagacgtcatcactgaaagacagaatgccatctgggcatacaaataagaagtttgtcacagcactcaggattttgggtatcttttgtagctcacataaagaacttcagtgcttttcagagctggatatatcttaattactaatgccacacagaaattatacaatcaaactagatctgaagcataatttaagaaaaacatcaacattttttgtgctttaaactgtagtagttggtctagaaacaaaatactccaagaaaaagaaaattttcaaataaaacccaaaataatagctttgcttagccctgttagggatccattggagcattaaggagcacatatttttattaacttcttttgagctttcaatgttgatgtaatttttgttctctgtgtaatttaggtaaactgcagtgtttaacataataatgttttaaagacttagttgtcagtattaaataatcctggcattatagggaaaaaacctcctagaagttagattatttgctactgtgagaatattgtcaccactggaagttactttagttcatttaattttaattttatattttgtgaatattttaagaactgtagagctgctttcaatatctagaaatttttaattgagtgtaaacacacctaactttaagaaaaagcacagtattgtagagacaccaatattagctaatgtattttggagtgttttccattttacagtttatattccagcactcaaaactcagggtcaagttttaacaaaagaggtatgtagtcacagtaaatactaagatggcatttctatctcagagggccaaagtgaatcacaccagtttctgaaggtcctaaaaatagctcagatgtcctaatgaacatgcacctacatttaataggagtacaataaaactgttgtcagcttttgttttacagagaacgctagatattaagaattttgaaatggatcatttctacttgctgtgcattttaaccaataatctgatgaatatagaaaaaaatgatccaaaatatggatatgattggatgtatgtaacacatacatggagtatggaggaaattttctgaaaaatacatttagattagtttagtttgaaggagaggtgggctgatggctgagttgtatgttactaacttggccctgactggttgtgcaaccattgcttcatttctttgcaaaatgtagttaagatatactttattctaatgaaggccttttaaatttgtccactgcattcttggtatttcactacttcaagtcagtcagaacttcgtagaccgacctgaagtttctttttgaatacttgtttctttagcactttgaagatagaaaaaccactttttaagtactaagtcatcatttgccttgaaagtttcctctgcattgggtttgaagtagtttagttatgtctttttctctgtatgtaagtagtataatttgttactttcaaatacccgtactttgaatgtaggtttttttgttgttgttatctataaaaattgagggaaatggttatgcaaaaaaatattttgctttggaccatatttcttaagcataaaaaaaatgctcagttttgcttgcattccttgagaatgtatttatctgaagatcaaaacaaacaatccagatgtataagtactaggcagaagccaattttaaaatttccttgaataatccatgaaaggaataattcaaatacagataaacagagttggcagtatattatagtgataattttgtattttcacaaaaaaaaagttaaactcttcttttctttttattataatgaccagcttttggtatttcattgttaccaagttctatttttagaataaaattgttctccttctaaaagttaaaaaaaaaaaaaaaaaaaaaaaaaaaaaaaaaaaaaaaaaaaaaaaaaaaaaaaaaaaaaaaaaaaaaaaaaaaaaaaaaaaaaaaaaaaaaaaaaaaaaaaaaaaaaaaaaaattttnggcccttttggcccaannatttttaaactcgaaaaatttttttaatggggcccaattnggggcnnatttggnnaattccccctntnggggggcgtttaaanataannggcccnnttttntaanannnnnngnttnggaaaaccctggnttcccaaattaanngcnttngnanaaancccctttncnnaattgggaaatacnaaaaggcccnaccngtngcctttncaaaanntggcanccntaannggcaatngnaanttnaangcntaantttttgaaaaannccggtaaaaattttttaaatcacgtctttttttaaccaaatggcccaaattgtaaattcctttttaattaaaaaaattcacccttaaggtgttagagtttctccattttgaacaagattcccttttttaaaaaacggggctctaaccttgtgctacccttttttgggcgtgcct

SEQ ID NO: 457633 - DNA, 4085 bp, Homo sapiens
  misc_feature (3627)..(3627): n is a, c, g, or t
  misc_feature (3644)..(3645): n is a, c, g, or t
  misc_feature (3685)..(3685): n is a, c, g, or t
  misc_feature (3691)..(3692): n is a, c, g, or t
  misc_feature (3699)..(3700): n is a, c, g, or t
  misc_feature (3711)..(3711): n is a, c, g, or t
  misc_feature (3713)..(3713): n is a, c, g, or t
  misc_feature (3728)..(3728): n is a, c, g, or t
  misc_feature (3733)..(3734): n is a, c, g, or t
  misc_feature (3740)..(3741): n is a, c, g, or t
  misc_feature (3746)..(3746): n is a, c, g, or t
  misc_feature (3750)..(3750): n is a, c, g, or t
  misc_feature (3752)..(3757): n is a, c, g, or t
  misc_feature (3759)..(3759): n is a, c, g, or t
  misc_feature (3762)..(3762): n is a, c, g, or t
  misc_feature (3775)..(3775): n is a, c, g, or t
  misc_feature (3788)..(3789): n is a, c, g, or t
  misc_feature (3792)..(3792): n is a, c, g, or t
  misc_feature (3795)..(3795): n is a, c, g, or t
  misc_feature (3797)..(3797): n is a, c, g, or t
  misc_feature (3799)..(3799): n is a, c, g, or t
  misc_feature (3803)..(3803): n is a, c, g, or t
  misc_feature (3811)..(3811): n is a, c, g, or t
  misc_feature (3813)..(3814): n is a, c, g, or t
  misc_feature (3828)..(3828): n is a, c, g, or t
  misc_feature (3838)..(3838): n is a, c, g, or t
  misc_feature (3842)..(3842): n is a, c, g, or t
  misc_feature (3845)..(3845): n is a, c, g, or t
  misc_feature (3852)..(3852): n is a, c, g, or t
  misc_feature (3858)..(3859): n is a, c, g, or t
  misc_feature (3865)..(3865): n is a, c, g, or t
  misc_feature (3868)..(3868): n is a, c, g, or t
  misc_feature (3872)..(3873): n is a, c, g, or t
  misc_feature (3880)..(3880): n is a, c, g, or t
  misc_feature (3882)..(3882): n is a, c, g, or t
  misc_feature (3885)..(3885): n is a, c, g, or t
  misc_feature (3888)..(3888): n is a, c, g, or t
  misc_feature (3891)..(3891): n is a, c, g, or t
  misc_feature (3894)..(3894): n is a, c, g, or t
  misc_feature (3898)..(3898): n is a, c, g, or t
  misc_feature (3910)..(3911): n is a, c, g, or t
agcggagcgtgctcagcattcagggaggcagcggcgctcgccttcatccaggacaacaaaactgccatttccgaagagaaaggaaacggctcgcggtttctggggttcccaagcgcgcgcctgcgagggaggccgcgagccgagtcgccacgcccagaaccccgagcccgcccccgcgccacccagcccggccccgccgccccggctgcgcacgcgacgccccctccaggccccgctcctgcgccctatttggtcattcggggggcaagcggcgggaggggaaacgtgcgcggccgaaggggaagcggagccggcgccggctgcgcagaggagccgctctcgccgccgccacctcggctgggagcccacgaggctgccgcatcctgccctcggaacaatgggactcggcgcgcgaggtgcttgggccgcgctgctcctggggacgctgcaggtgctagcgctgctgggggccgcccatgaaagcgcagccatggcggcatctgcaaacatagagaattctgggcttccacacaactccagtgctaactcaacagagactctccaacatgtgccttctgaccatacaaatgaaacttccaacagtactgtgaaaccaccaacttcagttgcctcagactccagtaatacaacggtcaccaccatgaaacctacagcggcatctaatacaacaacaccagggatggtctcaacaaatatgacttctaccaccttaaagtctacacccaaaacaacaagtgtttcacagaacacatctcagatatcaacatccacaatgaccgtaacccacaatagttcagtgacatctgctgcttcatcagtaacaatcacaacaactatgcattctgaagcaaagaaaggatcaaaatttgatactgggagctttgttggtggtattgtattaacgctgggagttttatctattctttacattggatgcaaaatgtattactcaagaagaggcattcggtatcgaaccatagatgaacatgatgccatcatttaaggaaatccatggaccaaggatggaatacagattgatgctgccctatcaattaattttggtttattaatagtttaaaacaatattctctttttgaaaatagtataaacaggccatgcatataatgtacagtgtattacgtaaatatgtaaagattcttcaaggtaacaagggtttgggttttgaaataaacatctggatcttatagaccgttcatacaatggttttagcaagttcatagtaagacaaacaagtcctatctttttttttttggctggggtgggggcattggtcacatatgaccagtaattgaaagacgtcatcactgaaagacagaatgccatctgggcatacaaataagaagtttgtcacagcactcaggattttgggtatcttttgtagctcacataaagaacttcagtgcttttcagagctggatatatcttaattactaatgccacacagaaattatacaatcaaactagatctgaagcataatttaagaaaaacatcaacattttttgtgctttaaactgtagtagttggtctagaaacaaaatactccaagaaaaagaaaattttcaaataaaacccaaaataatagctttgcttagccctgttagggatccattggagcattaaggagcacatatttttattaacttcttttgagctttcaatgttgatgtaatttttgttctctgtgtaatttaggtaaactgcagtgtttaacataataatgttttaaagacttagttgtcagtattaaataatcctggcattatagggaaaaaacctcctagaagttagattatttgctactgtgagaatattgtcaccactggaagttactttagttcatttaattttaattttatattttgtgaatattttaagaactgtagagctgctttcaatatctagaaatttttaattgagtgtaaacacacctaactttaagaaaaagaaccgcttgtatgattttcaaaagaacatttagaattctatagagtcaaaactatagcgtaatgctgtgtttattaagccagggattgtgggacttcccccaggcaactaaacctgcaggatgaaaatgctatattttctttcatgcactgtcgatattactcagatttggggaaatgacatttttatactaaaacaaacaccaaaatattttagaataaattcttagaaagttttgagaggaatttttagagaggacatttcctccttcctgatttggatattccctcaaatccctcctcttactccatgctgaaggagaagtactctcagatgcattatgttaatggagagaaaaagcacagtattgtagagacaccaatattagctaatgtattttggagtgttttccattttacagtttatattccagcactcaaaactcagggtcaagttttaacaaaagaggtatgtagtcacagtaaatactaagatggcatttctatctcagagggccaaagtgaatcacaccagtttctgaaggtcctaaaaatagctcagatgtcctaatgaacatgcacctacatttaataggagtacaataaaactgttgtcagcttttgttttacagagaacgctagatattaagaattttgaaatggatcatttctacttgctgtgcattttaaccaataatctgatgaatatagaaaaaaatgatccaaaatatggatatgattggatgtatgtaacacatacatggagtatggaggaaattttctgaaaaatacatttagattagtttagtttgaaggagaggtgggctgatggctgagttgtatgttactaacttggccctgactggttgtgcaaccattgcttcatttctttgctgcattcttggtatttcactacttcaagtcagtcagaacttcgtagaccgacctgaagtttctttttgaatacttgtttctttagcactttgaagatagaaaaaccactttttaagtactaagtcatcatttgccttgaaagtttcctctgcattgggtttgaagtagtttagttatgtctttttctctgtatgtaagtagtataatttgttactttcaaatacccgtactttgaatgtaggtttttttgttgttgttatctataaaaattgagggaaatggttatgcaaaaaaatattttgctttggaccatatttcttaagcataaaaaaaatgctcagttttgcttgcattccttgagaatgtatttatctgaagatcaaaacaaacaatccagatgtataagtactaggcagaagccaattttaaaatttccttgaataatccatgaaaggaataattcaaatacagataaacagagttggcagtatattatagtgataattttgtattttcacaaaaaaaaagttaaactcttcttttctttttattataatgaccagcttttggtatttcattgttaccaagttctatttttagaataaaattgttctccttctaaaagttaaaaaaaaaaaaaaaaaaaaaaaaaaaaaaaaaaaaaaaaaaaaaaaaaaaaaaaaaaaaaaaaaaaaaaaaaaaaaaaaaaaaaaaaaaaaaaaaaaaaaaaaaaaaaaaaaaattttnggcccttttggcccaannatttttaaactcgaaaaatttttttaatggggcccaattnggggcnnatttggnnaattccccctntnggggggcgtttaaanataannggcccnnttttntaanannnnnngnttnggaaaaccctggnttcccaaattaanngcnttngnanaaancccctttncnnaattgggaaatacnaaaaggcccnaccngtngcctttncaaaanntggcanccntaannggcaatngnaanttnaangcntaantttttgaaaaannccggtaaaaattttttaaatcacgtctttttttaaccaaatggcccaaattgtaaattcctttttaattaaaaaaattcacccttaaggtgttagagtttctccattttgaacaagattcccttttttaaaaaacggggctctaaccttgtgctacccttttttgggcgtgcct

SEQ ID NO: 457634 - DNA, 948 bp, Homo sapiens
agcggaggcgctcacgtgattactcgcttacgtgagcagaagtagttctggtcgtcgtctaccgtctcgctatagccgtttgagggaagaaggaggaaaattacccggtatcgttagaggttggtgtgtgggtgggaactggggacccaggggtggtgatgatgaagaccagagcggggttcgggggccgcctccgcctctttcgttctctgctttcccctcccccctcgcgctctctccctcctcccccccatctcagtgccgggaagccgcctgtgctgcgcctggtggggaaatggtggacgctcatgactgtgtatgtgtttttgtatatctgtctgtctgggccggtctcgggggacccctaagggtgaccgtaaggcgaaaaacgtttgaaaaccacggccctgagttaagaaaaacagatactgaaaatagtggtctgagtgctggtctatccattcaggcactcagtctccactgcctgattgtctgtaaggggaggccccaagtgaattttatctgtagagtcacatctaggcaaatgcgtgcttgacaaaggcgcccaataaattactttactgaatagagtatttgaataatgtttatttttctgctgataacaacaatctacatattcaatttcgaacatttgaaaaataacaatatagtataaaatttaaaaatacacataattcaccacccggagacgactgctcaacctgatgtcgttacagttttttaaaaaatgtgtataacacacatataaatacacaaattcttaactcacaaagagtcctggttcccactttagccagcagtcctgatggccttcccaggagacgcagtaatgaagtagaacctctctgcccctacagaagggctcttaaggaatagagcggtgcagggaattaaatgggacgggttatcccagggataaggcaagca

SEQ ID NO: 457635 - DNA, 2307 bp, Homo sapiens
agcggaggcgctcacgtgattactcgcttacgtgagcagaagtagttctggtcgtcgtctaccgtctcgctatagccgtttgagggaagaaggaggaaaattacccggtatcgttagagctacaccaaaattgcattgagccaaacttgccaccaagagcccaacaatcaccatgatgctgagcacggaaggcagggaggggttcgtggtgaaggtcaggggcctaccctggtcctgctcagccgatgaagtgatgcgcttcttctctgattgcaagatccaaaatggcacatcaggtattcgtttcatctacaccagagaaggcagaccaagtggtgaagcatttgttgaacttgaatctgaagaggaagtgaaattggctttgaagaaggacagagaaaccatgggacacagatacgttgaagtattcaagtctaacagtgttgaaatggattgggtgttgaagcatacaggtccgaatagccctgatactgccaacgatggcttcgtccggcttagaggactcccatttggctgtagcaaggaagagattgttcagttcttttcagggttggaaattgtgccaaatgggatgacactgccagtggactttcaggggcgaagcacaggggaagcctttgtgcagtttgcttcacaggagatagctgagaaggccttaaagaaacacaaggaaagaatagggcacaggtacattgagatcttcaagagtagccgagctgaagttcgaacccactatgatccccctcgaaagctcatggctatgcagcggccaggtccctatgataggccgggggctggcagagggtataatagcattggcagaggagctgggtttgaaaggatgaggcgtggtgcctatggtggagggtatggaggctatgatgactatggtggctataatgatggatatggctttgggtctgatagatttggaagagacctcaattactgtttttcaggaatgtctgatcatagatacggagatggtgggtccagtttccagagcaccacagggcactgtgtacacatgagggggttaccttacagagccactgagaatgatatttataatttcttctcacctcttaatcccatgagagtacatattgaaattggacccgatggcagagttaccggtgaggcagatgttgaatttgctactcatgaagatgctgtggcagctatggcaaaagacaaagctaatatgcaacacagatatgtggagctcttcttaaattctactgcaggaacaagtgggggtgcttacgatcacagctatgtagaactttttttgaattctacagcaggggcaagtggtggcgcttatggtagccaaatgatgggagggatgggcttatccaaccagtctagttatggaggtcctgctagccagcagctgagtggtggttatggaggtggttatggtggtcagagcagtatgagtggatatgaccaagttctgcaggaaaactccagtgactatcagtcaaaccttgcttaggtagagaaggagcactaaatagctactccagatataaaagctgtacatttgtgggagttgaatagaatgggagggatgtttagtatatccagtatgattggtaaatgggaaatataattgattctgatcactcttggtcagcttctctttctttatctttctttctccttttttaagaaaacgagttaagtttaacagttttgcattacaggcttgtgattcatgcttactgtaaagtggaagttgagattattttaaaacttcaagctcagtaattttgaacactgaaacattcatctaggacataataacaaagttcagtattgaccataactgttaaaacaatttttagctttcctcaagttagttatgttgtaggagtgtacctaagcagtaagcgtatttaggttaatgcagtttcacttatgttaaatgttgctcttataccacaaatacattgaaaacttcggatgcatgttgagaaacatgcctttctgtaaaactcaaatataggagctgtgtctacgattcaaagtgaaaacatttggcatgtttgttaattctagctttttggtttaatatcctgtaaggcacgtgagtgtacactttttttttttttaaggatacgggacaattttaagatgtaataccaatactttagaagtttggtcgtgtcgtttgtatgaaaatctgaggctttggtttaaatctttccttgtattgtgatttccatttagatgtattgtactaagtgaaacttgttaaataaatcttccttttaaaaa

SEQ ID NO: 457636 - DNA, 2251 bp, Homo sapiens
agcggaggcgctcacgtgattactcgcttacgtgagcagaagtagttctggtcgtcgtctaccgtctcgctatagccgtttgagggaagaaggaggaaaattacccggtatcgttagagctacaccaaaattgcattgagccaaacttgccaccaagagcccaacaatcaccatgatgctgagcacggaaggcagggaggggttcgtggtgaaggtcaggggcctaccctggtcctgctcagccgatgaagtgatgcgcttcttctctgattgcaagatccaaaatggcacatcaggtattcgtttcatctacaccagagaaggcagaccaagtggtgaagcatttgttgaacttgaatctgaagaggaagtgaaattggctttgaagaaggacagagaaaccatgggacacagatacgttgaagtattcaagtctaacagtgttgaaatggattgggtgttgaagcatacaggtccgaatagccctgatactgccaacgatggcttcgtccggcttagaggactcccatttggctgtagcaaggaagagattgttcagttcttttcagggttggaaattgtgccaaatgggatgacactgccagtggactttcaggggcgaagcacaggggaagcctttgtgcagtttgcttcacaggagatagctgagaaggccttaaagaaacacaaggaaagaatagggcacaggtacattgagatcttcaagagtagccgagctgaagttcgaacccactatgatccccctcgaaagctcatggctatgcagcggccaggtccctatgataggccgggggctggcagagggtataatagcattggcagaggagctgggtttgaaaggatgaggcgtggtgcctatggtggagggtatggaggctatgatgactatggtggctataatgatggatatggctttgggtctgatagatttggaagagacctcaattactgtttttcaggaatgtctgatcatagatacggagatggtgggtccagtttccagagcaccacagggcactgtgtacacatgagggggttaccttacagagccactgagaatgatatttataatttcttctcacctcttaatcccatgagagtacatattgaaattggacccgatggcagagttaccggtgaggcagatgttgaatttgctactcatgaagatgctgtggcagctatggcaaaagacaaagctaatatgcaacacagatatgtggagctcttcttaaattctactgcaggaacaagtgggggtgcttacgatcacagctatgtagaactttttttgaattctacagcaggggcaagtggtggcgcttatggtagccaaatgatgggagggatgggcttatccaaccagtctagttatggaggtcctgctagccagcagctgagtggtggttatggaggtggttatggtggtcagagcagtatgagtggatatgaccaagttctgcaggaaaactccagtgactatcagtcaaaccttgcttaggtagagaaggagcactaaatagctactccagatataaaagctgtacatttgtgggagttgaatagaatgggagggatgtttagtatatccagtatgattggtaaatgggaaatataattgattctgatcactcttggtcagcttctctttctttatctttctttctcctttttttgtaaagtggaagttgagattattttaaaacttcaagctcagtaattttgaacactgaaacattcatctaggacataataacaaagttcagtattgaccataactgttaaaacaatttttagctttcctcaagttagttatgttgtaggagtgtacctaagcagtaagcgtatttaggttaatgcagtttcacttatgttaaatgttgctcttataccacaaatacattgaaaacttcggatgcatgttgagaaacatgcctttctgtaaaactcaaatataggagctgtgtctacgattcaaagtgaaaacatttggcatgtttgttaattctagctttttggtttaatatcctgtaaggcacgtgagtgtacactttttttttttttaaggatacgggacaattttaagatgtaataccaatactttagaagtttggtcgtgtcgtttgtatgaaaatctgaggctttggtttaaatctttccttgtattgtgatttccatttagatgtattgtactaagtgaaacttgttaaataaatcttccttttaaaaa

SEQ ID NO: 457637 - DNA, 2255 bp, Homo sapiens
agcggaggcgctcacgtgattactcgcttacgtgagcagaagtagttctggtcgtcgtctaccgtctcgctatagccgtttgagggaagaaggaggaaaattacccggtatcgttagagcatgatgctgagcacggaaggcagggaggggttcgtggtgaaggtcaggggcctaccctggtcctgctcagccgatgaagtgatgcgcttcttctctgattgcaagatccaaaatggcacatcaggtattcgtttcatctacaccagagaaggcagaccaagtggtgaagcatttgttgaacttgaatctgaagaggaagtgaaattggctttgaagaaggacagagaaaccatgggacacagatacgttgaagtattcaagtctaacagtgttgaaatggattgggtgttgaagcatacaggtccgaatagccctgatactgccaacgatggcttcgtccggcttagaggactcccatttggctgtagcaaggaagagattgttcagttcttttcagggttggaaattgtgccaaatgggatgacactgccagtggactttcaggggcgaagcacaggggaagcctttgtgcagtttgcttcacaggagatagctgagaaggccttaaagaaacacaaggaaagaatagggcacaggtacattgagatcttcaagagtagccgagctgaagttcgaacccactatgatccccctcgaaagctcatggctatgcagcggccaggtccctatgataggccgggggctggcagagggtataatagcattggcagaggagctgggtttgaaaggatgaggcgtggtgcctatggtggagggtatggaggctatgatgactatggtggctataatgatggatatggctttgggtctgatagatttggaagagacctcaattactgtttttcaggaatgtctgatcatagatacggagatggtgggtccagtttccagagcaccacagggcactgtgtacacatgagggggttaccttacagagccactgagaatgatatttataatttcttctcacctcttaatcccatgagagtacatattgaaattggacccgatggcagagttaccggtgaggcagatgttgaatttgctactcatgaagatgctgtggcagctatggcaaaagacaaagctaatatgcaacacagatatgtggagctcttcttaaattctactgcaggaacaagtgggggtgcttacgatcacagctatgtagaactttttttgaattctacagcaggggcaagtggtggcgcttatggtagccaaatgatgggagggatgggcttatccaaccagtctagttatggaggtcctgctagccagcagctgagtggtggttatggaggtggttatggtggtcagagcagtatgagtggatatgaccaagttctgcaggaaaactccagtgactatcagtcaaaccttgcttaggtagagaaggagcactaaatagctactccagatataaaagctgtacatttgtgggagttgaatagaatgggagggatgtttagtatatccagtatgattggtaaatgggaaatataattgattctgatcactcttggtcagcttctctttctttatctttctttctccttttttaagaaaacgagttaagtttaacagttttgcattacaggcttgtgattcatgcttactgtaaagtggaagttgagattattttaaaacttcaagctcagtaattttgaacactgaaacattcatctaggacataataacaaagttcagtattgaccataactgttaaaacaatttttagctttcctcaagttagttatgttgtaggagtgtacctaagcagtaagcgtatttaggttaatgcagtttcacttatgttaaatgttgctcttataccacaaatacattgaaaacttcggatgcatgttgagaaacatgcctttctgtaaaactcaaatataggagctgtgtctacgattcaaagtgaaaacatttggcatgtttgttaattctagctttttggtttaatatcctgtaaggcacgtgagtgtacactttttttttttttaaggatacgggacaattttaagatgtaataccaatactttagaagtttggtcgtgtcgtttgtatgaaaatctgaggctttggtttaaatctttccttgtattgtgatttccatttagatgtattgtactaagtgaaacttgttaaataaatcttccttttaaaaa

SEQ ID NO: 457638 - DNA, 2337 bp, Homo sapiens
gtaattctgttgcgatcgtgcataccgctctcggcttatatgccgttttgacccggaagaacgagagtaaaatttaccctgagttcattgcgttagtactctagcaccaatagagttgtattgatgcactaatctatgctcaccaagatcccatataatgcatccatgaactgctgatgctatctggaaggcagaggcacgtgggttcgtcgtctagataaggtcaggtgcctatcctgagtcttgttccatcctctgatctgatgcacatcttctctagatttgcatggatccattatgtgctcatcagtgtattcgtttgcattctatctaccagaagagatgcgcacgacccatagtggtcgacctcgttaagtagagggttgaatctgaagaggaagtgaaattggctttgaagaaggacagagaaaccatgggacacagatacgttgaagtattcaagtctaacagtgttgaaatggattgggtgttgaagcatacaggtccgaatagccctgatactgccaacgatggcttcgtccggcttagaggactcccatttggctgtagcaaggaagagattgttcagttcttttcagggttggaaattgtgccaaatgggatgacactgccagtggactttcaggggcgaagcacaggggaagcctttgtgcagtttgcttcacaggagatagctgagaaggccttaaagaaacacaaggaaagaatagggcacaggtacattgagatcttcaagagtagccgagctgaagttcgaacccactatgatccccctcgaaagctcatggctatgcagcggccaggtccctatgataggccgggggctggcagagggtataatagcattggcagaggagctgggtttgaaaggatgaggcgtggtgcctatggtggagggtatggaggctatgatgactatggtggctataatgatggatatggctttgggtctgatagatttggaagagacctcaattactgtttttcaggaatgtctgatcatagatacggagatggtgggtccagtttccagagcaccacagggcactgtgtacacatgagggggttaccttacagagccactgagaatgatatttataatttcttctcacctcttaatcccatgagagtacatattgaaattggacccgatggcagagttaccggtgaggcagatgttgaatttgctactcatgaagatgctgtggcagctatggcaaaagacaaagctaatatgcaacacagatatgtggagctcttcttaaattctactgcaggaacaagtgggggtgcttacgatcacagctatgtagaactttttttgaattctacagcaggggcaagtggtggcgcttatggtagccaaatgatgggagggatgggcttatccaaccagtctagttatggaggtcctgctagccagcagctgagtggtggttatggaggtggttatggtggtcagagcagtatgagtggatatgaccaagttctgcaggaaaactccagtgactatcagtcaaaccttgcttaggtagagaaggagcactaaatagctactccagatataaaagctgtacatttgtgggagttgaatagaatgggagggatgtttagtatatccagtatgattggtaaatgggaaatataattgattctgatcactcttggtcagcttctctttctttatctttctttctccttttttaagaaaacgagttaagtttaacagttttgcattacaggcttgtgattcatgcttactgtaaagtggaagttgagattattttaaaacttcaagctcagtaattttgaacactgaaacattcatctaggacataataacaaagttcagtattgaccataactgttaaaacaatttttagctttcctcaagttagttatgttgtaggagtgtacctaagcagtaagcgtatttaggttaatgcagtttcacttatgttaaatgttgctcttataccacaaatacattgaaaacttcggatgcatgttgagaaacatgcctttctgtaaaactcaaatataggagctgtgtctacgattcaaagtgaaaacatttggcatgtttgttaattctagctttttggtttaatatcctgtaaggcacgtgagtgtacactttttttttttttaaggatacgggacaattttaagatgtaataccaatactttagaagtttggtcgtgtcgtttgtatgaaaatctgaggctttggtttaaatctttccttgtattgtgatttccatttagatgtattgtactaagtgaaacttgttaaataaatcttccttttaaaaa

SEQ ID NO: 457639 - DNA, 2505 bp, Homo sapiens
agcggaggcgctcacgtgattactcgcttacgtgagcagaagtagttctggtcgtcgtctaccgtctcgctatagccgtttgagggaagaaggaggaaaattacccggtatcgttagagctacaccaaaattgcattgagccaaacttgccaccaagagcccaacaatcaccatgatgctgagcacggaaggcagggaggggttcgtggtgaaggtcaggggcctaccctggtcctgctcagccgatgaagtgatgcgcttcttctctgattgcaagatccaaaatggcacatcaggtattcgtttcatctacaccagagaaggcagaccaagtggtgaagcatttgttgaacttgaatctgaagaggaagtgaaattggctttgaagaaggacagagaaaccatgggacacagatacgttgaagtattcaagtctaacagtgttgaaatggattgggtgttgaagcatacaggtccgaatagccctgatactgccaacgatggcttcgtccggcttagaggactcccatttggctgtagcaaggaagagattgttcagttcttttcagggttggaaattgtgccaaatgggatgacactgccagtggactttcaggggcgaagcacaggggaagcctttgtgcagtttgcttcacaggagatagctgagaaggccttaaagaaacacaaggaaagaatagggcacaggtacattgagatcttcaagagtagccgagctgaagttcgaacccactatgatccccctcgaaagctcatggctatgcagcggccaggtccctatgataggccgggggctggcagagggtataatagcattggcagaggagctgggtttgaaaggatgaggcgtggtgcctatggtggagggtatggaggctatgatgactatggtggctataatgatggatatggctttgggtctgatagatttggaagagacctcaattactgtttttcaggaatgtctgatcatagatacggagatggtgggtccagtttccagagcaccacagggcactgtgtacacatgagggggttaccttacagagccactgagaatgatatttataatttcttctcacctcttaatcccatgagagtacatattgaaattggacccgatggcagagttaccggtgaggcagatgttgaatttgctactcatgaagatgctgtggcagctatggcaaaagacaaagctaatatgcaacacagatatgtggagctcttcttaaattctactgcaggaacaagtgggggtgcttacgatcacagctatgtagaactttttttgaattctacagcaggggcaagtggtggcgcttatggtagccaaatgatgggagggatgggcttatccaaccagtctagttatggaggtcctgctagccagcagctgagtggtggttatggaggtggttatggtggtcagagcagtatgagtggatatgaccaagttctgcaggaaaactccagtgactatcagtcaaaccttgcttaggtagagaaggagcactaaatagctactccagatataaaagctgtacatttgtgggagttgaatagaatgggagggatgtttagtatatccagtatgattggtaaatgggaaatataattgattctgatcactcttggtcagcttctctttctttatctttctttctccttttttaagaaaacgagttaagtttaacagttttgcattacaggcttgtgattcatgcttactgtaaagtggaagttgagattattttaaaacttcaagctcagtaattttgaacactgaaacattcatctaggacataataacaaagttcagtattgaccataactgttaaaacaatttttagctttcctcaagttagttatgttgtaggagtgtacctaagcagtaagcgtatttaggttaatgcagtttcacttatgttaaatgttgctcttataccacaaatacattgaaaacttcggatgcatgttgagaaacatgcctttctgtaaaactcaaatataggagctgtgtctacgattcaaagtgaaaacatttggcatgtttgttaattctagctttttggtttaatatcctgtaaggcacgtgagtgtacactttttttttttttaaggatacgggacaattttaagatgtaataccaatactttagaagtttggtcgtgtcgtttgtatgaaaatctgaggctttggtttaaatctttccttgtattgtgatttccatttagatgtattgtactaagtgaaacttgttaaataaatcttccttttaaaaaaaaaaaatttctttcttactcttttatatattcacttatatcttttatccttaacaatatccaatatctttttctaatcttattcttcttaattcttatatttttattatcatctattttcaatttatcttctctataatcttatctactaataacaacatttttttgtccctctctgccttaattcttttattctat

SEQ ID NO: 457640 - DNA, 2269 bp, Homo sapiens
agcggaggcgctcacgtgattactcgcttacgtgagcagaagtagttctggtcgtcgtctaccgtctcgctatagccgtttgagggaagaaggaggaaaattacccggtatcgttagagctacaccaaaattgcattgagccaaacttgccaccaagagcccaacaatcaccatgatgctgagcacggaaggcagggaggggttcgtggtgaaggtcaggggcctaccctggtcctgctcagccgatgaagtgatgcgcttcttctctgattgcaagatccaaaatggcacatcaggtattcgtttcatctacaccagagaaggcagaccaagtggtgaagcatttgttgaacttgaatctgaagaggaagtgaaattggctttgaagaaggacagagaaaccatgggacacagatacgttgaagtattcaagtctaacagtgttgaaatggattgggtgttgaagcatacaggtccgaatagccctgatactgccaacgatggcttcgtccggcttagaggactcccatttggctgtagcaaggaagagattgttcagttcttttcagggttggaaattgtgccaaatgggatgacactgccagtggactttcaggggcgaagcacaggggaagcctttgtgcagtttgcttcacaggagatagctgagaaggccttaaagaaacacaaggaaagaatagggcacaggtacattgagatcttcaagagtagccgagctgaagttcgaacccactatgatccccctcgaaagctcatggctatgcagcggccaggtccctatgataggccgggggctggcagagggtataatagcattggcagaggagctgggtttgaaaggatgaggcgtggtgcctatggtggagggtatggaggctatgatgactatggtggctataatgatggatatggctttgggtctgatagatttggaagagacctcaattactgtttttcaggaatgtctgatcatagatacggagatggtgggtccagtttccagagcaccacagggcactgtgtacacatgagggggttaccttacagagccactgagaatgatatttataatttcttctcacctcttaatcccatgagagtacatattgaaattggacccgatggcagagttaccggtgaggcagatgttgaatttgctactcatgaagatgctgtggcagctatggcaaaagacaaagctaatatgcaacacagatatgtggagctcttcttaaattctactgcaggaacaagtgggggtgcttacgatcacagctatgtagaactttttttgaattctacagcaggggcaagtggtggcgcttatggtagccaaatgatgggagggatgggcttatccaaccagtctagttatggaggtcctgctagccagcagctgagtggtggttatggaggtggttatggtggtcagagcagtatgagtggatatgaccaagttctgcaggaaaactccagtgactatcagtcaaaccttgcttaggtagagaaggagcactaaatagctactccagatataaaagctgtacatttgtgggagttgaatagaatgggagggatgtttagtatatccagtatgattggtaaatgggaaatataattgattctgatcactcttggtcagcttctctttctttatctttctttctccttttttaagaaaacgagttaagtttaacagttttgcattacaggcttgtgattcatgcttactgtaaagtggaagttgagattattttaaaacttcaagctcagtaattttgaacactgaaacattcatctaggacataataacaaagttcagtattgaccataactgttaaaacaatttttagctttcctcaagttagttatgttgtaggagtgtacctaagcagtaagcgtatttaggttaatgcagtttcacttatgttaaatgttgctcttataccacaaatacattgaaaacttcggatgcatgttgagaaacatgcctttctgtaaaactcaaatataggagctgtgtctacgattcaaagtgaaaacatttggcatgtttgttaattctagctttttggtttaatatcctgtaaggcacgtgagtgtacactttttttttttttaaggatacgggacaattttaagatgtaataccaatactttagaagtttggtcgtgtcgtttgtattcggggccgggtcttcccggttggagtccctaaagttggcaaaggactggggctcttgcgggc

SEQ ID NO: 457641 - DNA, 1242 bp, Homo sapiens
  misc_feature (17)..(17): n is a, c, g, or t
gggctgcaggaattcgncacgagcagtggctctgtaaggtaaccccctcatgagagtacatattgaaattggacccgatggcagagttaccggtgaggcagatgttgaatttgctactcatgaagatgctgtggcagctatggcaaaagacaaagctaatatgcaacacagatatgtggagctcttcttaaattctactgcaggaacaagtgggggtgcttacgatcacagctatgtagaactttttttgaattctacagcaggggcaagtggtggcgcttatggtagccaaatgatgggagggatgggcttatccaaccagtctagttatggaggtcctgctagccagcagctgagtggtggttatggaggtggttatggtggtcagagcagtatgagtggatatgaccaagttctgcaggaaaactccagtgactatcagtcaaaccttgcttaggtagagaaggagcactaaatagctactccagatataaaagctgtacatttgtgggagttgaatagaatgggagggatgtttagtatatccagtatgattggtaaatgggaaatataattgattctgatcactcttggtcagcttctctttctttatctttctttctccttttttaagaaaacgagttaagtttaacagttttgcattacaggcttgtgattcatgcttactgtaaagtggaagttgagattattttaaaacttcaagctcagtaattttgaacactgaaacattcatctaggacataataacaaagttcagtattgaccataactgttaaaacaatttttagctttcctcaagttagttatgttgtaggagtgtacctaagcagtaagcgtatttaggttaatgcagtttcacttatgttaaatgttgctcttataccacaaatacattgaaaacttcggatgcatgttgagaaacatgcctttctgtaaaactcaaatataggagctgtgtctacgattcaaagtgaaaacatttggcatgtttgttaattctagctttttggtttaatatcctgtaaggcacgtgagtgtacactttttttttttttaaggatacgggacaattttaagatgtaataccaatactttagaagtttggtcgtgtcgtttgtatgaaaatctgaggctttggtttaaatctttccttgtattgtgatttccatttagatgtattgtactaagtgaaacttgttaaataaatcttccttttaaaaa

SEQ ID NO: 457642 - DNA, 2249 bp, Homo sapiens
agcggaggcgctcacgtgattactcgcttacgtgagcagaagtagttctggtcgtcgtctaccgtctcgctatagccgtttgagggaagaaggaggaaaattacccggtatcgttagagctacaccaaaattgcattgagccaaacttgccaccaagagcccaacaatcaccatgatgctgagcacggaaggcagggaggggttcgtggtgaaggtcaggggcctaccctggtcctgctcagccgatgaagtgatgcgcttcttctctgattgcaagatccaaaatggcacatcaggtattcgtttcatctacaccagagaaggcagaccaagtggtgaagcatttgttgaacttgaatctgaagaggaagtgaaattggctttgaagaaggacagagaaaccatgggacacagatacgttgaagtattcaagtctaacagtgttgaaatggattgggtgttgaagcatacaggtccgaatagccctgatactgccaacgatggcttcgtccggcttagaggactcccatttggctgtagcaaggaagagattgttcagttcttttcagggttggaaattgtgccaaatgggatgacactgccagtggactttcaggggcgaagcacaggggaagcctttgtgcagtttgcttcacaggagatagctgagaaggccttaaagaaacacaaggaaagaatagggcacaggtacattgagatcttcaagagtagccgagctgaagttcgaacccactatgatccccctcgaaagctcatggctatgcagcggccaggtccctatgataggccgggggctggcagagggtataatagcattggcagaggagctgggtttgaaaggatgaggcgtggtgcctatggtggagggtatggaggctatgatgactatggtggctataatgatggatatggctttgggtctgatagatttggaagagacctcaattactgtttttcaggaatgtctgatcatagatacggagatggtgggtccagtttccagagcaccacagggcactgtgtacacatgagggggttaccttacagagccactgagaatgatatttataatttcttctcacctcttaatcccatgagagtacatattgaaattggacccgatggcagagttaccggtgaggcagatgttgaatttgctactcatgaagatgctgtggcagctatggcaaaagacaaagctaatatgcaacacagatatgtggagctcttcttaaattctactgcaggaacaagtgggggtgcttacgatcacagctatgtagaactttttttgaattctacagcaggggcaagtggtggcgcttatggtagccaaatgatgggagggatgggcttatccaaccagtctagttatggaggtcctgctagccagcagctgagtggtggttatggaggtggttatggtggtcagagcagtatgagtggatatgaccaagttctgcaggaaaactccagtgactatcagtcaaaccttgcttaggtagagaaggagcactaaatagctactccagatataaaagctgtacatttgtgggagttgaatagaatgggagggatgtttagtatatccagtatgattggtaaatgggaaatataaagaaaacgagttaagtttaacagttttgcattacaggcttgtgattcatgcttactgtaaagtggaagttgagattattttaaaacttcaagctcagtaattttgaacactgaaacattcatctaggacataataacaaagttcagtattgaccataactgttaaaacaatttttagctttcctcaagttagttatgttgtaggagtgtacctaagcagtaagcgtatttaggttaatgcagtttcacttatgttaaatgttgctcttataccacaaatacattgaaaacttcggatgcatgttgagaaacatgcctttctgtaaaactcaaatataggagctgtgtctacgattcaaagtgaaaacatttggcatgtttgttaattctagctttttggtttaatatcctgtaaggcacgtgagtgtacactttttttttttttaaggatacgggacaattttaagatgtaataccaatactttagaagtttggtcgtgtcgtttgtatgaaaatctgaggctttggtttaaatctttccttgtattgtgatttccatttagatgtattgtactaagtgaaacttgttaaataaatcttccttttaaaaa

SEQ ID NO: 457643 - DNA, 2291 bp, Homo sapiens
ggtcatgtgaatatagaaatagcaattattgcgcgaccggtatgtctgttacgatctcagctatagcagtttgagggaagagaaatacccggtatcgttagagctacaccaaaattgcattgagccaaacttgccaccaagagcccaacaatcaccatgatgctgagcacggaaggcagggaggggttcgtggtgaaggtcaggggcctaccctggtcctgctcagccgatgaagtgatgcgcttcttctctgattgcaagatccaaaatggcacatcaggtattcgtttcatctacaccagagaaggcagaccaagtggtgaagcatttgttgaacttgaatctgaagaggaagtgaaattggctttgaagaaggacagagaaaccatgggacacagatacgttgaagtattcaagtctaacagtgttgaaatggattgggtgttgaagcatacaggtccgaatagccctgatactgccaacgatggcttcgtccggcttagaggactcccatttggctgtagcaaggaagagattgttcagttcttttcagggttggaaattgtgccaaatgggatgacactgccagtggactttcaggggcgaagcacaggggaagcctttgtgcagtttgcttcacaggagatagctgagaaggccttaaagaaacacaaggaaagaatagggcacaggtacattgagatcttcaagagtagccgagctgaagttcgaacccactatgatccccctcgaaagctcatggctatgcagcggccaggtccctatgataggccgggggctggcagagggtataatagcattggcagaggagctgggtttgaaaggatgaggcgtggtgcctatggtggagggtatggaggctatgatgactatggtggctataatgatggatatggctttgggtctgatagatttggaagagacctcaattactgtttttcaggaatgtctgatcatagatacggagatggtgggtccagtttccagagcaccacagggcactgtgtacacatgagggggttaccttacagagccactgagaatgatatttataatttcttctcacctcttaatcccatgagagtacatattgaaattggacccgatggcagagttaccggtgaggcagatgttgaatttgctactcatgaagatgctgtggcagctatggcaaaagacaaagctaatatgcaacacagatatgtggagctcttcttaaattctactgcaggaacaagtgggggtgcttacgatcacagctatgtagaactttttttgaattctacagcaggggcaagtggtggcgcttatggtagccaaatgatgggagggatgggcttatccaaccagtctagttatggaggtcctgctagccagcagctgagtggtggttatggaggtggttatggtggtcagagcagtatgagtggatatgaccaagttctgcaggaaaactccagtgactatcagtcaaaccttgcttaggtagagaaggagcactaaatagctactccagatataaaagctgtacatttgtgggagttgaatagaatgggagggatgtttagtatatccagtatgattggtaaatgggaaatataattgattctgatcactcttggtcagcttctctttctttatctttctttctccttttttaagaaaacgagttaagtttaacagttttgcattacaggcttgtgattcatgcttactgtaaagtggaagttgagattattttaaaacttcaagctcagtaattttgaacactgaaacattcatctaggacataataacaaagttcagtattgaccataactgttaaaacaatttttagctttcctcaagttagttatgttgtaggagtgtacctaagcagtaagcgtatttaggttaatgcagtttcacttatgttaaatgttgctcttataccacaaatacattgaaaacttcggatgcatgttgagaaacatgcctttctgtaaaactcaaatataggagctgtgtctacgattcaaagtgaaaacatttggcatgtttgttaattctagctttttggtttaatatcctgtaaggcacgtgagtgtacactttttttttttttaaggatacgggacaattttaagatgtaataccaatactttagaagtttggtcgtgtcgtttgtatgaaaatctgaggctttggtttaaatctttccttgtattgtgatttccatttagatgtattgtactaagtgaaacttgttaaataaatcttccttttaaaaa

SEQ ID NO: 457644 - DNA, 2253 bp, Homo sapiens
agcggaggcgctcacgtgattactcgcttacgtgagcagaagtagttctggtcgtcgtctaccgtctcgctatagccgtttgagggaagaaggaggaaaattacccggtatcgttagagctacaccaaaattgcattgagccaaacttgccaccaagagcccaacaatcaccatgatgctgagcacggaaggcagggaggggttcgtggtgaaggtcaggggcctaccctggtcctgctcagccgatgaagtgatgcgcttcttctctgattgcaagatccgtgaagcatttgttgaacttgaatctgaagaggaagtgaaattggctttgaagaaggacagagaaaccatgggacacagatacgttgaagtattcaagtctaacagtgttgaaatggattgggtgttgaagcatacaggtccgaatagccctgatactgccaacgatggcttcgtccggcttagaggactcccatttggctgtagcaaggaagagattgttcagttcttttcagggttggaaattgtgccaaatgggatgacactgccagtggactttcaggggcgaagcacaggggaagcctttgtgcagtttgcttcacaggagatagctgagaaggccttaaagaaacacaaggaaagaatagggcacaggtacattgagatcttcaagagtagccgagctgaagttcgaacccactatgatccccctcgaaagctcatggctatgcagcggccaggtccctatgataggccgggggctggcagagggtataatagcattggcagaggagctgggtttgaaaggatgaggcgtggtgcctatggtggagggtatggaggctatgatgactatggtggctataatgatggatatggctttgggtctgatagatttggaagagacctcaattactgtttttcaggaatgtctgatcatagatacggagatggtgggtccagtttccagagcaccacagggcactgtgtacacatgagggggttaccttacagagccactgagaatgatatttataatttcttctcacctcttaatcccatgagagtacatattgaaattggacccgatggcagagttaccggtgaggcagatgttgaatttgctactcatgaagatgctgtggcagctatggcaaaagacaaagctaatatgcaacacagatatgtggagctcttcttaaattctactgcaggaacaagtgggggtgcttacgatcacagctatgtagaactttttttgaattctacagcaggggcaagtggtggcgcttatggtagccaaatgatgggagggatgggcttatccaaccagtctagttatggaggtcctgctagccagcagctgagtggtggttatggaggtggttatggtggtcagagcagtatgagtggatatgaccaagttctgcaggaaaactccagtgactatcagtcaaaccttgcttaggtagagaaggagcactaaatagctactccagatataaaagctgtacatttgtgggagttgaatagaatgggagggatgtttagtatatccagtatgattggtaaatgggaaatataattgattctgatcactcttggtcagcttctctttctttatctttctttctccttttttaagaaaacgagttaagtttaacagttttgcattacaggcttgtgattcatgcttactgtaaagtggaagttgagattattttaaaacttcaagctcagtaattttgaacactgaaacattcatctaggacataataacaaagttcagtattgaccataactgttaaaacaatttttagctttcctcaagttagttatgttgtaggagtgtacctaagcagtaagcgtatttaggttaatgcagtttcacttatgttaaatgttgctcttataccacaaatacattgaaaacttcggatgcatgttgagaaacatgcctttctgtaaaactcaaatataggagctgtgtctacgattcaaagtgaaaacatttggcatgtttgttaattctagctttttggtttaatatcctgtaaggcacgtgagtgtacactttttttttttttaaggatacgggacaattttaagatgtaataccaatactttagaagtttggtcgtgtcgtttgtatgaaaatctgaggctttggtttaaatctttccttgtattgtgatttccatttagatgtattgtactaagtgaaacttgttaaataaatcttccttttaaaaa

SEQ ID NO: 457645 - DNA, 2326 bp, Homo sapiens
agcggaggcgctcacgtgattactcgcttacgtgagcagaagtagttctggtcgtcgtctaccgtctcgctatagccgtttgagggaagaaggaggaaaattacccggtatcgttagagctacaccaaaattgcattgagccaaacttgccaccaagagcccaacaatcaccatgatgctgagcacggaaggcagggaggggttcgtggtgaaggtcaggggcctaccctggtcctgctcagccgatgaagtgatgcgcttcttctctgattgcaagatccaaaatggcacatcaggtattcgtttcatctacaccagagaaggcagaccaagtggtgaagcatttgttgaacttgaatctgaagaggaagtgaaattggctttgaagaaggacagagaaaccatgggacacagatacgttgaagtattcaagtctaacagtgttgaaatggattgggtgttgaagcatacaggtccgaatagccctgatactgccaacgatggcttcgtccggcttagaggactcccatttggctgtagcaaggaagagattgttcagttcttttcagggttggaaattgtgccaaatgggatgacactgccagtggactttcaggggcgaagcacaggggaagcctttgtgcagtttgcttcacaggagatagctgagaaggccttaaagaaacacaaggaaagaatagggcacaggtacattgagatcttcaagagtagccgagctgaagttcgaacccactatgatccccctcgaaagctcatggctatgcagcggccaggtccctatgataggccgggggctggcagagggtataatagcattggcagaggagctgggtttgaaaggatgaggcgtggtgcctatggtggagggtatggaggctatgatgactatggtggctataatgatggatatggctttgggtctgatagatttggaagagacctcaattactgtttttcaggaatgtctgatcatagatacggagatggtgggtccagtttccagagcaccacagggcactgtgtacacatgagggggttaccttacagagccactgagaatgatatttataatttcttctcacctcttaatcccatgagagtacatattgaaattggacccgatggcagagttaccggtgaggcagatgttgaatttgctactcatgaagatgctgtggcagctatggcaaaagacaaagctaatatgcaacacagatatgtggagctcttcttaaattctactgcaggaacaagtgggggtgcttacgatcacagctatgtagaactttttttgaattctacagcaggggcaagtggtggcgcttatggtagccaaatgatgggagggatgggcttatccaaccagtctagttatggaggtcctgctagccagcagctgagtggtggttatggaggtggttatggtggtcagagcagtatgagtggatatgaccaagttctgcaggaaaactccagtgactatcagtcaaaccttgcttaggtagagaaggagcactaaatagctactccagatataaaagctgtacatttgtgggagttgaatagaatgggagggatgtttagtatatccagtatgattggtaaatgggaaatataattgattctgatcactcttggtcagcttctctttctttatctttctttctccttttttaagaaaacgagttaagtttaacagttttgcattacaggcttgtgattcatgcttactgtaaagtggaagttgagattattttaaaacttcaagctcagtaattttgaacactgaaacattcatctaggacataataacaaagttcagtattgaccataactgttaaaacaatttttagctttcctcaagttagttatgttgtaggagtgtacctaagcagtaagcgtatttaggttaatgcagtttcacttatgttaaatgttgctcttataccacaaatacattgaaaacttcggatgcatgttgagaaacatgcctttctgtaaaactcaaatataggagctgtgtctacgattcaaagtgaaaacatttggcatgtttgttaattctagctttttggtttaatatcctgtaaggcacgtgagtgtacactttttttttttttaaggatacgggacaattttaagatgtaataccaatactttagaagtttggtcgtgtcgtttgtatgaaaatctgaggctttggtttaaatctttccttgtattgtgatttccatttagatgtattgtactaagtgaaacttgttaaataaatcttccttttaaaaactggaaaaaatcttgaact

SEQ ID NO: 457646 - DNA, 2278 bp, Homo sapiens
agcggaggcgctcacgtgattactcgcttacgtgagcagaagtagttctggtcgtcgtctaccgtctcgctatagccgtttgagggaagaaggaggaaaattacccggtatcgttagagctacaccaaaattgcattgagccaaacttgccaccaagagcccaacaatcaccatgatgctgagcacggaaggcagggaggggttcgtggtgaaggtcaggggcctaccctggtcctgctcagccgatgaagtgatgcgcttcttctctgattgcaagatccaaaatggcacatcaggtattcgtttcatctacaccagagaaggcagaccaagtggtgaagcatttgttgaacttgaatctgaagaggaagtgaaattggctttgaagaaggacagagaaaccatgggacacagatacgttgaagtattcaagtctaacagtgttgaaatggattgggtgttgaagcatacaggtccgaatagccctgatactgccaacgatggcttcgtccggcttagaggactcccatttggctgtagcaaggaagagattgttcagttcttttcagggttggaaattgtgccaaatgggatgacactgccagtggactttcaggggcgaagcacaggggaagcctttgtgcagtttgcttcacaggagatagctgagaaggccttaaagaaacacaaggaaagaatagggcacaggtacattgagatcttcaagagtagccgagctgaagttcgaacccactatgatccccctcgaaagctcatggctatgcagcggccaggtccctatgataggccgggggctggcagagggtataatagcattggcagaggagctgggtttgaaaggatgaggcgtggtgcctatggtggagggtatggaggctatgatgactatggtggctataatgatggatatggctttgggtctgatagatttggaagagacctcaattactgtttttcaggaatgtctgatcatagatacggagatggtgggtccagtttccagagcaccacagggcactgtgtacacatgagggggttaccttacagagccactgagaatgatatttataatttcttctcacctcttaatcccatgagagtacatattgaaattggacccgatggcagagttaccggtgaggcagatgttgaatttgctactcatgaagatgctgtggcagctatggcaaaagacaaagctaatatgcaacacagatatgtggagctcttcttaaattctactgcaggaacaagtgggggtgcttacgatcacagctatgtagaactttttttgaattctacagcaggggcaagtggtggcgcttatggtagccaaatgatgggagggatgggcttatccaaccagtctagttatggaggtcctgctagccagcagctgagtggtggttatggaggtggttatggtggtcagagcagtatgagtggatatgaccaagttctgcaggaaaactccagtgactatcagtcaaaccttgcttaggtagagaaggagcactaaatagctactccagatataaaagctgtacatttgtgggagttgaatagaatgggagggatgtttagtatatccagtatgattggtaaatgggaaatataattgattctgatcactcttggtcagcttctctttctttatctttctttctccttttttaagaaaacgagttaagtttaacagttttgcattacaggcttgtgattcatgcttactgtaaagtggaagttgagattattttaaaacttcaagctcagtaattttgaacactgaaacattcatctaggacataataacaaagttcagtattgaccataactgttaaaacaatttttagctttcctcaagttagttatgttgtaggagtgtacctaagcagtaagcgtatttaggttaatgcagtttcacttatgttaaatgttgctcttataccacaaatacattgaaaacttcggatgcatgttgagaaacatgcctttctgtaaaactcaaatataggagctgtgtctacgattcaaagtgaaaacatttggcatgtttgttaattctagctttttggtttaatatcctgtaaggcacgtgagtgtacactttttttttttttaaggatacgggacaattttaagatgtaataccaatactttagaagtttggtcgtgtcgtttgtatcataccgatctgcccctccgccctcagtccttccccgtcctgccgctccccgcccccagcgtacgcgcgagt

SEQ ID NO: 457647 - DNA, 511 bp, Homo sapiens
agcaaaaggatgtcctctctcccaaaggccttctgcgtttaagcaatgcttgttgaagaaatgttagcctgtggttatgatcttatgcacaaagataactggaggattcagcaccgatgcagtcgtggtgaacaggaggtctacctaacgcacagaaagtcatgcttcagtgacattgtcaacaggagtccaattatgggcagaatctgctctctgtgaccaaaagaggatgtgcactgcttcacgtgacagtggtgaccttgcaatatagaaaaacttgggagttattgaacatcccctgggcttacaagaaacactgatgaatgtaaaatcaggggacatttgaagatggcagaactgtctcccccttgtcacctacctctgatagaatgtctttaatggtatcataatcattttcacccataatacacagtagcttcttcttactgtttgtaaatcagtccccttgtctgtcctcccccacttcttgaataaaataatttaaagagaa

SEQ ID NO: 457648 - DNA, 580 bp, Homo sapiens
gcctccccccggggcactgaggcctccccacctcagaacaacagcggcagtagttctcctgtcttcaccttccgccacccgcttctgtcatctggtggcccccagtccccactccgaggatccacaggctccctgaagtcttccccgtccatgtcccatatggaggccctgggcaaggcctggaaccggcagctcagccgtcccctctcccaggctgtgtcattcagcaccccctttggcctggacagcgacgtggatgtcgtcatgggagaccctgtgctcctccgctctgtgagctcggacagcctgggagcaggggagggccgagccggcggtgagaggcacgagaagggccccgatatgggacatggacggggaagcactgcagggagccgtggatccacggagtggggcacccgggggccaccagatgacagaagcggatggcggcaggtgcagaccagcccacactaacgcaagacgccagtacagagcaggcgaggccgcagcagcagactaagggaaataaaggaacagagaaccccagacacaacaagacaaaaccatgacaacagcaaca

SEQ ID NO: 457649 - DNA, 2949 bp, Homo sapiens
gcctccccccggggcactgaggcctccccacctcagaacaacagcggcagtagttctcctgtcttcaccttccgccacccgcttctgtcatctggtggcccccagtccccactccgaggatccacaggctccctgaagtcttccccgtccatgtcccatatggaggccctgggcaaggcctggaaccggcagctcagccgtcccctctcccaggctgtgtcattcagcaccccctttggcctggacagcgacgtggatgtcgtcatgggagaccctgtgctcctccgctctgtgagctcggacagcctgggccccccgcgtcccgcgccggccaggacccccacccagccacccccggagcctggtgacctgcccaccatcgaggaagctctgcagatcatccacagtgccgagccccggctcctcccagatggggcggccgacggcagcttctacctccactcccctgaggggccctccaagccatccctggcctccccctacctgcccgaggggacctccaaaccactgtccgacaggcccaccaaagcaccagtgtacatgccacaccccgagaccccctcgaaaccatctccctgtctggtgggggaggcatcgaaaccgccagccccatccgaggggtccccgaaggcggtggcttcgtccccagcagccaccaactccgaggtgaaaatgaccagctttgcagaacgcaagaaacagctggtgaaggcagaggctgaggccggagcggggtcccccacgtccactccggccccgccggaggccctgagctcggagatgagtgagctcagcgcccggctggaggagaaacgcagagccatcgaggctcagaagcgacggattgaggccatattcgccaagcaccgccagcggctgggcaaaagcgccttcctgcaggtgcagccgcgggaagcctctggggaggcggaagcagaggcggaggaggccgattccggtccagtccctggtggggagcggcccgcaggcgagggccagggtgagccaacctcacggcccaaggcagtgaccttctcgccagacctgggcccggtgccccacgaggggctgggggaatacaatcgagcggtcagcaagctgagtgccgccttgagctcgctgcagcgggacatgcagaggctcacggaccagcagcagcggctcctggccccgcccgaggcccccggatccgccccaccacctgctgcgtgggtcatccctggccccacgacggggcccaaagctgcatcccccagccccgcccggcgagtcccggccacccggcgcagccctgggcccgggcccagccagtcaccccgcagcccgaaacacacgcggccagcggagctgcggctggcacccttgaccagggtgcttacgccaccccacgacgtagacagcctcccccacctgcgcaagttctcgccgagccaggtgcccgtgcagacgcgctcttccatcctcctggcggaggagacgccccccgaggagccagccgcccggccgggcctcatcgagatcccgctgggcagcctggcagatcccgccgccgaggacgagggagacgggagccccgctggtgctgaggattccttggaggaggaggcgtcttcggagggggagccccgggtggggctggggttcttctacaaggatgaagacaagcctgaggacgagatggcccaaaagcgggccagcctgctggagcggcagcagcggcgagcagaggaggcgcggcggcgcaagcagtggcaggaggtggagaaggaacagcggagggaggaggccgcgaggctggcccaagaggaggccccgggcccagccccgcttgtgtccgcagtcccgatggcgactccagcccctgctgcccgggctccagccgaggaggaggtgggcccccggaagggggacttcacgcggcaggagtacgagcgccgggcccagctgaagctgatggacgacctcgataaggtgctgcggccccgggctgcggggtccgggggtccaggtcggggcgggcggagggccacccggcctcgctcgggttgctgtgacgactcagccctggcacgaagcccagcccgcggcctgctgggctctcggctgagcaaaatctattcccagtccaccctgtcactgtccactgtggccaacgaggcccacaataacctcggggtgaagaggcccacgtctcgggctccctccccgtcaggtctcatgtccccaagccgcctgcctggaagccgcgaacgggactgggaaaatggcagcaatgcctcctccccagcgtcagtgcccgagtacacaggtccacggctgtacaaagaacccagcgccaagtccaacaagttcatcatccacaatgccctatcacactgctgcctggcgggcaaggtgaacgaaccgcagaagaatcgcattctggaggaaattgagaaaagcaaggccaaccacttcctgatcctctttcgcgactcgagctgccagttccgggcgctctacacgctgtcgggggagacagaggagctgtcgcggctggcagggtatgggccccggaccgtcacgcccgccatggtggaaggcatctacaagtacaactcggaccgcaagcgcttcacccagatccccgccaagaccatgtccatgagcgtcgatgccttcaccatccagggacacctctggcagggcaagaaacccaccactcccaagaagggcggcggcacccccaaatagccccacccgggcggtccacgggccgggccctgtgtgctgcggccgccatcccctggaggacagtcagtcggtattcctgggtcctgtctgtccccaaccgtgtctgggtggggctggagtctccaccctctgactttgagttcagtccccttgtctgtcctcccccacttcttgaataaaataatttaaagagaa

SEQ ID NO: 457650 - DNA, 1758 bp, Homo sapiens
ggcctgtactcacttctgacttagtcctgcgccactgtcctcagctctgtgtcccagccacactggcccccttgtacttccgtgccccccagtaggtttgctccagcctcagggcctcggcactagctgtcccctctgcctggaacgctctgctctgtacgcccacctagttaaatcctgatcattctacagggtacttcctctgggaagccttcctgggtgtctccaggccaggccggggtcctcccgcagtgtagagtgtctgtgcccaacacgagcttttgctggcactcactgctgtctgctgcttttgtcttccccgttgggttaagcagtgtgtgtgtgagcggcacccagtgtatcccatccctgttgtgtcccagtacttagtgtggggctgtgcatacagtaggcaccaactaagtgcatttagaacaatgatgaaaacaaaagcacaggtgggtggcgggcaggctgggtggagggaagatgggcctccagccatgttgggggagggggtggctggctggactcggcgtctgtccccaggatgaagacaagcctgaggacgagatggcccaaaagcgggccagcctgctggagcggcagcagcggcgagcagaggaggcgcggcggcgcaagcagtggcaggaggtggagaaggaacagcggagggaggaggccgcgagtgcctgctgaggctggccctaatgagtgatggctcccgtgtgcccatgccccgtcttgtgtccgtagtccctgatttgctgacgtcgcatgcgcccgtgcgtgctgctgtgtgctcctagcccgatgtggaggagtgtgtggcccccgggaaggggggacgttcacagcggcagtgagtacgaggctctcggctgagcaaaatctattcccagtccaccctgtcactgtccactgtggccaacgaggcccacaataacctcggggtgaagaggcccacgtctcgggctccctccccgtcaggtctcatgtccccaagccgcctgcctggaagccgcgaacgggactgggaaaatggcagcaatgcctcctccccagcgtcagtgcccgagtacacaggtccacggctgtacaaagaacccagcgccaagtccaacaagttcatcatccacaatgccctatcacactgctgcctggcgggcaaggtgaacgaaccgcagaagaatcgcattctggaggaaattgagaaaagcaaggccaaccacttcctgatcctctttcgcgactcgagctgccagttccgggcgctctacacgctgtcgggggagacagaggagctgtcgcggctggcagggtatgggccccggaccgtcacgcccgccatggtggaaggcatctacaagtacaactcggaccgcaagcgcttcacccagatccccgccaagaccatgtccatgagcgtcgatgccttcaccatccagggacacctctggcagggcaagaaacccaccactcccaagaagggcggcggcacccccaaatagccccacccgggcggtccacgggccgggccctgtgtgctgcggccgccatcccctggaggacagtcagtcggtattcctgggtcctgtctgtccccaaccgtgtctgggtggggctggagtctccaccctctgactttgagtccagtcctgctgtgggggctgagctgggaggttcagggactcagggctcagctcagtccccttgtctgtcctcccccacttcttgaataaaataatttaaagagaa

SEQ ID NO: 457651 - DNA, 1831 bp, Homo sapiens
ggcctgtactcacttctgacttagtcctgcgccactgtcctcagctctgtgtcccagccacactggcccccttgtacttccgtgccccccagtaggtttgctccagcctcagggcctcggcactagctgtcccctctgcctggaacgctctgctctgtacgcccacctagttaaatcctgatcattctacagggtacttcctctgggaagccttcctgggtgtctccaggccaggccggggtcctcccgcagtgtagagtgtctgtgcccaacacgagcttttgctggcactcactgctgtctgctgcttttgtcttccccgttgggttaagcagtgtgtgtgtgagcggcacccagtgtatcccatccctgttgtgtcccagtacttagtgtggggctgtgcatacagtaggcaccaactaagtgcatttagaacaatgatgaaaacaaaagcacaggtgggtggcgggcaggctgggtggagggaagatgggcctccagccatgttgggggagggggtggctggctggactcggcgtctgtccccaggatgaagacaagcctgaggacgagatggcccaaaagcgggccagcctgctggagcggcagcagcggcgagcagaggaggcgcggcggcgcaagcagtggcaggaggtggagaaggaacagcggagggaggaggccgcgaggctggcccaagaggaggccccgggcccagccccgcttgtgtccgcagtcccgatggcgactccagcccctgctgcccgggctccagccgaggaggaggtgggcccccggaagggggacttcacgcggcaggagtacgagcgccgggcccagctgaagctgatggacgacctcgataaggtgctgcggccccgggctgcggggtccgggggtccaggtcggggcgggcggagggccacccggcctcgctcgggttgctgtgacgactcagccctggcacgaagcccagcccgcggcctgctgggctctcggctgagcaaaatctattcccagtccaccctgtcactgtccactgtggccaacgaggcccacaataacctcggggtgaagaggcccacgtctcgggctccctccccgtcaggtctcatgtccccaagccgcctgcctggaagccgcgaacgggactgggaaaatggcagcaatgcctcctccccagccgccaagtccaacaagttcatcatccacaatgccctatcacactgctgcctggcgggcaaggtgaacgaaccgcagaagaatcgcattctggaggaaattgagaaaagcaaggccaaccacttcctgatcctctttcgcgactcgagctgccagttccgggcgctctacacgctgtcgggggagacagaggagctgtcgcggctggcagggtatgggccccggaccgtcacgcccgccatggtggaaggcatctacaagtacaactcggaccgcaagcgcttcacccagatccccgccaagaccatgtccatgagcgtcgatgccttcaccatccagggacacctctggcagggcaagaaacccaccactcccaagaagggcggcggcacccccaaatagccccacccgggcggtccacgggccgggccctgtgtgctgcggccgccatcccctggaggacagtcagtcggtattcctgggtcctgtctgtccccaaccgtgtctgggtggggctggagtctccaccctctgactttgagtccagtcctgctgtgggggctgagctgggaggttcagggactcagggctcagctcagtccccttgtctgtcctcccccacttcttgaataaaataatttaaagagaa

SEQ ID NO: 457652 - DNA, 725 bp, Homo sapiens
  misc_feature (8)..(8): n is a, c, g, or t
  misc_feature (146)..(147): n is a, c, g, or t
ttcctccncagcgtcagtgccgagtacacaggccacggtgtacaaagaacccagcgccaagtccacaagttcatcatcccaatgccttcacactgctgcgggggggggccccggggggggggcccaaaaaaaaggggttgaacgannaccgcagaagaatcgcattctggaggaaattgagaaaagcaaggccaaccacttcctgatcctctttcgcgactcgagctgccagttccgggcgctctacacgctgtcgggggagacagaggagctgtcgcggctggcagggtatgggccccggaccgtcacgcccgccatggtggaaggcatctacaagtacaactcggaccgcaagcgcttcacccagatccccgccaagaccatgtccatgagcgtcgatgccttcaccatccagggacacctctggcagggcaagaaacccaccactcccaagaagggcggcggcacccccaaatagccccacccgggcggtccacgggccgggccctgtgtgctgcggccgccatcccctggaggacagtcagtcggtattcctgggtcctgtctgtccccaaccgtgtctgggtggggctggagtctccaccctctgactttgagtccagtcctgctgtgggggctgagctgggaggttcagggactcagggctcagctcagtccccttgtctgtcctcccccacttcttgaataaaataatttaaagagaa

SEQ ID NO: 457653 - DNA, 3001 bp, Homo sapiens
gcctccccccggggcactgaggcctccccacctcagaacaacagcggcagtagttctcctgtcttcaccttccgccacccgcttctgtcatctggtggcccccagtccccactccgaggatccacaggctccctgaagtcttccccgtccatgtcccatatggaggccctgggcaaggcctggaaccggcagctcagccgtcccctctcccaggctgtgtcattcagcaccccctttggcctggacagcgacgtggatgtcgtcatgggagaccctgtgctcctccgctctgtgagctcggacagcctgggccccccgcgtcccgcgccggccaggacccccacccagccacccccggagcctggtgacctgcccaccatcgaggaagctctgcagatcatccacagtgccgagccccggctcctcccagatggggcggccgacggcagcttctacctccactcccctgaggggccctccaagccatccctggcctccccctacctgcccgaggggacctccaaaccactgtccgacaggcccaccaaagcaccagtgtacatgccacaccccgagaccccctcgaaaccatctccctgtctggtgggggaggcatcgaaaccgccagccccatccgaggggtccccgaaggcggtggcttcgtccccagcagccaccaactccgaggtgaaaatgaccagctttgcagaacgcaagaaacagctggtgaaggcagaggctgaggccggagcggggtcccccacgtccactccggccccgccggaggccctgagctcggagatgagtgagctcagcgcccggctggaggagaaacgcagagccatcgaggctcagaagcgacggattgaggccatattcgccaagcaccgccagcggctgggcaaaagcgccttcctgcaggtgcagccgcgggaagcctctggggaggcggaagcagaggcggaggaggccgattccggtccagtccctggtggggagcggcccgcaggcgagggccagggtgagccaacctcacggcccaaggcagtgaccttctcgccagacctgggcccggtgccccacgaggggctgggggaatacaatcgagcggtcagcaagctgagtgccgccttgagctcgctgcagcgggacatgcagaggctcacggaccagcagcagcggctcctggccccgcccgaggcccccggatccgccccaccacctgctgcgtgggtcatccctggccccacgacggggcccaaagctgcatcccccagccccgcccggcgagtcccggccacccggcgcagccctgggcccgggcccagccagtcaccccgcagcccgaaacacacgcggccagcggagctgcggctggcacccttgaccagggtgcttacgccaccccacgacgtagacagcctcccccacctgcgcaagttctcgccgagccaggtgcccgtgcagacgcgctcttccatcctcctggcggaggagacgccccccgaggagccagccgcccggccgggcctcatcgagatcccgctgggcagcctggcagatcccgccgccgaggacgagggagacgggagccccgctggtgctgaggattccttggaggaggaggcgtcttcggagggggagccccgggtggggctggggttcttctacaaggatgaagacaagcctgaggacgagatggcccaaaagcgggccagcctgctggagcggcagcagcggcgagcagaggaggcgcggcggcgcaagcagtggcaggaggtggagaaggaacagcggagggaggaggccgcgaggctggcccaagaggaggccccgggcccagccccgcttgtgtccgcagtcccgatggcgactccagcccctgctgcccgggctccagccgaggaggaggtgggcccccggaagggggacttcacgcggcaggagtacgagcgccgggcccagctgaagctgatggacgacctcgataaggtgctgcggccccgggctgcggggtccgggggtccaggtcggggcgggcggagggccacccggcctcgctcgggttgctgtgacgactcagccctggcacgaagcccagcccgcggcctgctgggctctcggctgagcaaaatctattcccagtccaccctgtcactgtccactgtggccaacgaggcccacaataacctcggggtgaagaggcccacgtctcgggctccctccccgtcaggtctcatgtccccaagccgcctgcctggaagccgcgaacgggactgggaaaatggcagcaatgcctcctccccagcgtcagtgcccgagtacacaggtccacggctgtacaaagaacccagcgccaagtccaacaagttcatcatccacaatgccctatcacactgctgcctggcgggcaaggtgaacgaaccgcagaagaatcgcattctggaggaaattgagaaaagcaaggccaaccacttcctgatcctctttcgcgactcgagctgccagttccgggcgctctacacgctgtcgggggagacagaggagctgtcgcggctggcagggtatgggccccggaccgtcacgcccgccatggtggaaggcatctacaagtacaactcggaccgcaagcgcttcacccagatccccgccaagaccatgtccatgagcgtcgatgccttcaccatccagggacacctctggcagggcaagaaacccaccactcccaagaagggcggcggcacccccaaatagccccacccgggcggtccacgggccgggccctgtgtgctgcggccgccatcccctggaggacagtcagtcggtattcctgggtcctgtctgtccccaaccgtgtctgggtggggctggagtctccaccctctgactttgagtccagtcctgctgtgggggctgagctgggaggttcagggactcagggctcagctcagtccccttgtctgtcctcccccacttcttgaataaaataatttaaagagaa

SEQ ID NO: 457654 - DNA, 1876 bp, Homo sapiens
ggcctgtactcacttctgacttagtcctgcgccactgtcctcagctctgtgtcccagccacactggcccccttgtacttccgtgccccccagtaggtttgctccagcctcagggcctcggcactagctgtcccctctgcctggaacgctctgctctgtacgcccacctagttaaatcctgatcattctacagggtacttcctctgggaagccttcctgggtgtctccaggccaggccggggtcctcccgcagtgtagagtgtctgtgcccaacacgagcttttgctggcactcactgctgtctgctgcttttgtcttccccgttgggttaagcagtgtgtgtgtgagcggcacccagtgtatcccatccctgttgtgtcccagtacttagtgtggggctgtgcatacagtaggcaccaactaagtgcatttagaacaatgatgaaaacaaaagcacaggtgggtggcgggcaggctgggtggagggaagatgggcctccagccatgttgggggagggggtggctggctggactcggcgtctgtccccaggatgaagacaagcctgaggacgagatggcccaaaagcgggccagcctgctggagcggcagcagcggcgagcagaggaggcgcggcggcgcaagcagtggcaggaggtggagaaggaacagcggagggaggaggccgcgaggctggcccaagaggaggccccgggcccagccccgcttgtgtccgcagtcccgatggcgactccagcccctgctgcccgggctccagccgaggaggaggtgggcccccggaagggggacttcacgcggcaggagtacgagcgccgggcccagctgaagctgatggacgacctcgataaggtgctgcggccccgggctgcggggtccgggggtccaggtcggggcgggcggagggccacccggcctcgctcgggttgctgtgacgactcagccctggcacgaagcccagcccgcggcctgctgggctctcggctgagcaaaatctattcccagtccaccctgtcactgtccactgtggccaacgaggcccacaataacctcggggtgaagaggcccacgtctcgggctccctccccgtcaggtctcatgtccccaagccgcctgcctggaagccgcgaacgggactgggaaaatggcagcaatgcctcctccccagcgtcagtgcccgagtacacaggtccacggctgtacaaagaacccagcgccaagtccaacaagttcatcatccacaatgccctatcacactgctgcctggcgggcaaggtgaacgaaccgcagaagaatcgcattctggaggaaattgagaaaagcaaggccaaccacttcctgatcctctttcgcgactcgagctgccagttccgggcgctctacacgctgtcgggggagacagaggagctgtcgcggctggcagggtatgggccccggaccgtcacgcccgccatggtggaaggcatctacaagtacaactcggaccgcaagcgcttcacccagatccccgccaagaccatgtccatgagcgtcgatgccttcaccatccagggacacctctggcagggcaagaaacccaccactcccaagaagggcggcggcacccccaaatagccccacccgggcggtccacgggccgggccctgtgtgctgcggccgccatcccctggaggacagtcagtcggtattcctgggtcctgtctgtccccaaccgtgtctgggtggggctggagtctccaccctctgactttgagtccagtcctgctgtgggggctgagctgggaggttcagggactcagggctcagctcagtccccttgtctgtcctcccccacttcttgaataaaataatttaaagagaa

SEQ ID NO: 457655 - DNA, 1019 bp, Homo sapiens
gtgctgcagagggcagggggtcttgggcaggactgactcctcctgtgttccccccacagcctgctggaccgggtgttgtggagggcaggggcttctggtgggcactgacctgcaatctctgtccccaggctctcgctctcggctgagcaaaatctattcccagtccaccctgtcactgtccactgtggccaacgaggcccacaataacctcggggtgaagaggcccacgtctcgggctccctccccgtcaggtctcatgtccccaagccgcctgcctggaagccgcgaacgggactgggaaaatggcagcaatgcctcctccccagcgtcagtgcccgagtacacaggtccacggctgtacaaagaacccagcgccaagtccaacaagttcatcatccacaatgccctatcacactgctgcctggcgggcaaggtgaacgaaccgcagaagaatcgcattctggaggaaattgagaaaagcaaggccaaccacttcctgatcctctttcgcgactcgagctgccagttccgggcgctctacacgctgtcgggggagacagaggagctgtcgcggctggcagggtatgggccccggaccgtcacgcccgccatggtggaaggcatctacaagtacaactcggaccgcaagcgcttcacccagatccccgccaagaccatgtccatgagcgtcgatgccttcaccatccagggacacctctggcagggcaagaaacccaccactcccaagaagggcggcggcacccccaaatagccccacccgggcggtccacgggccgggccctgtgtgctgcggccgccatcccctggaggacagtcagtcggtattcctgggtcctgtctgtccccaaccgtgtctgggtggggctggagtctccaccctctgactttgagtccagtcctgctgtgggggctgagctgggaggttcagggactcagggctcagctcagtccccttgtctgtcctcccccacttcttgaataaaataatttaaagagaa

SEQ ID NO: 457656 - DNA, 621 bp, Homo sapiens
gactttcacttccaatggagtcaaaattcattggaatctggaggctttcaggggcagtcctggggaggacctttttataaccttgcagcttgggaactccagcccaagtgtcagccatgacaattacccccaggagggggtctgaaggggagcggagggtgaggctctctcattccagatatggagactaaaaagttcaagatggaagtaatagcaaaaaaattacagtactaatcacaacagctaccatttctcagcattagacacagtaactgtatgaaagaagtatgattattaggtctgttttaatgaggaaactgagacccagaaaggtggaagcacttgtctaaggtcacgcctccaggaagcagtgtgtccacgactccagtccaagtggtcaggctccagagcccacagtcccaggtactgggtggcctccagagtaaacatgcacatttattgacacctggacctcccaaagtgctaggattagaagcgtgagccacctcgcccagccggaggaagggtatcttaagcagagggaaaagcatgtgcaaaagccttcaggcggaagtgtgattggcacttttgaggaacaagcaagaccagtgttaggcactg

SEQ ID NO: 457657 - DNA, 3126 bp, Homo sapiens
cagtagagctggggtttcaccatattttctttctttctttctttcttttctttctttctttctttctctttcttttcttttcttttctttttctttctttcttttcttctcagagtctctctctgtcacccaggacaacagagtgagacgctgtctcaaaaaaataaaaattaaaaaaaaagaaaaagaaaaactaaaaaggaagatgtggccctatcttgccgagctcattcttctgtgtgtccccagcccctagcacaaggagaaacagaatagatgctcaagacacaaaggcatgtctgtgcaagggtgcttgatgacggttggaggggcacaatgactttcccaagatcacacagcaaatgtgggacaaaatcaaggctgacagctcatgacagggtgggaggcagatgcagctgcctggcacaggctggctctccagggagatgggcagtgggcacgcattgcccagggcagaactggggctaggggaggaaacaacaagggaggctgtcattagctccttccaaagtggaggtcacttctctcccaaccccgagtcctccacccaaactcccttctcaaggtacaagggctgatcccgtaccagggatgggtagggactcaaagaggaaaagaggatgaaaagaggatggggactgagtgagatgtgaggactccagagggattagcggctctcaaggcaagtgggaggggacttcccggtaggagcccggagacagatgggagcctgtgaagagggcgggggcccggcgaggagaagcggtttctacgctggggtggggctccatgagggggatggagacctggaaaagggactgacggtgcagcgaggagaggaaggctcggttaagggatgggtcttccacgggaggggtggggaactgcgggagtgacggcagcttcggtgaggagtctgaggggctgcgtgaggggctggggcccagggagtccgaggggtctctgtgagggcgctggggtgtccgagcgagcagggaactctggaaggggacaggagccgggggagctgcaggcggccgccgtctgcagagccaggccctgaggcgggccggcgccccctcccccgccccgaactgcggcgcaggcgcgaaccggacccgcctttgctcggcggagacagcaggcagagagatgaggaaactgagacccagaaaggtggaagcacttgtctaaggtcacgcctccaggaagcagtgtgtccacgactccagtccaagtggtcaggctccagagcccacagtcccaggggtccatgatgccgagctgcaatcgttcctgcagctgcagccgcggccccagcgtggaggatggcaagtggtatggggtccgctcctacctgcacctcttctatgaggactgtgcaggcactgctctcagcgacgaccctgagggacctccggtcctgtgcccccgccggccctggccctcactgtgttggaagatcagcctgtcctcggggaccctgcttctgctgctgggtgtggcggctctgaccactggctatgcagtgccccccaagctggagggcatcggtgagggtgagttcctggtgttggatcagcgggcagccgactacaaccaggccctgggcacctgtcgcctggcaggcacagcgctctgtgtggcagctggagttctgctcgccatctgcctcttctgggccatgataggctggctgagccaggacaccaaggcagagcccttggaccccgaagccgacagccacgtggaggtcttcggggatgagccagagcagcagttgtcacccattttccgcaatgccagtggccagtcatggttctcgccacccgccagcccctttgggcaatcttctgtgcagactatccagcccaagagggactcctgagctgcccacatggcctaagatgtgggtcctggatccttcccccttctcaccataaccccctctcagtgtttccccaacttctccctttagagcccaactccaggtcaaatctggagctcaaatcccagtgctccctccccaggagtggggccccaactcttccaagataccagcattcctcaagtcctcccaaaacttcctacccacaccctcttcccaaggccctcaggggcagaaaacatctccttcaacccgtccccactccttcctctgcatgaccttgggcaaacccttgccctttcaagccatcagctcctgcctctctgccatgagggctttggatcagattcctcttctcgccaggatgaggacacgcactgccctccatagacacagatgaaggggtgggggtcattcagctcgaatgggtcccagatgctcacttggcctttccctgcaggatgagtgaagacgtttgcctctcacagtgtgtcttctacctgcattttggcatcagagccccccagcccacccaccacaggcaattactagccctagttgataggtgaggtgggtgaagaaggctggaggtgacatgtccgaggtcacacaacaaagcagcatgcaggaactagaaacacatcttcagcctcctcctgggccagctcttgtgctacaggtggggcggagccagcccctcaccttcctggttccctgagggtcctcagggtggaggacaggtttggcccagaaagactagccagaggcctgatggtcccaggtggctctggatatactttggatatggatttaaatggtctctaagagccgggggtagggggcaggaaaagtgggttgtctttgcccctcaaagtccacctacctagaaaccaagcccacggtcttggccgtgaccctgataataaatgggctctctcagaggcgccagcccctccctccccagccggaggcgtcatctctcttctgtaccactagagggagctctgatgcagctggagagcagcgctcaaggctctcgcccctcccctccctaacccttaccttcagtctccaccagcctgaagggcctcctaggggatcctcaggcggcccccaccagggcacaccctactgtccttgtgcctcacgccccctcctcatcctgcaccccttccatcccaccttccctttcaataaacagctgggatggatactga

SEQ ID NO: 457658 - DNA, 2056 bp, Homo sapiens
ctgcctcagtttctctctagggaaaaggacgcagttggtgtggagcagggcatcggtggtcctgtcaggaagagtggcgcgggtgccgatgaggaaactgagacccagaaaggtggaagcacttgtctaaggtcacgcctccaggaagcagtgtgtccacgactccagtccaagtggtcaggctccagagcccacagtcccaggggtccatgatgccgagctgcaatcgttcctgcagctgcagccgcggccccagcgtggaggatggcaagtggtatggggtccgctcctacctgcacctcttctatgaggactgtgcaggcactgctctcagcgacgaccctgagggacctccggtcctgtgcccccgccggccctggccctcactgtgttggaagatcagcctgtcctcggggaccctgcttctgctgctgggtgtggcggctctgaccactggctatgcagtgccccccaagctggagggcatcggtgagggtgagttcctggtgttggatcagcgggcagccgactacaaccaggccctgggcacctgtcgcctggcaggcacagcgctctgtgtggcagctggagttctgctcgccatctgcctcttctgggccatgataggctggctgagccaggacaccaaggcagagcccttggaccccgaagccgacagccacgtggaggtcttcggggatgagccagagcagcagttgtcacccattttccgcaatgccagtggccagtcatggttctcgccacccgccagcccctttgggcaatcttctgtgcagactatccagcccaagagggactcctgagctgcccacatggcctaagatgtgggtcctggatccttcccccttctcaccataaccccctctcagtgtttccccaacttctcccttttagcagggtccctttagagcccaactccaggtcaaatctggagctcaaatcccagtgctccctccccaggagtggggccccaactcttccaagataccagcattcctcaagtcctcccaaaacttcctacccacaccctcttcccaaggccctcaggggcagaaaacatctccttcaacccgtccccactccttcctctgcatgaccttgggcaaacccttgccctttcaagccatcagctcctgcctctctgccatgagggctttggatcagattcctcttctcgccaggatgaggacacgcactgccctccatagacacagatgaaggggtgggggtcattcagctcgaatgggtcccagatgctcacttggcctttccctgcaggatgagtgaagacgtttgcctctcacagtgtgtcttctacctgcattttggcatcagagccccccagcccacccaccacaggcaattactagccctagttgataggtgaggtgggtgaagaaggctggaggtgacatgtccgaggtcacacaacaaagcagcatgcaggaactagaaacacatcttcagcctcctcctgggccagctcttgtgctacaggtggggcggagccagcccctcaccttcctggttccctgagggtcctcagggtggaggacaggtttggcccagaaagactagccagaggcctgatggtcccaggtggctctggatatactttggatatggatttaaatggtctctaagagccgggggtagggggcaggaaaagtgggttgtctttgcccctcaaagtccacctacctagaaaccaagcccacggtcttggccgtgaccctgataataaatgggctctctcagaggcgccagcccctccctccccagccggaggcgtcatctctcttctgtaccactagagggagctctgatgcagctggagagcagcgctcaaggctctcgcccctcccctccctaacccttaccttcagtctccaccagcctgaagggcctcctaggggatcctcaggcggcccccaccagggcacaccctactgtccttgtgcctcacgccccctcctcatcctgcaccccttccatcccaccttccctttcaataaacagctgggatggatactga

SEQ ID NO: 457659 - DNA, 2946 bp, Homo sapiens
cagtagagctggggtttcaccatattttctttctttctttctttcttttctttctttctttctttctctttcttttcttttcttttctttttctttctttcttttcttctcagagtctctctctgtcacccaggacaacagagtgagacgctgtctcaaaaaaataaaaattaaaaaaaaagaaaaagaaaaactaaaaaggaagatgtggccctatcttgccgagctcattcttctgtgtgtccccagcccctagcacaaggagaaacagaatagatgctcaagacacaaaggcatgtctgtgcaagggtgcttgatgacggttggaggggcacaatgactttcccaagatcacacagcaaatgtgggacaaaatcaaggctgacagctcatgacagggtgggaggcagatgcagctgcctggcacaggctggctctccagggagatgggcagtgggcacgcattgcccagggcagaactggggctaggggaggaaacaacaagggaggctgtcattagctccttccaaagtggaggtcacttctctcccaaccccgagtcctccacccaaactcccttctcaaggtacaagggctgatcccgtaccagggatgggtagggactcaaagaggaaaagaggatgaaaagaggatggggactgagtgagatgtgaggactccagagggattagcggctctcaaggcaagtgggaggggacttcccggtaggagcccggagacagatgggagcctgtgaagagggcgggggcccggcgaggagaagcggtttctacgctggggtggggctccatgagggggatggagacctggaaaagggactgacggtgcagcgaggagaggaaggctcggttaagggatgggtcttccacgggaggggtggggaactgcgggagtgacggcagcttcggtgaggagtctgaggggctgcgtgaggggctggggcccagggagtccgaggggtctctgtgagggcgctggggtgtccgagcgagcagggaactctggaaggggacaggagccgggggagctgcaggcggccgccgtctgcagagccaggccctgaggcgggccggcgccccctcccccgccccgaactgcggcgcaggcgcgaaccggacccgcctttgctcggcggagacagcaggcagagagatgaggaaactgagacccagaaaggtggaagcacttgtctaaggtcacgcctccaggaagcagtgtgtccacgactccagtccaagtggtcaggctccagagcccacagtcccagatcagcctgtcctcggggaccctgcttctgctgctgggtgtggcggctctgaccactggctatgcagtgccccccaagctggagggcatcggtgagggtgagttcctggtgttggatcagcgggcagccgactacaaccaggccctgggcacctgtcgcctggcaggcacagcgctctgtgtggcagctggagttctgctcgccatctgcctcttctgggccatgataggctggctgagccaggacaccaaggcagagcccttggaccccgaagccgacagccacgtggaggtcttcggggatgagccagagcagcagttgtcacccattttccgcaatgccagtggccagtcatggttctcgccacccgccagcccctttgggcaatcttctgtgcagactatccagcccaagagggactcctgagctgcccacatggcctaagatgtgggtcctggatccttcccccttctcaccataaccccctctcagtgtttccccaacttctcccttttagcagggtccctttagagcccaactccaggtcaaatctggagctcaaatcccagtgctccctccccaggagtggggccccaactcttccaagataccagcattcctcaagtcctcccaaaacttcctacccacaccctcttcccaaggccctcaggggcagaaaacatctccttcaacccgtccccactccttcctctgcatgaccttgggcaaacccttgccctttcaagccatcagctcctgcctctctgccatgagggctttggatcagattcctcttctcgccaggatgaggacacgcactgccctccatagacacagatgaaggggtgggggtcattcagctcgaatgggtcccagatgctcacttggcctttccctgcaggatgagtgaagacgtttgcctctcacagtgtgtcttctacctgcattttggcatcagagccccccagcccacccaccacaggcaattactagccctagttgataggtgaggtgggtgaagaaggctggaggtgacatgtccgaggtcacacaacaaagcagcatgcaggaactagaaacacatcttcagcctcctcctgggccagctcttgtgctacaggtggggcggagccagcccctcaccttcctggttccctgagggtcctcagggtggaggacaggtttggcccagaaagactagccagaggcctgatggtcccaggtggctctggatatactttggatatggatttaaatggtctctaagagccgggggtagggggcaggaaaagtgggttgtctttgcccctcaaagtccacctacctagaaaccaagcccacggtcttggccgtgaccctgataataaatgggctctctcagaggcgccagcccctccctccccagccggaggcgtcatctctcttctgtaccactagagggagctctgatgcagctggagagcagcgctcaaggctctcgcccctcccctccctaacccttaccttcagtctccaccagcctgaagggcctcctaggggatcctcaggcggcccccaccagggcacaccctactgtccttgtgcctcacgccccctcctcatcctgcaccccttccatcccaccttccctttcaataaacagctgggatggatactga

SEQ ID NO: 457660 - DNA, 2620 bp, Homo sapiens
cagtagagctggggtttcaccatattttctttctttctttctttcttttctttctttctttctttctctttcttttcttttcttttctttttctttctttcttttcttctcagagtctctctctgtcacccaggacaacagagtgagacgctgtctcaaaaaaataaaaattaaaaaaaaagaaaaagaaaaactaaaaaggaagatgtggccctatcttgccgagctcattcttctgtgtgtccccagcccctagcacaaggagaaacagaatagatgctcaagacacaaaggcatgtctgtgcaagggtgcttgatgacggttggaggggcacaatgactttcccaagatcacacagcaaatgtgggacaaaatcaaggctgacagctcatgacagggtgggaggcagatgcagctgcctggcacaggctggctctccagggagatgggcagtgggcacgcattgcccagggcagaactggggctaggggaggaaacaacaagggaggctgtcattagctccttccaaagtggaggtcacttctctcccaaccccgagtcctccacccaaactcccttctcaaggtacaagggctgatcccgtaccagggatgggtagggactcaaagaggaaaagaggatgaaaagaggatggggactgagtgagatgtgaggactccagagggattagcggctctcaaggcaagtgggaggggacttcccggtaggagcccggagacagatgggagcctgtgaagagggcgggggcccggcgaggagaagcggtttctacgctggggtggggctccatgagggggatggagacctggaaaagggactgacggtgcagcgaggagaggaaggctcggttaagggatgggtcttccacgggaggggtggggaactgcgggagtgacggcagcttcggtgaggagtctgaggggctgcgtgaggggctgggatcagcctgtcctcggggaccctgcttctgctgctgggtgtggcggctctgaccactggctatgcagtgccccccaagctggagggcatcggtgagggtgagttcctggtgttggatcagcgggcagccgactacaaccaggccctgggcacctgtcgcctggcaggcacagcgctctgtgtggcagctggagttctgctcgccatctgcctcttctgggccatgataggctggctgagccaggacaccaaggcagagcccttggaccccgaagccgacagccacgtggaggtcttcggggatgagccagagcagcagttgtcacccattttccgcaatgccagtggccagtcatggttctcgccacccgccagcccctttgggcaatcttctgtgcagactatccagcccaagagggactcctgagctgcccacatggcctaagatgtgggtcctggatccttcccccttctcaccataaccccctctcagtgtttccccaacttctcccttttagcagggtccctttagagcccaactccaggtcaaatctggagctcaaatcccagtgctccctccccaggagtggggccccaactcttccaagataccagcattcctcaagtcctcccaaaacttcctacccacaccctcttcccaaggccctcaggggcagaaaacatctccttcaacccgtccccactccttcctctgcatgaccttgggcaaacccttgccctttcaagccatcagctcctgcctctctgccatgagggctttggatcagattcctcttctcgccaggatgaggacacgcactgccctccatagacacagatgaaggggtgggggtcattcagctcgaatgggtcccagatgctcacttggcctttccctgcaggatgagtgaagacgtttgcctctcacagtgtgtcttctacctgcattttggcatcagagccccccagcccacccaccacaggcaattactagccctagttgataggtgaggtgggtgaagaaggctggaggtgacatgtccgaggtcacacaacaaagcagcatgcaggaactagaaacacatcttcagcctcctcctgggccagctcttgtgctacaggtggggcggagccagcccctcaccttcctggttccctgagggtcctcagggtggaggacaggtttggcccagaaagactagccagaggcctgatggtcccaggtggctctggatatactttggatatggatttaaatggtctctaagagccgggggtagggggcaggaaaagtgggttgtctttgcccctcaaagtccacctacctagaaaccaagcccacggtcttggccgtgaccctgataataaatgggctctctcagaggcgccagcccctccctccccagccggaggcgtcatctctcttctgtaccactagagggagctctgatgcagctggagagcagcgctcaaggctctcgcccctcccctccctaacccttaccttcagtctccaccagcctgaagggcctcctaggggatcctcaggcggcccccaccagggcacaccctactgtccttgtgcctcacgccccctcctcatcctgcaccccttccatcccaccttccctttcaataaacagctgggatggatactga

SEQ ID NO: 457661 - DNA, 3043 bp, Homo sapiens
cagtagagctggggtttcaccatattttctttctttctttctttcttttctttctttctttctttctctttcttttcttttcttttctttttctttctttcttttcttctcagagtctctctctgtcacccaggacaacagagtgagacgctgtctcaaaaaaataaaaattaaaaaaaaagaaaaagaaaaactaaaaaggaagatgtggccctatcttgccgagctcattcttctgtgtgtccccagcccctagcacaaggagaaacagaatagatgctcaagacacaaaggcatgtctgtgcaagggtgcttgatgacggttggaggggcacaatgactttcccaagatcacacagcaaatgtgggacaaaatcaaggctgacagctcatgacagggtgggaggcagatgcagctgcctggcacaggctggctctccagggagatgggcagtgggcacgcattgcccagggcagaactggggctaggggaggaaacaacaagggaggctgtcattagctccttccaaagtggaggtcacttctctcccaaccccgagtcctccacccaaactcccttctcaaggtacaagggctgatcccgtaccagggatgggtagggactcaaagaggaaaagaggatgaaaagaggatggggactgagtgagatgtgaggactccagagggattagcggctctcaaggcaagtgggaggggacttcccggtaggagcccggagacagatgggagcctgtgaagagggcgggggcccggcgaggagaagcggtttctacgctggggtggggctccatgagggggatggagacctggaaaagggactgacggtgcagcgaggagaggaaggctcggttaagggatgggtcttccacgggaggggtggggaactgcgggagtgacggcagcttcggtgaggagtctgaggggctgcgtgaggggctggggcccagggagtccgaggggtctctgtgagggcgctggggtgtccgagcgagcagggaactctggaaggggacaggagccgggggagctgcaggcggccgccgtctgcagagccaggccctgaggcgggccggcgccccctcccccgccccgaactgcggcgcaggcgcgaaccggacccgcctttgctcggcggagacagcaggcagagagatgaggaaactgagacccagaaaggtggaagcacttgtctaaggtcacgcctccaggaagcagtgtgtccacgactccagtccaagtggtcaggctccagagcccacagtcccaggggtccatgatgccgagctgcaatcgttcctgcagctgcagccgcggccccagcgtggaggatggcaagtggtatggggtccgctcctacctgcacctcttctatgaggactgtgcaggcactgctctcagcgacgaccctgagggacctccggtcctgtgcccccgccggccctggccctcactgtgttggaagatcagcctgtcctcggggaccctgcttctgctgctgggtgtggcggctctgaccactggctatgcagtgccccccaagctggagggcatcggtgagggtgagttcctggtgttggatcagcgggcagccgactacaaccaggccctgggcacctgtcgcctggcaggcacagcgctctgtgtggcagctggagttctgctcgccatctgcctcttctgggccatgataggctggctgagccaggacaccaaggcagagcccttggaccccgaagccgacagccacgtggaggtcttcggggatgagccagagcagcagttgtcacccattttccgcaatgccagtggccagtcatggttctcgccacccgccagcccctttgggcaatcttctgtgcagactatccagcccaagagggactcctgagctgcccacatggcctaagatgtgggtcctggatccttcccccttctcaccataaccccctctcagtgtttccccaacttctcccttttagcagggtccctttagagcccaactccaggtcaaatctggagctcaaatcccagtgctccctccccaggagtggggccccaactcttccaagataccagcattcctcaagtcctcccaaaacttcctacccacaccctcttcccaaggccctcaggggcagaaaacatctccttcaacccgtccccactccttcctctgcatgaccttgggcaaacccttgccctttcaagccatcagctcctgcctctctgccatgagggctttggatcagattcctcttctcgccaggatgaggacacgcactgccctccatagacacagatgaaggggtgggggtcattcagctcgaatgggtcccagatgctcacttggcctttccctgcaggatgagtgaagacgtttgcctctcacagtgtgtcttctacctgcattttggcatcagagccccccagcccacccaccacaggcaattactagccctagttgataggtgaggtgggtgaagaaggctggaggtgacatgtccgaggtcacacaacaaagcagcatgcaggaactagaaacacatcttcagcctcctcctgggccagctcttgtgctacaggtggggcggagccagcccctcaccttcctggttccctgagggtcctcagggtggaggacaggtttggcccagaaagactagccagaggcctgatggtcccaggtggctctggatatactttggatatggatttaaatggtctctaagagccgggggtagggggcaggaaaagtgggttgtctttgcccctcaaagtccacctacctagaaaccaagcccacggtcttggccgtgaccctgataataaatgggctctctcagaggcctcccctccctaacccttaccttcagtctccaccagcctgaagggcctcctaggggatcctcaggcggcccccaccagggcacaccctactgtccttgtgcctcacgccccctcctcatcctgcaccccttccatcccaccttccctttcaataaacagctgggatggatactga

SEQ ID NO: 457662 - DNA, 2824 bp, Homo sapiens
cagtagagctggggtttcaccatattttctttctttctttctttcttttctttctttctttctttctctttcttttcttttcttttctttttctttctttcttttcttctcagagtctctctctgtcacccaggacaacagagtgagacgctgtctcaaaaaaataaaaattaaaaaaaaagaaaaagaaaaactaaaaaggaagatgtggccctatcttgccgagctcattcttctgtgtgtccccagcccctagcacaaggagaaacagaatagatgctcaagacacaaaggcatgtctgtgcaagggtgcttgatgacggttggaggggcacaatgactttcccaagatcacacagcaaatgtgggacaaaatcaaggctgacagctcatgacagggtgggaggcagatgcagctgcctggcacaggctggctctccagggagatgggcagtgggcacgcattgcccagggcagaactggggctaggggaggaaacaacaagggaggctgtcattagctccttccaaagtggaggtcacttctctcccaaccccgagtcctccacccaaactcccttctcaaggtacaagggctgatcccgtaccagggatgggtagggactcaaagaggaaaagaggatgaaaagaggatggggactgagtgagatgtgaggactccagagggattagcggctctcaaggcaagtgggaggggacttcccggtaggagcccggagacagatgggagcctgtgaagagggcgggggcccggcgaggagaagcggtttctacgctggggtggggctccatgagggggatggagacctggaaaagggactgacggtgcagcgaggagaggaaggctcggttaagggatgggtcttccacgggaggggtggggaactgcgggagtgacggcagcttcggtgaggagtctgaggggctgcgtgaggggctggggcccagggagtccgaggggtctctgtgagggcgctggggtgtccgagcgagcagggaactctggaaggggacaggagccgggggagctgcaggcggccgccgtctgcagagccaggccctgaggcgggccggcgccccctcccccgccccgaactgcggcgcaggcgcgaaccggacccgcctttgctcggcggagacagcaggcagagagatgaggaaactgagacccagaaaggtggaagcacttgtctaaggtcacgcctccaggaagcagtgtgtccacgactccagtccaagtggtcaggctccagagcccacagtcccaggggtccatgatgccgagctgcaatcgttcctgcagctgcagccgcggccccagcgtggaggatggcaagtggtatggggtccgctcctacctgcacctcttctatgaggactgtgcaggcactgctctcagcgacgaccctgagggacctccggtcctgtgcccccgccggccctggccctcactgtgttggaagatcagcctgtcctcggggaccctgcttctgctgctgggtgtggcggctctgaccactggctatgcagtgccccccaagctggagggcatcggtgagggtgagttcctggtgttggatcagcgggcagccgactacaaccaggccctgggcacctgtcgcctggcaggcacagcgctctgtgtggcagctggagttctgctcgccatctgcctcttctgggccatgataggctggctgagccaggacaccaaggcagagcccttggaccccgaagccgacagccacgtggaggtcttcggggatgagccagagcagcagttgtcacccattttccgcaatgccagtggccagtcatggttctcgccacccgccagcccctttgggcaatcttctgtgcagactatccagcccaagagggactcctgagctgcccacatggcctaagatgtgggtcctggatccttcccccttctcaccataaccccctctcagtgtttccccaacttctcccttttagcagggtccctttagagcccaactccaggtcaaatctggagctcaaatcccagtgctccctccccaggagtggggccccaactcttccaagataccagcattcctcaagtcctcccaaaacttcctacccacaccctcttcccaaggccctcaggggcagaaaacatctccttcaacccgtccccactccttcctctgcatgaccttgggcaaacccttgccctttcaagccatcagctcctgcctctctgccatgagggctttggatcagattcctcttctcgccaggatgaggacacgcactgccctccatagacacagatgaaggggtgggggtcattcagctcgaatgggtcccagatgctcacttggcctttccctgcaggatgagtgaagacgtttgcctctcacagtgtgtcttctacctgcattttggcatcagagccccccagcccacccaccacaggcaattactagccctagttgataggtgaggtgggtgaagaaggctggaggtgacatgtccgaggtcacacaacaaagcagcatgcaggaactagaaacacatcttcagcctcctcctgggccagctcttgtgctacaggtggggcggagccagcccctcaccttcctggttccctgagggtcctcagggtggaggacaggtttggcccagaaagactagccagaggcctgatggtcccaggtggctctggatatactttggatatggatttaaatggtctctgtgagggcgctggggtgtccgagcgagcagggaactctggaaggggacaggagccgggggagctgcaggcggccgct

SEQ ID NO: 457663 - DNA, 2337 bp, Homo sapiens
cagtagagctggggtttcaccatattttctttctttctttctttcttttctttctttctttctttctctttcttttcttttcttttctttttctttctttcttttcttctcagagtctctctctgtcacccaggacaacagagtgagacgctgtctcaaaaaaataaaaattaaaaaaaaagaaaaagaaaaactaaaaaggaagatgtggccctatcttgccgagctcattcttctgtgtgtccccagcccctagcacaaggagaaacagaatagatgctcaagacacaaaggcatgtctgtgcaagggtgcttgatgacggttggaggggcacaatgactttcccaagatcacacagcaaatgtgggacaaaatcaaggctgacagctcatgacagggtgggaggcagatgcagctgcctggcacaggctggctctccagggagatgggcagtgggcacgcattgcccagggcagaactggggctaggggaggaaacaacaagggaggctgtcattagctccttccaaagtggaggtcacttctctcccaaccccgagtcctccacccaaactcccttctcaaggtacaagggctgatcccgtaccagggatgggtagggactcaaagaggaaaagaggatgaaaagaggatggggactgagtgagatgtgaggactccagagggattagcggctctcaaggcaagtgggaggggacttcccggtaggagcccggagacagatgggagcctgtgaagagggcgggggcccggcgaggagaagcggtttctacgctggggtggggctccatgagggggatggagacctggaaaagggactgacggtgcagcgaggagaggaaggctcggttaagggatgggtcttccacgggaggggtggggaactgcgggagtgacggcagcttcggtgaggagtctgaggggctgcgtgaggggctggggcccagggagtccgaggggtctctgtgagggcgctggggtgtccgagcgagcagggaactctggaaggggacaggagccgggggagctgcaggcggccgccgtctgcagagccaggccctgaggcgggccggcgccccctcccccgccccgaactgcggcgcaggcgcgaaccggacccgcctttgctcggcggagacagcaggcagagagatgaggaaactgagacccagaaaggtggaagcacttgtctaaggtcacgcctccaggaagcagtgtgtccacgactccagtccaagtggtcaggctccagagcccacagtcccaggggtccatgatgccgagctgcaatcgttcctgcagctgcagccgcggccccagcgtggaggatggcaagtggtatggggtccgctcctacctgcacctcttctatgaggactgtgcaggcactgctctcagcgacgaccctgagggacctccggtcctgtgcccccgccggccctggccctcactgtgttggaagatcagcctgtcctcggggaccctgcttctgctgctgggtgtggcggctctgaccactggctatgcagtgccccccaagctggagggcatcggtgagggatgagtgaagacgtttgcctctcacagtgtgtcttctacctgcattttggcatcagagccccccagcccacccaccacaggcaattactagccctagttgataggtgaggtgggtgaagaaggctggaggtgacatgtccgaggtcacacaacaaagcagcatgcaggaactagaaacacatcttcagcctcctcctgggccagctcttgtgctacaggtggggcggagccagcccctcaccttcctggttccctgagggtcctcagggtggaggacaggtttggcccagaaagactagccagaggcctgatggtcccaggtggctctggatatactttggatatggatttaaatggtctctaagagccgggggtagggggcaggaaaagtgggttgtctttgcccctcaaagtccacctacctagaaaccaagcccacggtcttggccgtgaccctgataataaatgggctctctcagaggcgccagcccctccctccccagccggaggcgtcatctctcttctgtaccactagagggagctctgatgcagctggagagcagcgctcaaggctctcgcccctcccctccctaacccttaccttcagtctccaccagcctgaagggcctcctaggggatcctcaggcggcccccaccagggcacaccctactgtccttgtgcctcacgccccctcctcatcctgcaccccttccatcccaccttccctttcaataaacagctgggatggatactga

SEQ ID NO: 457664 - DNA, 1968 bp, Homo sapiens
cagtagagctggggtttcaccatattttctttctttctttctttcttttctttctttctttctttctctttcttttcttttcttttctttttctttctttcttttcttctcagagtctctctctgtcacccaggacaacagagtgagacgctgtctcaaaaaaataaaaattaaaaaaaaagaaaaagaaaaactaaaaaggaagatgtggccctatcttgccgagctcattcttctgtgtgtccccagcccctagcacaaggagaaacagaatagatgctcaagacacaaaggcatgtctgtgcaagggtgcttgatgacggttggaggggcacaatgactttcccaagatcacacagcaaatgtgggacaaaatcaaggctgacagctcatgacagggtgggaggcagatgcagctgcctggcacaggctggctctccagggagatgggcagtgggcacgcattgcccagggcagaactggggctaggggaggaaacaacaagggaggctgtcattagctccttccaaagtggaggtcacttctctcccaaccccgagtcctccacccaaactcccttctcaaggtacaagggctgatcccgtaccagggatgggtagggactcaaagaggaaaagaggatgaaaagaggatggggactgagtgagatgtgaggactccagagggattagcggctctcaaggcaagtgggaggggacttcccggtaggagcccggagacagatgggagcctgtgaagagggcgggggcccggcgaggagaagcggtttctacgctggggtggggctccatgagggggatggagacctggaaaagggactgacggtgcagcgaggagaggaaggctcggttaagggatgggtcttccacgggaggggtggggaactgcgggagtgacggcagcttcggtgaggagtctgaggggctgcgtgaggggctggggcccagggagtccgaggggtctctgtgagggcgctggggtgtccgagcgagcagggaactctggaaggggacaggagccgggggagctgcaggcggccgccgtctgcagagccaggccctgaggcgggccggcgccccctcccccgccccgaactgcggcgcaggcgcgaaccggacccgcctttgctcggcggagacagcaggcagagagatgaggaaactgagacccagaaaggtggaagcacttgtctaaggtcacgcctccaggaagcagtgtgtccgagctggccgggcccgggggcaggggtccgagggtcggcggggccggggggggagggtggggtgggggggggggtgctgggggctgcagccgcggccccagcgtggaggatggcaagtggtatggggtccgctcctacctgcacctcttctatgaggactgtgcaggcactgctctcagcgacgaccctgagggacctccggtcctgtgcccccgccggccctggccctcactgtgttggaaggacaggtttggcccagaaagactagccagaggcctgatggtcccaggtggctctggatatactttggatatggatttaaatggtctctaagagccgggggtagggggcaggaaaagtgggttgtctttgcccctcaaagtccacctacctagaaaccaagcccacggtcttggccgtgaccctgataataaatgggctctctcagaggcgccagcccctccctccccagccggaggcgtcatctctcttctgtaccactagagggagctctgatgcagctggagagcagcgctcaaggctctcgcccctcccctccctaacccttaccttcagtctccaccagcctgaagggcctcctaggggatcctcaggcggcccccaccagggcacaccctactgtccttgtgcctcacgccccctcctcatcctgcaccccttccatcccaccttccctttcaataaacagctgggatggatactga

SEQ ID NO: 457665 - DNA, 1867 bp, Homo sapiens
cagtagagctggggtttcaccatattttctttctttctttctttcttttctttctttctttctttctctttcttttcttttcttttctttttctttctttcttttcttctcagagtctctctctgtcacccaggacaacagagtgagacgctgtctcaaaaaaataaaaattaaaaaaaaagaaaaagaaaaactaaaaaggaagatgtggccctatcttgccgagctcattcttctgtgtgtccccagcccctagcacaaggagaaacagaatagatgctcaagacacaaaggcatgtctgtgcaagggtgcttgatgacggttggaggggcacaatgactttcccaagatcacacagcaaatgtgggacaaaatcaaggctgacagctcatgacagggtgggaggcagatgcagctgcctggcacaggctggctctccagggagatgggcagtgggcacgcattgcccagggcagaactggggctaggggaggaaacaacaagggaggctgtcattagctccttccaaagtggaggtcacttctctcccaaccccgagtcctccacccaaactcccttctcaaggtacaagggctgatcccgtaccagggatgggtagggactcaaagaggaaaagaggatgaaaagaggatggggactgagtgagatgtgaggactccagagggattagcggctctcaaggcaagtgggaggggacttcccggtaggagcccggagacagatgggagcctgtgaagagggcgggggcccggcgaggagaagcggtttctacgctggggtggggctccatgagggggatggagacctggaaaagggactgacggtgcagcgaggagaggaaggctcggttaagggatgggtcttccacgggaggggtggggaactgcgggagtgacggcagcttcggtgaggagtctgaggggctgcgtgaggggctggggcccagggagtccgaggggtctctgtgagggcgctggggtgtccgagcgagcagggaactctggaaggggacaggagccgggggagctgcaggcggccgccgtctgcagagccaggccctgaggcgggccggcgccccctcccccgccccgaactgcggcgcaggcgcgaaccggacccgcctttgctcggcggagacagcaggcagagagatgaggaaactgagacccagaaaggtggaagcacttgtctaaggtcacgcctccaggaagcagtgtgtccacgactccagtccaagtggtcaggctccagagcccacagtcccaggggtccatgatgccgagctgcaatcgttcctgcagctgcagccgcggccccagcgtggaggatggcaagtggtatggggtccgctcctacctgcacctcttctatgaggactgtgcaggcactgctctcagcgacgaccctgagggacctccggtcctgtgcccccgccggccctggccctcactgtgttggaaggacaggtttggcccagaaagactagccagaggcctgatggtcccaggtggctctggatatactttggatatggatttaaatggtctctaagagccgggggtagggggcaggaaaagtgggttgtctttgcccctcaaagtccacctacctagaaaccaagcccacggtcttggccgtgaccctgataataaatgggctctctcagaggcctcccctccctaacccttaccttcagtctccaccagcctgaagggcctcctaggggatcctcaggcggcccccaccagggcacaccctactgtccttgtgcctcacgccccctcctcatcctgcaccccttccatcccaccttccctttcaataaacagctgggatggatactga

SEQ ID NO: 457666 - DNA, 3141 bp, Homo sapiens
cagtagagctggggtttcaccatattttctttctttctttctttcttttctttctttctttctttctctttcttttcttttcttttctttttctttctttcttttcttctcagagtctctctctgtcacccaggacaacagagtgagacgctgtctcaaaaaaataaaaattaaaaaaaaagaaaaagaaaaactaaaaaggaagatgtggccctatcttgccgagctcattcttctgtgtgtccccagcccctagcacaaggagaaacagaatagatgctcaagacacaaaggcatgtctgtgcaagggtgcttgatgacggttggaggggcacaatgactttcccaagatcacacagcaaatgtgggacaaaatcaaggctgacagctcatgacagggtgggaggcagatgcagctgcctggcacaggctggctctccagggagatgggcagtgggcacgcattgcccagggcagaactggggctaggggaggaaacaacaagggaggctgtcattagctccttccaaagtggaggtcacttctctcccaaccccgagtcctccacccaaactcccttctcaaggtacaagggctgatcccgtaccagggatgggtagggactcaaagaggaaaagaggatgaaaagaggatggggactgagtgagatgtgaggactccagagggattagcggctctcaaggcaagtgggaggggacttcccggtaggagcccggagacagatgggagcctgtgaagagggcgggggcccggcgaggagaagcggtttctacgctggggtggggctccatgagggggatggagacctggaaaagggactgacggtgcagcgaggagaggaaggctcggttaagggatgggtcttccacgggaggggtggggaactgcgggagtgacggcagcttcggtgaggagtctgaggggctgcgtgaggggctggggcccagggagtccgaggggtctctgtgagggcgctggggtgtccgagcgagcagggaactctggaaggggacaggagccgggggagctgcaggcggccgccgtctgcagagccaggccctgaggcgggccggcgccccctcccccgccccgaactgcggcgcaggcgcgaaccggacccgcctttgctcggcggagacagcaggcagagagatgaggaaactgagacccagaaaggtggaagcacttgtctaaggtcacgcctccaggaagcagtgtgtccacgactccagtccaagtggtcaggctccagagcccacagtcccaggggtccatgatgccgagctgcaatcgttcctgcagctgcagccgcggccccagcgtggaggatggcaagtggtatggggtccgctcctacctgcacctcttctatgaggactgtgcaggcactgctctcagcgacgaccctgagggacctccggtcctgtgcccccgccggccctggccctcactgtgttggaagatcagcctgtcctcggggaccctgcttctgctgctgggtgtggcggctctgaccactggctatgcagtgccccccaagctggagggcatcggtgagggtgagttcctggtgttggatcagcgggcagccgactacaaccaggccctgggcacctgtcgcctggcaggcacagcgctctgtgtggcagctggagttctgctcgccatctgcctcttctgggccatgataggctggctgagccaggacaccaaggcagagcccttggaccccgaagccgacagccacgtggaggtcttcggggatgagccagagcagcagttgtcacccattttccgcaatgccagtggccagtcatggttctcgccacccgccagcccctttgggcaatcttctgtgcagactatccagcccaagagggactcctgagctgcccacatggcctaagatgtgggtcctggatccttcccccttctcaccataaccccctctcagtgtttccccaacttctcccttttagcagggtccctttagagcccaactccaggtcaaatctggagctcaaatcccagtgctccctccccaggagtggggccccaactcttccaagataccagcattcctcaagtcctcccaaaacttcctacccacaccctcttcccaaggccctcaggggcagaaaacatctccttcaacccgtccccactccttcctctgcatgaccttgggcaaacccttgccctttcaagccatcagctcctgcctctctgccatgagggctttggatcagattcctcttctcgccaggatgaggacacgcactgccctccatagacacagatgaaggggtgggggtcattcagctcgaatgggtcccagatgctcacttggcctttccctgcaggatgagtgaagacgtttgcctctcacagtgtgtcttctacctgcattttggcatcagagccccccagcccacccaccacaggcaattactagccctagttgataggtgaggtgggtgaagaaggctggaggtgacatgtccgaggtcacacaacaaagcagcatgcaggaactagaaacacatcttcagcctcctcctgggccagctcttgtgctacaggtggggcggagccagcccctcaccttcctggttccctgagggtcctcagggtggaggacaggtttggcccagaaagactagccagaggcctgatggtcccaggtggctctggatatactttggatatggatttaaatggtctctaagagccgggggtagggggcaggaaaagtgggttgtctttgcccctcaaagtccacctacctagaaaccaagcccacggtcttggccgtgaccctgataataaatgggctctctcagaggcgccagcccctccctccccagccggaggcgtcatctctcttctgtaccactagagggagctctgatgcagctggagagcagcgctcaaggctctcgcccctcccctccctaacccttaccttcagtctccaccagcctgaagggcctcctaggggatcctcaggcggcccccaccagggcacaccctactgtccttgtgcctcacgccccctcctcatcctgcaccccttccatcccaccttccctttcaataaacagctgggatggatactga

SEQ ID NO: 457667 - DNA, 2276 bp, Homo sapiens
gactttcacttccaatggagtcaaaattcattggaatctggaggctttcaggggcagtcctggggaggacctttttataaccttgcagcttgggaactccagcccaagtgtcagccatgacaattacccccaggagggggtctgaaggggagcggagggtgaggctctctcattccagatatggagactaaaaagttcaagatggaagtaatagcaaaaaaattacagtactaatcacaacagctaccatttctcagcattagacacagtaactgtatgaaagaagtatgattattaggtctgttttaatgaggaaactgagacccagaaaggtggaagcacttgtctaaggtcacgcctccaggaagcagtgtgtccacgactccagtccaagtggtcaggctccagagcccacagtcccaggggtccatgatgccgagctgcaatcgttcctgcagctgcagccgcggccccagcgtggaggatggcaagtggtatggggtccgctcctacctgcacctcttctatgaggactgtgcaggcactgctctcagcgacgaccctgagggacctccggtcctgtgcccccgccggccctggccctcactgtgttggaagatcagcctgtcctcggggaccctgcttctgctgctgggtgtggcggctctgaccactggctatgcagtgccccccaagctggagggcatcggtgagggtgagttcctggtgttggatcagcgggcagccgactacaaccaggccctgggcacctgtcgcctggcaggcacagcgctctgtgtggcagctggagttctgctcgccatctgcctcttctgggccatgataggctggctgagccaggacaccaaggcagagcccttggaccccgaagccgacagccacgtggaggtcttcggggatgagccagagcagcagttgtcacccattttccgcaatgccagtggccagtcatggttctcgccacccgccagcccctttgggcaatcttctgtgcagactatccagcccaagagggactcctgagctgcccacatggcctaagatgtgggtcctggatccttcccccttctcaccataaccccctctcagtgtttccccaacttctcccttttagcagggtccctttagagcccaactccaggtcaaatctggagctcaaatcccagtgctccctccccaggagtggggccccaactcttccaagataccagcattcctcaagtcctcccaaaacttcctacccacaccctcttcccaaggccctcaggggcagaaaacatctccttcaacccgtccccactccttcctctgcatgaccttgggcaaacccttgccctttcaagccatcagctcctgcctctctgccatgagggctttggatcagattcctcttctcgccaggatgaggacacgcactgccctccatagacacagatgaaggggtgggggtcattcagctcgaatgggtcccagatgctcacttggcctttccctgcaggatgagtgaagacgtttgcctctcacagtgtgtcttctacctgcattttggcatcagagccccccagcccacccaccacaggcaattactagccctagttgataggtgaggtgggtgaagaaggctggaggtgacatgtccgaggtcacacaacaaagcagcatgcaggaactagaaacacatcttcagcctcctcctgggccagctcttgtgctacaggtggggcggagccagcccctcaccttcctggttccctgagggtcctcagggtggaggacaggtttggcccagaaagactagccagaggcctgatggtcccaggtggctctggatatactttggatatggatttaaatggtctctaagagccgggggtagggggcaggaaaagtgggttgtctttgcccctcaaagtccacctacctagaaaccaagcccacggtcttggccgtgaccctgataataaatgggctctctcagaggcgccagcccctccctccccagccggaggcgtcatctctcttctgtaccactagagggagctctgatgcagctggagagcagcgctcaaggctctcgcccctcccctccctaacccttaccttcagtctccaccagcctgaagggcctcctaggggatcctcaggcggcccccaccagggcacaccctactgtccttgtgcctcacgccccctcctcatcctgcaccccttccatcccaccttccctttcaataaacagctgggatggatactga

SEQ ID NO: 457668 - DNA, 4177 bp, Homo sapiens
cagtagagctggggtttcaccatattttctttctttctttctttcttttctttctttctttctttctctttcttttcttttcttttctttttctttctttcttttcttctcagagtctctctctgtcacccaggacaacagagtgagacgctgtctcaaaaaaataaaaattaaaaaaaaagaaaaagaaaaactaaaaaggaagatgtggccctatcttgccgagctcattcttctgtgtgtccccagcccctagcacaaggagaaacagaatagatgctcaagacacaaaggcatgtctgtgcaagggtgcttgatgacggttggaggggcacaatgactttcccaagatcacacagcaaatgtgggacaaaatcaaggctgacagctcatgacagggtgggaggcagatgcagctgcctggcacaggctggctctccagggagatgggcagtgggcacgcattgcccagggcagaactggggctaggggaggaaacaacaagggaggctgtcattagctccttccaaagtggaggtcacttctctcccaaccccgagtcctccacccaaactcccttctcaaggtacaagggctgatcccgtaccagggatgggtagggactcaaagaggaaaagaggatgaaaagaggatggggactgagtgagatgtgaggactccagagggattagcggctctcaaggcaagtgggaggggacttcccggtaggagcccggagacagatgggagcctgtgaagagggcgggggcccggcgaggagaagcggtttctacgctggggtggggctccatgagggggatggagacctggaaaagggactgacggtgcagcgaggagaggaaggctcggttaagggatgggtcttccacgggaggggtggggaactgcgggagtgacggcagcttcggtgaggagtctgaggggctgcgtgaggggctggggcccagggagtccgaggggtctctgtgagggcgctggggtgtccgagcgagcagggaactctggaaggggacaggagccgggggagctgcaggcggccgccgtctgcagagccaggccctgaggcgggccggcgccccctcccccgccccgaactgcggcgcaggcgcgaaccggacccgcctttgctcggcggagacagcaggcagagagatgaggaaactgagacccagaaaggtggaagcacttgtctaaggtcacgcctccaggaagcagtgtgtccacgactccagtccaagtggtcaggctccagagcccacagtcccaggggtccatgatgccgagctgcaatcgttcctgcagctgcagccgcggccccagcgtggaggatggcaagtggtatggggtccgctcctacctgcacctcttctatgaggactgtgcaggcactgctctcagcgacgaccctgagggacctccggtcctgtgcccccgccggccctggccctcactgtgttggaagatcagcctgtcctcggggaccctgcttctgctgctgggtgtggcggctctgaccactggctatgcagtgccccccaagctggagggcatcggtgagggtgagttcctggtgttggatcagcgggcagccgactacaaccaggccctgggcacctgtcgcctggcaggcacagcgctctgtgtggcagctggagttctgctcgccatctgcctcttctgggccatgataggctggctgagccaggacaccaaggcagagcccttggaccccgaagccgacagccacgtggaggtcttcggggatgagccagagcagcagttgtcacccattttccgcaatgccagtggccagtcatggttctcgccacccgccagcccctttgggcaatcttctgtgcagactatccagcccaagagggactcctgagctgcccacatggcctaagatgtgggtcctggatccttcccccttctcaccataaccccctctcagtgtttccccaacttctcccttttagcagggtccctttagagcccaactccaggtcaaatctggagctcaaatcccagtgctccctccccaggagtggggccccaactcttccaagataccagcattcctcaagtcctcccaaaacttcctacccacaccctcttcccaaggccctcaggggcagaaaacatctccttcaacccgtccccactccttcctctgcatgaccttgggcaaacccttgccctttcaagccatcagctcctgcctctctgccatgagggctttggatcagattcctcttctcgccaggatgaggacacgcactgccctccatagacacagatgaaggggtgggggtcattcagctcgaatgggtcccagatgctcacttggcctttccctgcaggatgagtgaagacgtttgcctctcacagtgtgtcttctacctgcattttggcatcagagccccccagcccacccaccacaggcaattactagccctagttgataggtgaggtgggtgaagaaggctggaggtgacatgtccgaggtcacacaacaaagcagcatgcaggaactagaaacacatcttcagcctcctcctgggccagctcttgtgctacaggtggggcggagccagcccctcaccttcctggttccctgagggtcctcagggtggaggacaggtttggcccagaaagactagccagaggcctgatggtcccaggtggctctggatatactttggatatggatttaaatggtctctaagagccgggggtagggggcaggaaaagtgggttgtctttgcccctcaaagtccacctacctagaaaccaagcccacggtcttggccgtgaccctgataataaatgggctctctcagaggcgccagcccctccctccccagccggaggcgtcatctctcttctgtaccactagagggagctctgatgcagctggagagcagcgctcaaggctctcgcccctcccctccctaacccttaccttcagtctccaccagcctgaagggcctcctaggggatcctcaggcggcccccaccagggcacaccctactgtccttgtgcctcacgccccctcctcatcctgcaccccttccatcccaccttccctttcaataaacagctgggatggatactgaaaaaaaaaaaaaaaaaaaaaaaaaaaaaaaaaaaaaaaaacaacaaaaacaaaaacaaacaaaaaaaacaaaaacaaaaacaaaatcaagagagcgcggcagagacgacagaagagcacgcctctaggaggtagagaagcagcgaacaacagccacgccacgagaccagagctagcatcgacgaaagggcagctgtcgcctaaatagacgaagcgcaggtatataagacaggaggcgggaggcgagggcgaggcactaccatacacaccacaactaacacacaaacaccgacagcaatcaacaaacaccattccgcacatcaattgtccttaccgttcacgcttcactctacacacacaaaataaatataaaatagaatacacctgataatgaatcactcactccacaccaccacaccaaccctactacactacacaccttcactactcagctaaccaataccaacagacccagaactaagcacatctatgacacaataaaacatcaagcaatctaatcccaacacctccctcaatcccagtaacactcatcaccacacaaaaataatcctatctcacacacacacaaaaaaaaaaacgcactacccaccactactaatctcactccccacaccacactctatacacacacctcatacatgataggacggcgagacgagaacaaggttaagagccgaacgacctctcgcacgcgacaggagaaagagtgacagagagcaggcgacgggaagcgcgggcgatggcagagcgcgtgaccgagggtgaggtacgcgagcgcacggaggggtgcgcggtaccacgacatcacccccgcatgctcgcctacacaacgtgttcactttatcactccaactctcattactcatctctaactctaccaaacatcacccactaacttccccagctactcccagtcgtccacacccgaccttgttagtaaccaatactccaataaccatcgacgccttctattctctaattcacaccgtccccctgctacacctcgactccaacca

SEQ ID NO: 457669 - DNA, 1624 bp, Homo sapiens
cacgcctgctgggggtatattgtgttgacgtccgcttactgatgctccgccttactgacgccgcttactgatgctccgccttactgaggtccgctcggaccaaccaggccctgggcacctgtcgcctggcaggcacagcgctctgtgtggcagctggagttctgctcgccatctgcctcttctgggccatgataggctggctgagccaggacaccaaggcagagcccttggaccccgaagccgacagccacgtggaggtcttcggggatgagccagagcagcagttgtcacccattttccgcaatgccagtggccagtcatggttctcgccacccgccagcccctttgggcaatcttctgtgcagactatccagcccaagagggactcctgagctgcccacatggcctaagatgtgggtcctggatccttcccccttctcaccataaccccctctcagtgtttccccaacttctcccttttagcagggtccctttagagcccaactccaggtcaaatctggagctcaaatcccagtgctccctccccaggagtggggccccaactcttccaagataccagcattcctcaagtcctcccaaaacttcctacccacaccctcttcccaaggccctcaggggcagaaaacatctccttcaacccgtccccactccttcctctgcatgaccttgggcaaacccttgccctttcaagccatcagctcctgcctctctgccatgagggctttggatcagattcctcttctcgccaggatgaggacacgcactgccctccatagacacagatgaaggggtgggggtcattcagctcgaatgggtcccagatgctcacttggcctttccctgcaggatgagtgaagacgtttgcctctcacagtgtgtcttctacctgcattttggcatcagagccccccagcccacccaccacaggcaattactagccctagttgataggtgaggtgggtgaagaaggctggaggtgacatgtccgaggtcacacaacaaagcagcatgcaggaactagaaacacatcttcagcctcctcctgggccagctcttgtgctacaggtggggcggagccagcccctcaccttcctggttccctgagggtcctcagggtggaggacaggtttggcccagaaagactagccagaggcctgatggtcccaggtggctctggatatactttggatatggatttaaatggtctctaagagccgggggtagggggcaggaaaagtgggttgtctttgcccctcaaagtccacctacctagaaaccaagcccacggtcttggccgtgaccctgataataaatgggctctctcagaggcgccagcccctccctccccagccggaggcgtcatctctcttctgtaccactagagggagctctgatgcagctggagagcagcgctcaaggctctcgcccctcccctccctaacccttaccttcagtctccaccagcctgaagggcctcctaggggatcctcaggcggcccccaccagggcacaccctactgtccttgtgcctcacgccccctcctcatcctgcaccccttccatcccaccttccctttcaataaacagctgggatggatactga

SEQ ID NO: 457670 - DNA, 718 bp, Homo sapiens
gagccgaggcctccgaagcggaagtgggttgctgttgaggcggcggcatctttctcgaggagctctcctgggcggctgaagaaggagcttcttctccggagtgcgccggcggtggcgcctgcggacctaactagctccaggttaggccgagctttgcgggaaagcagcggacttgaaaatactggaaatctgtccggatccaaattattttgcaagccagatgagtaaccagagggcatgaaaggttgagaacatttgacttccctgcaaaccttggtatagatcacttccttttctgtaggaaaggaaaggcaccaaagagcacaatgagtacaagaaagcgtcgtggtggagcaataaattctagacaagctcagaagcgaactcgggaagcaacctccacccccgagatctccttggaagcagaacccatagaactcgtggaaactgctggagatgaaattgtggacctcacttgtgaatctttagagcctgtggtggttgatctgactcacaatgactctgttgtgattgttgacgaaagaagaagaccaaggaggaatgctaggaggctgccccaggaccatgctgacagctgtgtggtgagcagtgacgatgaggagttgtccagggacagagacgtatatgtgactacccatactcccagaaacgccagggatgagggcgctacaggcctcaggtaccaacgtgcccccag

SEQ ID NO: 457671 - DNA, 798 bp, Homo sapiens
accatgttggccaggctgaccttgaactcctcacctcatgattcgcccacctcagcctccgaaagtgctgggattacaggtgtgagccaccatgcccagccgacctgctgatagtttgataaaacagaagttttactttctggaatttctactcattttatgttttggatggtttctctctccgtaagcattcagtattcttgaatctcaagttttgaaaggagccctaacttcaagtctactcgctggcttcttaatgaagtgaaccatttctattgcccatttagttcttcctgaaaccctgacattctggtgttcatgtgactcttctttcccccttgctactcagagaaagcgtcgtggtggagcaataaattctagacaagctcagaagcgaactcgggaagcaacctccacccccgagatctccttggaagcagaacccatagaactcgtggaaactggtaagattgccagggacactacaactgtggggtgttaaagtggagagagaacactgtaccagggtgagctagtagaaggtgctttcagtgtctttagaaggcctatgcagtctcacactcaccatgtacaactcaaagcttcacagattctgaaatagcttctcaactgggctaactgttcaactctggtaatgtgcagcagtggggtaggatccatttaaaaaaaaatctagcgcaaatgagatagcccaccttttctatctgaaactgcatccccaattgctggaccttgtaaagtacgtcgctttcctcttctgtttttcattaggacatg

SEQ ID NO: 457672 - DNA, 858 bp, Homo sapiens
tggaagtgggatgccgtggaatagaggtatgcacatgcgcacacatacataaccccccaggtacatttgtaaaaaccatacctccccactcagagcagaattctggaagggtggttactggctttccctcctgagggaggtgttggtcctggtgctctttgcagtgtatacttcaggattgttttagtttggggtaagcctatattacattagcagtcatactaaagtgtagagggatacaaccttactttcctcttaatcttaatgcttgttgaaatactttcttttgaagctggagatgaaattgtggacctcacttgtgaatctttagagcctgtggtggttgatctgactcacaatgactctgttgtgattagtgttggagtgtgagagtcggctgtttcttgggtatgggtccctggccagtgccagcatctgacagccttggtcacagactccaagtcaaggttacagcttatgctaaagaagttcatgcatcttgtggaattgagcttttagaaagaaaataaacagtaacaataataataacaaagaagttcatgcattcagtgacgagagcccaaaatgaaaaatgtttctggaaaatcatttgttatagccttgtcgcctatggagtaggtctgtgtaacctgaccttgccacacctgggcacaaaagtggtttggggagaatctcaagacccccacatctgtcttcagtccctgattccacagtttacaccagctgtgtgaccttgggcatgtgacttagcctcattcactttccatgaaatggggacaggtcactcatgtcagcagggcatggtgtaagacatcttacaacagatgccgtgtttga

SEQ ID NO: 457673 - DNA, 395 bp, Homo sapiens
gagccgaggcctccgaagcggaagtgggttgctgttgaggcggcggcatctttctcgaggagctctcctgggcggctgaagaaggagcttcttctccggagtgcgccggcggtggcgcctgcggacctaactagctccaggttaggccgagctttgcgggaaagcagcggacttgaaaatactggaaatctgtccggatccaaattattttgcaagccagatgagtaaccagagggcatgaaaggttgagaacatttgacttccctgcaaaccttggtatagatcacttccttttctgtaggaaaggaaaggcaccaaagagcacaatgagtacaggacaagaaggctgtcggggggagcaataattttggcaagtcagagggacttggggagca

SEQ ID NO: 457674 - DNA, 2907 bp, Homo sapiens
gagccgaggcctccgaagcggaagtgggttgctgttgaggcggcggcatctttctcgaggagctctcctgggcggctgaagaaggagcttcttctccggagtgcgccggcggtggcgcctgcggacctaactagctccaggacttgaaaatactggaaatctgtccggatccaaattattttgcaagccagatgagtaaccagagggcatgaaaggttgagaacatttgacttccctgcaaaccttggtatagatcacttccttttctgtaggaaaggaaaggcaccaaagagcacaatgagtacaagaaagcgtcgtggtggagcaataaattctagacaagctcagaagcgaactcgggaagcaacctccacccccgagatctccttggaagcagaacccatagaactcgtggaaactgctggagatgaaattgtggacctcacttgtgaatctttagagcctgtggtggttgatctgactcacaatgactctgttgtgattgttgacgaaagaagaagaccaaggaggaatgctaggaggctgccccaggaccatgctgacagctgtgtggtgagcagtgacgatgaggagttgtccagggacagagacgtatatgtgactacccatactcccagaaacgccagggatgagggcgctacaggcctcaggccctcaggtactgtcagttgtcccatctgcatggacggatactcagagatcgtgcagaatggacgtctcatcgtttccacagaatgcggccatgtcttctgtagccagtgcctccgtgattccctgaagaatgctaatacttgcccaacttgtaggaaaaagatcaaccacaaacggtaccaccccatttatatatgaagtattcagagccccccaggagagacggatggacagacagacagccaggttctccagtggtatctgcctccattttcctgagatcaaaaagactgtttcgaaaccaacatctgatatgtaaactgctcttttgtttccaaccccttccttttgttatctccagtttgatgctatggcgctggacccagggccctcccaggccatctctgttcctctggggtggtccagttctagagtgggagaaagggagtcaggcgcattgggaatcgtggttccagtctggttgcagaatctgcacatttgccaagaaattttccctgtttggaaagtttgccccagctttcccgggcacaccaccttttgtcccaagtgtctgccggtcgaccaatctgcctgccacacattgaccaagccagacccggttcacccagctcgaggatcccaggttgaagagtggccccttgaggccctggaaagaccaatcactggacttcttcccttgagagtcagaggtcacccgtgattctgcctgcaccttatcattgatctgcagtgatttctgcaaatcaagagaaactctgcagggcactcccctgtttcctaagaacgaaaaagtgcaataaaggccattcgttacctacttttcagcagcccacaagatgtagcactattagtgtccccctcagaggcttaatgttgcctgtggagcagtgcccatcccagcccgtttctgcccaccagttgttctcaggaaccttacccatgctccagcgtccttcacctggcacaggacatgcaagataaatagggcaggcacgtgtttgggtgtcctctcttttctgataaaatccatcccgtgtttgccacacgccctccagtcctcagttcccactgcctaacgtctgcccccgtgtagatactgagaggtggtggcagtaattgtggccttatcagccgctcagttccaggcttttgcccaggtcactgttgccccatgttcggagaacctggcccacctgtcttggctttctcatccttcccaacccagtgccgtttatttcagaagcttcctggccactgggcttggatgcttcgggcttctgactgctccataggttttgactggtgaaacaggggcccagatgacaacctctccttcgctccacaggtacgcgggagcctcaggttctctcaggggcagcaaagtggcccaagctgcccctgacagcacagggcctgggggtggctaacgagagaggccttacagtgccggcatgcctcctcttccactgtcgtccttcctcagagggcctcacgccaaacaaacggccttttcgtgtgaaacatcttcagggcgggaaaggggccacttctggctttgttagcaataactgaccttcagtttacccttctgaaggagcagggactcagcacagaattcactttagacggggctgaaggagtgtccctcctctatgtgaaaagaaaattgttttattcttcattctgactttttaactgtttggctcacttccagttagtttgaatgaaaataataattttctacttggagttgaagagggcagaatccgcagctctcatcattgtgatgtgtagcatgtctgccctctgactggacatcattgccattaactttcttctgggcatcacggcaatgtcacgatgcccagacttggagcaaggcaaccttggagtcagtccactcataaaatatggtaacacccattttaaaatttaagttttgtccttaaagacaacttcagtggttaattataaaagttgtgttacttcgtcctaaattaaattgatagaaagatttaaaaatgtgttttgtttctactattcagaaactgcgaactagggaaaggttggtatgaaaaaatgtctttccttttttcaatgtacatagttcaactctttctttgttacatttaaactatatccatggatatcagtctgctttggactcctctgctagtgttacagatggaaataaaaccattaatttgaaccaaa

SEQ ID NO: 457675 - DNA, 2719 bp, Homo sapiens
cgtaggctaggtcgagccggtgtgatcggccgaggcatttgacttccctgcaaaccttggtatagatcacttccttttctgtaggaaaggaaaggcaccaaagagcacaatgagtacaagaaagcgtcgtggtggagcaataaattctagacaagctcagaagcgaactcgggaagcaacctccacccccgagatctccttggaagcagaacccatagaactcgtggaaactgctggagatgaaattgtggacctcacttgtgaatctttagagcctgtggtggttgatctgactcacaatgactctgttgtgattgttgacgaaagaagaagaccaaggaggaatgctaggaggctgccccaggaccatgctgacagctgtgtggtgagcagtgacgatgaggagttgtccagggacagagacgtatatgtgactacccatactcccagaaacgccagggatgagggcgctacaggcctcaggccctcaggtactgtcagttgtcccatctgcatggacggatactcagagatcgtgcagaatggacgtctcatcgtttccacagaatgcggccatgtcttctgtagccagtgcctccgtgattccctgaagaatgctaatacttgcccaacttgtaggaaaaagatcaaccacaaacggtaccaccccatttatatatgaagtattcagagccccccaggagagacggatggacagacagacagccaggttctccagtggtatctgcctccattttcctgagatcaaaaagactgtttcgaaaccaacatctgatatgtaaactgctcttttgtttccaaccccttccttttgttatctccagtttgatgctatggcgctggacccagggccctcccaggccatctctgttcctctggggtggtccagttctagagtgggagaaagggagtcaggcgcattgggaatcgtggttccagtctggttgcagaatctgcacatttgccaagaaattttccctgtttggaaagtttgccccagctttcccgggcacaccaccttttgtcccaagtgtctgccggtcgaccaatctgcctgccacacattgaccaagccagacccggttcacccagctcgaggatcccaggttgaagagtggccccttgaggccctggaaagaccaatcactggacttcttcccttgagagtcagaggtcacccgtgattctgcctgcaccttatcattgatctgcagtgatttctgcaaatcaagagaaactctgcagggcactcccctgtttcctaagaacgaaaaagtgcaataaaggccattcgttacctacttttcagcagcccacaagatgtagcactattagtgtccccctcagaggcttaatgttgcctgtggagcagtgcccatcccagcccgtttctgcccaccagttgttctcaggaaccttacccatgctccagcgtccttcacctggcacaggacatgcaagataaatagggcaggcacgtgtttgggtgtcctctcttttctgataaaatccatcccgtgtttgccacacgccctccagtcctcagttcccactgcctaacgtctgcccccgtgtagatactgagaggtggtggcagtaattgtggccttatcagccgctcagttccaggcttttgcccaggtcactgttgccccatgttcggagaacctggcccacctgtcttggctttctcatccttcccaacccagtgccgtttatttcagaagcttcctggccactgggcttggatgcttcgggcttctgactgctccataggttttgactggtgaaacaggggcccagatgacaacctctccttcgctccacaggtacgcgggagcctcaggttctctcaggggcagcaaagtggcccaagctgcccctgacagcacagggcctgggggtggctaacgagagaggccttacagtgccggcatgcctcctcttccactgtcgtccttcctcagagggcctcacgccaaacaaacggccttttcgtgtgaaacatcttcagggcgggaaaggggccacttctggctttgttagcaataactgaccttcagtttacccttctgaaggagcagggactcagcacagaattcactttagacggggctgaaggagtgtccctcctctatgtgaaaagaaaattgttttattcttcattctgactttttaactgtttggctcacttccagttagtttgaatgaaaataataattttctacttggagttgaagagggcagaatccgcagctctcatcattgtgatgtgtagcatgtctgccctctgactggacatcattgccattaactttcttctgggcatcacggcaatgtcacgatgcccagacttggagcaaggcaaccttggagtcagtccactcataaaatatggtaacacccattttaaaatttaagttttgtccttaaagacaacttcagtggttaattataaaagttgtgttacttcgtcctaaattaaattgatagaaagatttaaaaatgtgttttgtttctactattcagaaactgcgaactagggaaaggttggtatgaaaaaatgtctttccttttttcaatgtacatagttcaactctttctttgttacatttaaactatatccatggatatcagtctgctttggactcctctgctagtgttacagatggaaataaaaccattaatttgaaccaaa

SEQ ID NO: 457676 - DNA, 2770 bp, Homo sapiens
gagccgaggcctccgaagcggaagtgggttgctgttgaggcggcggcatctttctcgaggagctctcctgggcggctgaagaaggagcttcttctccggagtgcgccggcggtggcgcctgcggacctaactagctccaggttaggccgagctttgcgggaaagcagcgagaaagcgtcgtggtggagcaataaattctagacaagctcagaagcgaactcgggaagcaacctccacccccgagatctccttggaagcagaacccatagaactcgtggaaactgctggagatgaaattgtggacctcacttgtgaatctttagagcctgtggtggttgatctgactcacaatgactctgttgtgattgttgacgaaagaagaagaccaaggaggaatgctaggaggctgccccaggaccatgctgacagctgtgtggtgagcagtgacgatgaggagttgtccagggacagagacgtatatgtgactacccatactcccagaaacgccagggatgagggcgctacaggcctcaggccctcaggtactgtcagttgtcccatctgcatggacggatactcagagatcgtgcagaatggacgtctcatcgtttccacagaatgcggccatgtcttctgtagccagtgcctccgtgattccctgaagaatgctaatacttgcccaacttgtaggaaaaagatcaaccacaaacggtaccaccccatttatatatgaagtattcagagccccccaggagagacggatggacagacagacagccaggttctccagtggtatctgcctccattttcctgagatcaaaaagactgtttcgaaaccaacatctgatatgtaaactgctcttttgtttccaaccccttccttttgttatctccagtttgatgctatggcgctggacccagggccctcccaggccatctctgttcctctggggtggtccagttctagagtgggagaaagggagtcaggcgcattgggaatcgtggttccagtctggttgcagaatctgcacatttgccaagaaattttccctgtttggaaagtttgccccagctttcccgggcacaccaccttttgtcccaagtgtctgccggtcgaccaatctgcctgccacacattgaccaagccagacccggttcacccagctcgaggatcccaggttgaagagtggccccttgaggccctggaaagaccaatcactggacttcttcccttgagagtcagaggtcacccgtgattctgcctgcaccttatcattgatctgcagtgatttctgcaaatcaagagaaactctgcagggcactcccctgtttcctaagaacgaaaaagtgcaataaaggccattcgttacctacttttcagcagcccacaagatgtagcactattagtgtccccctcagaggcttaatgttgcctgtggagcagtgcccatcccagcccgtttctgcccaccagttgttctcaggaaccttacccatgctccagcgtccttcacctggcacaggacatgcaagataaatagggcaggcacgtgtttgggtgtcctctcttttctgataaaatccatcccgtgtttgccacacgccctccagtcctcagttcccactgcctaacgtctgcccccgtgtagatactgagaggtggtggcagtaattgtggccttatcagccgctcagttccaggcttttgcccaggtcactgttgccccatgttcggagaacctggcccacctgtcttggctttctcatccttcccaacccagtgccgtttatttcagaagcttcctggccactgggcttggatgcttcgggcttctgactgctccataggttttgactggtgaaacaggggcccagatgacaacctctccttcgctccacaggtacgcgggagcctcaggttctctcaggggcagcaaagtggcccaagctgcccctgacagcacagggcctgggggtggctaacgagagaggccttacagtgccggcatgcctcctcttccactgtcgtccttcctcagagggcctcacgccaaacaaacggccttttcgtgtgaaacatcttcagggcgggaaaggggccacttctggctttgttagcaataactgaccttcagtttacccttctgaaggagcagggactcagcacagaattcactttagacggggctgaaggagtgtccctcctctatgtgaaaagaaaattgttttattcttcattctgactttttaactgtttggctcacttccagttagtttgaatgaaaataataattttctacttggagttgaagagggcagaatccgcagctctcatcattgtgatgtgtagcatgtctgccctctgactggacatcattgccattaactttcttctgggcatcacggcaatgtcacgatgcccagacttggagcaaggcaaccttggagtcagtccactcataaaatatggtaacacccattttaaaatttaagttttgtccttaaagacaacttcagtggttaattataaaagttgtgttacttcgtcctaaattaaattgatagaaagatttaaaaatgtgttttgtttctactattcagaaactgcgaactagggaaaggttggtatgaaaaaatgtctttccttttttcaatgtacatagttcaactctttctttgttacatttaaactatatccatggatatcagtctgctttggactcctctgctagtgttacagatggaaataaaaccattaatttgaaccaaa

SEQ ID NO: 457677 - DNA, 2778 bp, Homo sapiens
tggaagtgggatgccgtggaatagaggtatgcacatgcgcacacatacataaccccccaggtacatttgtaaaaaccatacctccccactcagagcagaattctggaagggtggttactggctttccctcctgagggaggtgttggtcctggtgctctttgcagtgtatacttcaggattgttttagtttggggtaagcctatattacattagcagtcatactaaagtgtagagggatacaaccttactttcctcttaatcttaatgcttgttgaaatactttcttttgaagctggagatgaaattgtggacctcacttgtgaatctttagagcctgtggtggttgatctgactcacaatgactctgttgtgattgttgacgaaagaagaagaccaaggaggaatgctaggaggctgccccaggaccatgctgacagctgtgtggtgagcagtgacgatgaggagttgtccagggacagagacgtatatgtgactacccatactcccagaaacgccagggatgagggcgctacaggcctcaggccctcaggtactgtcagttgtcccatctgcatggacggatactcagagatcgtgcagaatggacgtctcatcgtttccacagaatgcggccatgtcttctgtagccagtgcctccgtgattccctgaagaatgctaatacttgcccaacttgtaggaaaaagatcaaccacaaacggtaccaccccatttatatatgaagtattcagagccccccaggagagacggatggacagacagacagccaggttctccagtggtatctgcctccattttcctgagatcaaaaagactgtttcgaaaccaacatctgatatgtaaactgctcttttgtttccaaccccttccttttgttatctccagtttgatgctatggcgctggacccagggccctcccaggccatctctgttcctctggggtggtccagttctagagtgggagaaagggagtcaggcgcattgggaatcgtggttccagtctggttgcagaatctgcacatttgccaagaaattttccctgtttggaaagtttgccccagctttcccgggcacaccaccttttgtcccaagtgtctgccggtcgaccaatctgcctgccacacattgaccaagccagacccggttcacccagctcgaggatcccaggttgaagagtggccccttgaggccctggaaagaccaatcactggacttcttcccttgagagtcagaggtcacccgtgattctgcctgcaccttatcattgatctgcagtgatttctgcaaatcaagagaaactctgcagggcactcccctgtttcctaagaacgaaaaagtgcaataaaggccattcgttacctacttttcagcagcccacaagatgtagcactattagtgtccccctcagaggcttaatgttgcctgtggagcagtgcccatcccagcccgtttctgcccaccagttgttctcaggaaccttacccatgctccagcgtccttcacctggcacaggacatgcaagataaatagggcaggcacgtgtttgggtgtcctctcttttctgataaaatccatcccgtgtttgccacacgccctccagtcctcagttcccactgcctaacgtctgcccccgtgtagatactgagaggtggtggcagtaattgtggccttatcagccgctcagttccaggcttttgcccaggtcactgttgccccatgttcggagaacctggcccacctgtcttggctttctcatccttcccaacccagtgccgtttatttcagaagcttcctggccactgggcttggatgcttcgggcttctgactgctccataggttttgactggtgaaacaggggcccagatgacaacctctccttcgctccacaggtacgcgggagcctcaggttctctcaggggcagcaaagtggcccaagctgcccctgacagcacagggcctgggggtggctaacgagagaggccttacagtgccggcatgcctcctcttccactgtcgtccttcctcagagggcctcacgccaaacaaacggccttttcgtgtgaaacatcttcagggcgggaaaggggccacttctggctttgttagcaataactgaccttcagtttacccttctgaaggagcagggactcagcacagaattcactttagacggggctgaaggagtgtccctcctctatgtgaaaagaaaattgttttattcttcattctgactttttaactgtttggctcacttccagttagtttgaatgaaaataataattttctacttggagttgaagagggcagaatccgcagctctcatcattgtgatgtgtagcatgtctgccctctgactggacatcattgccattaactttcttctgggcatcacggcaatgtcacgatgcccagacttggagcaaggcaaccttggagtcagtccactcataaaatatggtaacacccattttaaaatttaagttttgtccttaaagacaacttcagtggttaattataaaagttgtgttacttcgtcctaaattaaattgatagaaagatttaaaaatgtgttttgtttctactattcagaaactgcgaactagggaaaggttggtatgaaaaaatgtctttccttttttcaatgtacatagttcaactctttctttgttacatttaaactatatccatggatatcagtctgctttggactcctctgctagtgttacagatggaaataaaaccattaatttgaaccaaa

SEQ ID NO: 457678 - DNA, 2549 bp, Homo sapiens
gacccccacctgctgatctatagcgtcagcagtttgtctctgggggtcccaggcagggaaggaagagggtcttaagaggcgtcaggatgggagtggtgaggacggtaagagtagagagcctccaacctgaaaatgtgacctcttacgttgacgaaagaagaagaccaaggaggaatgctaggaggctgccccaggaccatgctgacagctgtgtggtgagcagtgacgatgaggagttgtccagggacagagacgtatatgtgactacccatactcccagaaacgccagggatgagggcgctacaggcctcaggccctcaggtactgtcagttgtcccatctgcatggacggatactcagagatcgtgcagaatggacgtctcatcgtttccacagaatgcggccatgtcttctgtagccagtgcctccgtgattccctgaagaatgctaatacttgcccaacttgtaggaaaaagatcaaccacaaacggtaccaccccatttatatatgaagtattcagagccccccaggagagacggatggacagacagacagccaggttctccagtggtatctgcctccattttcctgagatcaaaaagactgtttcgaaaccaacatctgatatgtaaactgctcttttgtttccaaccccttccttttgttatctccagtttgatgctatggcgctggacccagggccctcccaggccatctctgttcctctggggtggtccagttctagagtgggagaaagggagtcaggcgcattgggaatcgtggttccagtctggttgcagaatctgcacatttgccaagaaattttccctgtttggaaagtttgccccagctttcccgggcacaccaccttttgtcccaagtgtctgccggtcgaccaatctgcctgccacacattgaccaagccagacccggttcacccagctcgaggatcccaggttgaagagtggccccttgaggccctggaaagaccaatcactggacttcttcccttgagagtcagaggtcacccgtgattctgcctgcaccttatcattgatctgcagtgatttctgcaaatcaagagaaactctgcagggcactcccctgtttcctaagaacgaaaaagtgcaataaaggccattcgttacctacttttcagcagcccacaagatgtagcactattagtgtccccctcagaggcttaatgttgcctgtggagcagtgcccatcccagcccgtttctgcccaccagttgttctcaggaaccttacccatgctccagcgtccttcacctggcacaggacatgcaagataaatagggcaggcacgtgtttgggtgtcctctcttttctgataaaatccatcccgtgtttgccacacgccctccagtcctcagttcccactgcctaacgtctgcccccgtgtagatactgagaggtggtggcagtaattgtggccttatcagccgctcagttccaggcttttgcccaggtcactgttgccccatgttcggagaacctggcccacctgtcttggctttctcatccttcccaacccagtgccgtttatttcagaagcttcctggccactgggcttggatgcttcgggcttctgactgctccataggttttgactggtgaaacaggggcccagatgacaacctctccttcgctccacaggtacgcgggagcctcaggttctctcaggggcagcaaagtggcccaagctgcccctgacagcacagggcctgggggtggctaacgagagaggccttacagtgccggcatgcctcctcttccactgtcgtccttcctcagagggcctcacgccaaacaaacggccttttcgtgtgaaacatcttcagggcgggaaaggggccacttctggctttgttagcaataactgaccttcagtttacccttctgaaggagcagggactcagcacagaattcactttagacggggctgaaggagtgtccctcctctatgtgaaaagaaaattgttttattcttcattctgactttttaactgtttggctcacttccagttagtttgaatgaaaataataattttctacttggagttgaagagggcagaatccgcagctctcatcattgtgatgtgtagcatgtctgccctctgactggacatcattgccattaactttcttctgggcatcacggcaatgtcacgatgcccagacttggagcaaggcaaccttggagtcagtccactcataaaatatggtaacacccattttaaaatttaagttttgtccttaaagacaacttcagtggttaattataaaagttgtgttacttcgtcctaaattaaattgatagaaagatttaaaaatgtgttttgtttctactattcagaaactgcgaactagggaaaggttggtatgaaaaaatgtctttccttttttcaatgtacatagttcaactctttctttgttacatttaaactatatccatggatatcagtctgctttggactcctctgctagtgttacagatggaaataaaaccattaatttgaaccaaa

SEQ ID NO: 457679 - DNA, 1748 bp, Homo sapiens
gagccgaggcctccgaagcggaagtgggttgctgttgaggcggcggcatctttctcgaggagctctcctgggcggctgaagaaggagcttcttctccggagtgcgccggcggtggcgcctgcggacctaactagctccaggttaggccgagctttgcgggaaagcagcgcccttgaggccctggaaagaccaatcactggacttcttcccttgagagtcagaggtcacccgtgattctgcctgcaccttatcattgatctgcagtgatttctgcaaatcaagagaaactctgcagggcactcccctgtttcctaagaacgaaaaagtgcaataaaggccattcgttacctacttttcagcagcccacaagatgtagcactattagtgtccccctcagaggcttaatgttgcctgtggagcagtgcccatcccagcccgtttctgcccaccagttgttctcaggaaccttacccatgctccagcgtccttcacctggcacaggacatgcaagataaatagggcaggcacgtgtttgggtgtcctctcttttctgataaaatccatcccgtgtttgccacacgccctccagtcctcagttcccactgcctaacgtctgcccccgtgtagatactgagaggtggtggcagtaattgtggccttatcagccgctcagttccaggcttttgcccaggtcactgttgccccatgttcggagaacctggcccacctgtcttggctttctcatccttcccaacccagtgccgtttatttcagaagcttcctggccactgggcttggatgcttcgggcttctgactgctccataggttttgactggtgaaacaggggcccagatgacaacctctccttcgctccacaggtacgcgggagcctcaggttctctcaggggcagcaaagtggcccaagctgcccctgacagcacagggcctgggggtggctaacgagagaggccttacagtgccggcatgcctcctcttccactgtcgtccttcctcagagggcctcacgccaaacaaacggccttttcgtgtgaaacatcttcagggcgggaaaggggccacttctggctttgttagcaataactgaccttcagtttacccttctgaaggagcagggactcagcacagaattcactttagacggggctgaaggagtgtccctcctctatgtgaaaagaaaattgttttattcttcattctgactttttaactgtttggctcacttccagttagtttgaatgaaaataataattttctacttggagttgaagagggcagaatccgcagctctcatcattgtgatgtgtagcatgtctgccctctgactggacatcattgccattaactttcttctgggcatcacggcaatgtcacgatgcccagacttggagcaaggcaaccttggagtcagtccactcataaaatatggtaacacccattttaaaatttaagttttgtccttaaagacaacttcagtggttaattataaaagttgtgttacttcgtcctaaattaaattgatagaaagatttaaaaatgtgttttgtttctactattcagaaactgcgaactagggaaaggttggtatgaaaaaatgtctttccttttttcaatgtacatagttcaactctttctttgttacatttaaactatatccatggatatcagtctgctttggactcctctgctagtgttacagatggaaataaaaccattaatttgaaccaaa

SEQ ID NO: 457680 - DNA, 1303 bp, Homo sapiens
cagacaggccatgtgagccactgctgccagcacagagcgtccttcacctggcacaggacatgcaagataaatagggcaggcacgtgtttgggtgtcctctcttttctgataaaatccatcccgtgtttgccacacgccctccagtcctcagttcccactgcctaacgtctgcccccgtgtagatactgagaggtggtggcagtaattgtggccttatcagccgctcagttccaggcttttgcccaggtcactgttgccccatgttcggagaacctggcccacctgtcttggctttctcatccttcccaacccagtgccgtttatttcagaagcttcctggccactgggcttggatgcttcgggcttctgactgctccataggttttgactggtgaaacaggggcccagatgacaacctctccttcgctccacaggtacgcgggagcctcaggttctctcaggggcagcaaagtggcccaagctgcccctgacagcacagggcctgggggtggctaacgagagaggccttacagtgccggcatgcctcctcttccactgtcgtccttcctcagagggcctcacgccaaacaaacggccttttcgtgtgaaacatcttcagggcgggaaaggggccacttctggctttgttagcaataactgaccttcagtttacccttctgaaggagcagggactcagcacagaattcactttagacggggctgaaggagtgtccctcctctatgtgaaaagaaaattgttttattcttcattctgactttttaactgtttggctcacttccagttagtttgaatgaaaataataattttctacttggagttgaagagggcagaatccgcagctctcatcattgtgatgtgtagcatgtctgccctctgactggacatcattgccattaactttcttctgggcatcacggcaatgtcacgatgcccagacttggagcaaggcaaccttggagtcagtccactcataaaatatggtaacacccattttaaaatttaagttttgtccttaaagacaacttcagtggttaattataaaagttgtgttacttcgtcctaaattaaattgatagaaagatttaaaaatgtgttttgtttctactattcagaaactgcgaactagggaaaggttggtatgaaaaaatgtctttccttttttcaatgtacatagttcaactctttctttgttacatttaaactatatccatggatatcagtctgctttggactcctctgctagtgttacagatggaaataaaaccattaatttgaaccaaa

SEQ ID NO: 457681 - DNA, 454 bp, Homo sapiens
cagagggcagacatgctacacatcacaatgatgagagctgcggattctgactggacatcattgccattaactttcttctgggcatcacggcaatgtcacgatgcccagacttggagcaaggcaaccttggagtcagtccactcataaaatatggtaacacccattttaaaatttaagttttgtccttaaagacaacttcagtggttaattataaaagttgtgttacttcgtcctaaattaaattgatagaaagatttaaaaatgtgttttgtttctactattcagaaactgcgaactagggaaaggttggtatgaaaaaatgtctttccttttttcaatgtacatagttcaactctttctttgttacatttaaactatatccatggatatcagtctgctttggactcctctgctagtgttacagatggaaataaaaccattaatttgaaccaaa

SEQ ID NO: 457682 - DNA, 179 bp, Homo sapiens
ggactcttgtaggggataggggccactcacgtgacagggtataataaaatgtttgcgttgactgagaaactaacgtgaagcactgtgctcttaggccctcaggtactgtcagttgtcccatctgcatggacggatactcagaggtaagtaaaccaagctgtatcttccaggcttctggt

SEQ ID NO: 457683 - DNA, 2936 bp, Homo sapiens
gagccgaggcctccgaagcggaagtgggttgctgttgaggcggcggcatctttctcgaggagctctcctgggcggctgaagaaggagcttcttctccggagtgcgccggcggtggcgcctgcggacctaactagctccaggttaggccgagctttgcgggaaagcagcggacttgaaaatactggaaatctgtccggatccaaattattttgcaagccagatgagtaaccagagggcatgaaaggttgagaacatttgacttccctgcaaaccttggtatagatcacttccttttctgtaggaaaggaaaggcaccaaagagcacaatgagtacaagaaagcgtcgtggtggagcaataaattctagacaagctcagaagcgaactcgggaagcaacctccacccccgagatctccttggaagcagaacccatagaactcgtggaaactgctggagatgaaattgtggacctcacttgtgaatctttagagcctgtggtggttgatctgactcacaatgactctgttgtgattgttgacgaaagaagaagaccaaggaggaatgctaggaggctgccccaggaccatgctgacagctgtgtggtgagcagtgacgatgaggagttgtccagggacagagacgtatatgtgactacccatactcccagaaacgccagggatgagggcgctacaggcctcaggccctcaggtactgtcagttgtcccatctgcatggacggatactcagagatcgtgcagaatggacgtctcatcgtttccacagaatgcggccatgtcttctgtagccagtgcctccgtgattccctgaagaatgctaatacttgcccaacttgtaggaaaaagatcaaccacaaacggtaccaccccatttatatatgaagtattcagagccccccaggagagacggatggacagacagacagccaggttctccagtggtatctgcctccattttcctgagatcaaaaagactgtttcgaaaccaacatctgatatgtaaactgctcttttgtttccaaccccttccttttgttatctccagtttgatgctatggcgctggacccagggccctcccaggccatctctgttcctctggggtggtccagttctagagtgggagaaagggagtcaggcgcattgggaatcgtggttccagtctggttgcagaatctgcacatttgccaagaaattttccctgtttggaaagtttgccccagctttcccgggcacaccaccttttgtcccaagtgtctgccggtcgaccaatctgcctgccacacattgaccaagccagacccggttcacccagctcgaggatcccaggttgaagagtggccccttgaggccctggaaagaccaatcactggacttcttcccttgagagtcagaggtcacccgtgattctgcctgcaccttatcattgatctgcagtgatttctgcaaatcaagagaaactctgcagggcactcccctgtttcctaagaacgaaaaagtgcaataaaggccattcgttacctacttttcagcagcccacaagatgtagcactattagtgtccccctcagaggcttaatgttgcctgtggagcagtgcccatcccagcccgtttctgcccaccagttgttctcaggaaccttacccatgctccagcgtccttcacctggcacaggacatgcaagataaatagggcaggcacgtgtttgggtgtcctctcttttctgataaaatccatcccgtgtttgccacacgccctccagtcctcagttcccactgcctaacgtctgcccccgtgtagatactgagaggtggtggcagtaattgtggccttatcagccgctcagttccaggcttttgcccaggtcactgttgccccatgttcggagaacctggcccacctgtcttggctttctcatccttcccaacccagtgccgtttatttcagaagcttcctggccactgggcttggatgcttcgggcttctgactgctccataggttttgactggtgaaacaggggcccagatgacaacctctccttcgctccacaggtacgcgggagcctcaggttctctcaggggcagcaaagtggcccaagctgcccctgacagcacagggcctgggggtggctaacgagagaggccttacagtgccggcatgcctcctcttccactgtcgtccttcctcagagggcctcacgccaaacaaacggccttttcgtgtgaaacatcttcagggcgggaaaggggccacttctggctttgttagcaataactgaccttcagtttacccttctgaaggagcagggactcagcacagaattcactttagacggggctgaaggagtgtccctcctctatgtgaaaagaaaattgttttattcttcattctgactttttaactgtttggctcacttccagttagtttgaatgaaaataataattttctacttggagttgaagagggcagaatccgcagctctcatcattgtgatgtgtagcatgtctgccctctgactggacatcattgccattaactttcttctgggcatcacggcaatgtcacgatgcccagacttggagcaaggcaaccttggagtcagtccactcataaaatatggtaacacccattttaaaatttaagttttgtccttaaagacaacttcagtggttaattataaaagttgtgttacttcgtcctaaattaaattgatagaaagatttaaaaatgtgttttgtttctactattcagaaactgcgaactagggaaaggttggtatgaaaaaatgtctttccttttttcaatgtacatagttcaactctttctttgttacatttaaactatatccatggatatcagtctgctttggactcctctgctagtgttacagatggaaataaaaccattaatttgaaccaaa

SEQ ID NO: 457684 - DNA, 533 bp, Homo sapiens
gagccgaggcctccgaagcggaagtgggttgctgttgaggcggcggcatctttctcgaggagctctcctgggcggctgaagaaggagcttcttctccggagtgcgccggcggtggcgcctgcggacctaactagctccaggttaggccgagctttgcgggaaagcagcggacttgaaaatactggaaatctgtccggatccaaattattttgcaagccagatgagtaaccagagggcatgaaaggttgagaacatttgacttccctgcaaaccttggtatagatcacttccttttctgtaggaaaggaaaggcaccaaagagcacaatgagtacaagtaagttttatcatctcttgaatttttaattttgtagggctaattaactaccttattccttgtagcacattagtgaaagtgagttccataatgtcacttctaagtaaccccacttcttgaaggagtatgtataggagctttctggtggttacatcagcttacttaccgacattgagctacattcgagtcataaaggg

SEQ ID NO: 457685 - DNA, 2952 bp, Homo sapiens
gagccgaggcctccgaagcggaagtgggttgctgttgaggcggcggcatctttctcgaggagctctcctgggcggctgaagaaggagcttcttctccggagtgcgccggcggtggcgcctgcggacctaactagctccaggttaggccgagctttgcgggaaagcagcggacttgaaaatactggaaatctgtccggatccaaattattttgcaagccagatgagtaaccagagggcatgaaaggttgagaacatttgacttccctgcaaaccttggtatagatcacttccttttctgtaggaaaggaaaggcaccaaagagcacaatgagtacaagaaagcgtcgtggtggagcaataaattctagacaagctcagaagcgaactcgggaagcaacctccacccccgagatctccttggaagcagaacccatagaactcgtggaaactgctggagatgaaattgtggacctcacttgtgaatctttagagcctgtggtggttgatctgactcacaatgactctgttgtgattgttgacgaaagaagaagaccaaggaggaatgctaggaggctgccccaggaccatgctgacagctgtgtggtgagcagtgacgatgaggagttgtccagggacagagacgtatatgtgactacccatactcccagaaacgccagggatgagggcgctacaggcctcaggccctcaggtactgtcagttgtcccatctgcatggacggatactcagagatcgtgcagaatggacgtctcatcgtttccacagaatgcggccatgtcttctgtagccagtgcctccgtgattccctgaagaatgctaatacttgcccaacttgtaggaaaaagatcaaccacaaacggtaccaccccatttatatatgaagtattcagagccccccaggagagacggatggacagacagacagccaggttctccagtggtatctgcctccattttcctgagatcaaaaagactgtttcgaaaccaacatctgatatgtaaactgctcttttgtttccaaccccttccttttgttatctccagtttgatgctatggcgctggacccagggccctcccaggccatctctgttcctctggggtggtccagttctagagtgggagaaagggagtcaggcgcattgggaatcgtggttccagtctggttgcagaatctgcacatttgccaagaaattttccctgtttggaaagtttgccccagctttcccgggcacaccaccttttgtcccaagtgtctgccggtcgaccaatctgcctgccacacattgaccaagccagacccggttcacccagctcgaggatcccaggttgaagagtggccccttgaggccctggaaagaccaatcactggacttcttcccttgagagtcagaggtcacccgtgattctgcctgcaccttatcattgatctgcagtgatttctgcaaatcaagagaaactctgcagggcactcccctgtttcctaagaacgaaaaagtgcaataaaggccattcgttacctacttttcagcagcccacaagatgtagcactattagtgtccccctcagaggcttaatgttgcctgtggagcagtgcccatcccagcccgtttctgcccaccagttgttctcaggaaccttacccatgctccagcgtccttcacctggcacaggacatgcaagataaatagggcaggcacgtgtttgggtgtcctctcttttctgataaaatccatcccgtgtttgccacacgccctccagtcctcagttcccactgcctaacgtctgcccccgtgtagatactgagaggtggtggcagtaattgtggccttatcagccgctcagttccaggcttttgcccaggtcactgttgccccatgttcggagaacctggcccacctgtcttggctttctcatccttcccaacccagtgccgtttatttcagaagcttcctggccactgggcttggatgcttcgggcttctgactgctccataggttttgactggtgaaacaggggcccagatgacaacctctccttcgctccacaggtacgcgggagcctcaggttctctcaggggcagcaaagtggcccaagctgcccctgacagcacagggcctgggggtggctaacgagagaggccttacagtgccggcatgcctcctcttccactgtcgtccttcctcagagggcctcacgccaaacaaacggccttttcgtgtgaaacatcttcagggcgggaaaggggccacttctggctttgttagcaataactgaccttcagtttacccttctgaaggagcagggactcagcacagaattcactttagacggggctgaaggagtgtccctcctctatgtgaaaagaaaattgttttattcttcattctgactttttaactgtttggctcacttccagttagtttgaatgaaaataataattttctacttggagttgaagagggcagaatccgcagctctcatcattgtgatgtgtagcatgtctgccctctgactggacatcattgccattaactttcttctgggcatcacggcaatgtcacgatgcccagacttggagcaaggcaaccttggagtcagtccactcataaaatatggtaacacccattttaaaatttaagttttgtccttaaagacaacttcagtggttaattataaaagttgtgttacttcgtcctaaattaaattgatagaaagatttaaaaatgtgttttgtttctactattcagaaactgcgaactagggaaaggttggtatgaaaaaatgtctttccttttttcaatgtacatagttcaactctttctttgttacatttaaactatatccatggatatcagtctgctttggactcctctgctagtgttacagatggaaataaaaccattaatttgaaccaaaaaaaaaaaaaaaaaaa

SEQ ID NO: 457686 - DNA, 3122 bp, Homo sapiens
gagccgaggcctccgaagcggaagtgggttgctgttgaggcggcggcatctttctcgaggagctctcctgggcggctgaagaaggagcttcttctccggagtgcgccggcggtggcgcctgcggacctaactagctccaggttaggccgagctttgcgggaaagcagcggacttgaaaatactggaaatctgtccggatccaaattattttgcaagccagatgagtaaccagagggcatgaaaggttgagaacatttgacttccctgcaaaccttggtatagatcacttccttttctgtaggaaaggaaaggcaccaaagagcacaatgagtacaagatggggtttctacgtgttagccaggatggtctcgatcttctgaccttgtgatccgcccgcctcagcctcccaaagtgctgggattacaggcatgcgccaccacacctggccagaacttttgaaaagaggcaaaggcagaggagaataaaggaaggaggaagtaacttgtggaatgctgaaaaagagaaagcgtcgtggtggagcaataaattctagacaagctcagaagcgaactcgggaagcaacctccacccccgagatctccttggaagcagaacccatagaactcgtggaaactgctggagatgaaattgtggacctcacttgtgaatctttagagcctgtggtggttgatctgactcacaatgactctgttgtgattgttgacgaaagaagaagaccaaggaggaatgctaggaggctgccccaggaccatgctgacagctgtgtggtgagcagtgacgatgaggagttgtccagggacagagacgtatatgtgactacccatactcccagaaacgccagggatgagggcgctacaggcctcaggccctcaggtactgtcagttgtcccatctgcatggacggatactcagagatcgtgcagaatggacgtctcatcgtttccacagaatgcggccatgtcttctgtagccagtgcctccgtgattccctgaagaatgctaatacttgcccaacttgtaggaaaaagatcaaccacaaacggtaccaccccatttatatatgaagtattcagagccccccaggagagacggatggacagacagacagccaggttctccagtggtatctgcctccattttcctgagatcaaaaagactgtttcgaaaccaacatctgatatgtaaactgctcttttgtttccaaccccttccttttgttatctccagtttgatgctatggcgctggacccagggccctcccaggccatctctgttcctctggggtggtccagttctagagtgggagaaagggagtcaggcgcattgggaatcgtggttccagtctggttgcagaatctgcacatttgccaagaaattttccctgtttggaaagtttgccccagctttcccgggcacaccaccttttgtcccaagtgtctgccggtcgaccaatctgcctgccacacattgaccaagccagacccggttcacccagctcgaggatcccaggttgaagagtggccccttgaggccctggaaagaccaatcactggacttcttcccttgagagtcagaggtcacccgtgattctgcctgcaccttatcattgatctgcagtgatttctgcaaatcaagagaaactctgcagggcactcccctgtttcctaagaacgaaaaagtgcaataaaggccattcgttacctacttttcagcagcccacaagatgtagcactattagtgtccccctcagaggcttaatgttgcctgtggagcagtgcccatcccagcccgtttctgcccaccagttgttctcaggaaccttacccatgctccagcgtccttcacctggcacaggacatgcaagataaatagggcaggcacgtgtttgggtgtcctctcttttctgataaaatccatcccgtgtttgccacacgccctccagtcctcagttcccactgcctaacgtctgcccccgtgtagatactgagaggtggtggcagtaattgtggccttatcagccgctcagttccaggcttttgcccaggtcactgttgccccatgttcggagaacctggcccacctgtcttggctttctcatccttcccaacccagtgccgtttatttcagaagcttcctggccactgggcttggatgcttcgggcttctgactgctccataggttttgactggtgaaacaggggcccagatgacaacctctccttcgctccacaggtacgcgggagcctcaggttctctcaggggcagcaaagtggcccaagctgcccctgacagcacagggcctgggggtggctaacgagagaggccttacagtgccggcatgcctcctcttccactgtcgtccttcctcagagggcctcacgccaaacaaacggccttttcgtgtgaaacatcttcagggcgggaaaggggccacttctggctttgttagcaataactgaccttcagtttacccttctgaaggagcagggactcagcacagaattcactttagacggggctgaaggagtgtccctcctctatgtgaaaagaaaattgttttattcttcattctgactttttaactgtttggctcacttccagttagtttgaatgaaaataataattttctacttggagttgaagagggcagaatccgcagctctcatcattgtgatgtgtagcatgtctgccctctgactggacatcattgccattaactttcttctgggcatcacggcaatgtcacgatgcccagacttggagcaaggcaaccttggagtcagtccactcataaaatatggtaacacccattttaaaatttaagttttgtccttaaagacaacttcagtggttaattataaaagttgtgttacttcgtcctaaattaaattgatagaaagatttaaaaatgtgttttgtttctactattcagaaactgcgaactagggaaaggttggtatgaaaaaatgtctttccttttttcaatgtacatagttcaactctttctttgttacatttaaactatatccatggatatcagtctgctttggactcctctgctagtgttacagatggaaataaaaccattaatttgaaccaaa

SEQ ID NO: 457687 - DNA, 2893 bp, Homo sapiens
gagccgaggcctccgaagcggaagtgggttgctgttgaggcggcggcatctttctcgaggagctctcctgggcggctgaagaaggagcttcttctccggagtgcgccggcggtggcgcctgcggacctaactagctccaggttaggccgagctttgcgggaaagcagcggtggaatctcactctgtcacccaggatgcagtgcactggcgtgttctcggtctcactgtaacctctgccatctgggctcaagtgattctcctgcctcagcctccggagtagctgggattacagagaaagcgtcgtggtggagcaataaattctagacaagctcagaagcgaactcgggaagcaacctccacccccgagatctccttggaagcagaacccatagaactcgtggaaactgctggagatgaaattgtggacctcacttgtgaatctttagagcctgtggtggttgatctgactcacaatgactctgttgtgattgttgacgaaagaagaagaccaaggaggaatgctaggaggctgccccaggaccatgctgacagctgtgtggtgagcagtgacgatgaggagttgtccagggacagagacgtatatgtgactacccatactcccagaaacgccagggatgagggcgctacaggcctcaggccctcaggtactgtcagttgtcccatctgcatggacggatactcagagatcgtgcagaatggacgtctcatcgtttccacagaatgcggccatgtcttctgtagccagtgcctccgtgattccctgaagaatgctaatacttgcccaacttgtaggaaaaagatcaaccacaaacggtaccaccccatttatatatgaagtattcagagccccccaggagagacggatggacagacagacagccaggttctccagtggtatctgcctccattttcctgagatcaaaaagactgtttcgaaaccaacatctgatatgtaaactgctcttttgtttccaaccccttccttttgttatctccagtttgatgctatggcgctggacccagggccctcccaggccatctctgttcctctggggtggtccagttctagagtgggagaaagggagtcaggcgcattgggaatcgtggttccagtctggttgcagaatctgcacatttgccaagaaattttccctgtttggaaagtttgccccagctttcccgggcacaccaccttttgtcccaagtgtctgccggtcgaccaatctgcctgccacacattgaccaagccagacccggttcacccagctcgaggatcccaggttgaagagtggccccttgaggccctggaaagaccaatcactggacttcttcccttgagagtcagaggtcacccgtgattctgcctgcaccttatcattgatctgcagtgatttctgcaaatcaagagaaactctgcagggcactcccctgtttcctaagaacgaaaaagtgcaataaaggccattcgttacctacttttcagcagcccacaagatgtagcactattagtgtccccctcagaggcttaatgttgcctgtggagcagtgcccatcccagcccgtttctgcccaccagttgttctcaggaaccttacccatgctccagcgtccttcacctggcacaggacatgcaagataaatagggcaggcacgtgtttgggtgtcctctcttttctgataaaatccatcccgtgtttgccacacgccctccagtcctcagttcccactgcctaacgtctgcccccgtgtagatactgagaggtggtggcagtaattgtggccttatcagccgctcagttccaggcttttgcccaggtcactgttgccccatgttcggagaacctggcccacctgtcttggctttctcatccttcccaacccagtgccgtttatttcagaagcttcctggccactgggcttggatgcttcgggcttctgactgctccataggttttgactggtgaaacaggggcccagatgacaacctctccttcgctccacaggtacgcgggagcctcaggttctctcaggggcagcaaagtggcccaagctgcccctgacagcacagggcctgggggtggctaacgagagaggccttacagtgccggcatgcctcctcttccactgtcgtccttcctcagagggcctcacgccaaacaaacggccttttcgtgtgaaacatcttcagggcgggaaaggggccacttctggctttgttagcaataactgaccttcagtttacccttctgaaggagcagggactcagcacagaattcactttagacggggctgaaggagtgtccctcctctatgtgaaaagaaaattgttttattcttcattctgactttttaactgtttggctcacttccagttagtttgaatgaaaataataattttctacttggagttgaagagggcagaatccgcagctctcatcattgtgatgtgtagcatgtctgccctctgactggacatcattgccattaactttcttctgggcatcacggcaatgtcacgatgcccagacttggagcaaggcaaccttggagtcagtccactcataaaatatggtaacacccattttaaaatttaagttttgtccttaaagacaacttcagtggttaattataaaagttgtgttacttcgtcctaaattaaattgatagaaagatttaaaaatgtgttttgtttctactattcagaaactgcgaactagggaaaggttggtatgaaaaaatgtctttccttttttcaatgtacatagttcaactctttctttgttacatttaaactatatccatggatatcagtctgctttggactcctctgctagtgttacagatggaaataaaaccattaatttgaaccaaa

SEQ ID NO: 457688 - DNA, 1016 bp, Homo sapiens
gagccgaggcctccgaagcggaagtgggttgctgttgaggcggcggcatctttctcgaggagctctcctgggcggctgaagaaggagcttcttctccggagtgcgccggcggtggcgcctgcggacctaactagctccaggttaggccgagctttgcgggaaagcagcggacttgaaaatactggaaatctgtccggatccaaattattttgcaagccagatgagtaaccagagggcatgaaaggttgagaacatttgacttccctgcaaaccttggtatagatcacttccttttctgtaggaaaggaaaggcaccaaagagcacaatgagtacaagaaagcgtcgtggtggagcaataaattctagacaagctcagaagcgaactcgggaagcaacctccacccccgagatctccttggaagcagaacccatagaactcgtggaaactgctggagatgaaattgtggacctcacttgtgaatctttagagcctgtggtggttgatctgactcacaatgactctgttgtgattagtgttggagtgtgagagtcggctgtttcttgggtatgggtccctggccagtgccagcatctgacagccttggtcacagactccaagtcaaggttacagcttatgctaaagaagttcatgcatcttgtggaattgagcttttagaaagaaaataaacagtaacaataataataacaaagaagttcatgcattcagtgacgagagcccaaaatgaaaaatgtttctggaaaatcatttgttatagccttgtcgcctatggagtaggtctgtgtaacctgaccttgccacacctgggcacaaaagtggtttggggagaatctcaagacccccacatctgtcttcagtccctgattccacagtttacaccagctgtgtgaccttgggcatgtgacttagcctcattcactttccatgaaatggggacaggtcactcatgtcagcagggcatggtgtaagacatcttacaacagatgccgtgtttga

SEQ ID NO: 457689 - DNA, 1124 bp, Homo sapiens
cttgaattatttggtttcgtttgttttctattagactatggtgagctcaggtgattgatactcctgatgcgagtaatacggatgtgtttaggagtgggacttctaggggatttagcggggtgatgagaaacggaaaaataaaggcacttcggacagctcctctggcaatgtatctgaaggggaaagccctcctgacagccaggaggactctttccagggaagacagaaatcaaaagacaaagctgccactccaagaaaagatggtcccaaacgttctgtactgtccaagtcagttcctgggtacaaggtagaagaaaaaagcccctgactcagcttctttactgaccagcctctccctgaaatattttaacttgactttcacgattgtggagcttctgcctgctgtacctcactagctgttcttctatggtgtgccctttgtccgctgctttcttttttgctttatttccttggtggcttttctgtcacttttggctatggtttaccttctgttttctgtatatgtacaatttataagtctttttttttctttgaaagaataaccaggcaagtatgggtttttaaaacattatttcataggcagaagtttatattttctttccttggagtaaagatcataattatttggcattttaaatgccccagcatttagtgtagctaaagctgctgagctataaagtatgagtggatatactgttagactaagttgcattttttttagtgcctttcattaagaaagatctgggtttaatctaaggattatttgatccatatgctaaatttagctaactctgggatagaaaataataaaacctgttacttacattgtagtgatttttagcataaccttggtaaagagcctatatgattctatggcaagaattaaaacatacttgttaacttgttgatctgattatcctcagagtaaaggagtaggttgtcagcaactattattatattttgaacttttcctccctctgtctgcccctcccttttcttctgaagaaaaggtgaggtgagagatgagtagccttatttgcatatagggatttaagaatatcataaaaggaagaattagctgtacagtttcatatttgggatgg

SEQ ID NO: 457690 - DNA, 684 bp, Homo sapiens
tgattattctttgggtggatgaaatactggctatgcattttaagcccaagagaaagaagtcagagctgataccatcatcaccttgctttgccctcataggtcctttaaactaaaaatgccttcgttcttagcaattgtgattctacgttcttcccagtgtataaaagatgttattttcacatacctttttgacttggtagaccagataattatttctattccttgtacctgttttgtaattttctttgatacacaggaagtcaagtcataggaggcaaataatttaaatacttaaaatagttttcaaaatatcctcaataaaagtgattaaaaattaatgaaagctacatttaatgcataatatgtatttctgtacttagttttagttactatccagcagaaaacttgatagagtacaaatggccacctgatgaaacaggagaatactatatgcttcaagaacaagtcagtgaatatttgggtgtgacctcctttaaaaggaaatatccagatttagagcgacgagatttgtctcacaaggagaaactctacctgagagagctaaatgtcattactgaaactcagtgcactctaggtaagaatagctttttaatgtgaatttttcaagctgaacatttatgagataatactagataagtatcttatttcctaaaatattttaca

SEQ ID NO: 457691 - DNA, 685 bp, Homo sapiens
gttggccatgctgacacctgcgtgttctttttttcctcagaagttgagatgttatttttaatggtgtgcttaataatactcaatttacatttttttgtgagatgtcttttgctttacggttaataattctaaatgagactaataatagctacatatcatacttgctgtgcgtcccaagagtttttaagagatttgcatgttaattctcatagtaaccatgtgaggttggaactaggattacttccatttcataaagaaattgagctacagagaggtcgtataagctacccagatcactctgctgttaagtagtgagcaagagatccactgccattcctcaggagaataggcctttaaaacaataatatatagaactgaaagcaccaactgtcctcttaggttatagctcctgatatctcctaaaattttagcttttcgagggggaagtgggcgtgcagtggtgagcacgtggggactcttcctaaagccttgattcttagcatggaatcagttttgtgtttctctttatgttaacgtaggttatccaggtacctcaagggaagtactcccggacagttccaggaatattattagaagtactcaccacattatctgctgtatcttccattaaacacattccttttttacccccttttgaatctggactccctactctatacattat

SEQ ID NO: 457692 - DNA, 437 bp, Homo sapiens
ttctttgcaaaagatgacagaacatcatttcttcttcatggtggggttgtccacatataatgcatgttttacatgccatccttcttgcctggatatgacaatggagcttgtttctatgattaagacctacccatggcagtgtatggaatgtaaaacatgcatttctttattgctcataagccaccacaaccagaagagaaaatattttagatagaaggaatggtattagcaaaggttcaaaagtagggaaattcacaatatcagcagaggaaagtgaaattttgtcttattggatatagagaacctcagatgctttttgagcaattcagtgacatatgtaagctgtatttttggctaattaatctggctgtttttttgtaagcactgtttgtacgcaggcagagactgatgagggatatagaaggtagtacaataca

SEQ ID NO: 457693 - DNA, 4211 bp, Homo sapiens
tagtgaatttttctaagtatagattcttttattagacatgcaaagagaataatcacacaactaagttttccacaaacgtttatgtacacgccaatgtatgcatgagacatctttcaattaaaaatgtttaaactgatttttttttaaataccactataccaatgaggataagctgattttttaacttagattttatagctctagttttgcagttttggaaaatagcaggttttaaacaaaattaatatatgagctatttaaaatggtctttttagagtaagtcttacacataatggtcatttgctacttggattttcttgtccaattaatagtgacatttgacattgtatttagtctttccttccattcattaaacaaatcttactgtgcatgtagggagtatagaatgctacatttaatcttacgagatcatgctgtttaccaaattttatgatgaaattaatgctttcttcagtaggcagtcttacattgtaggcagactcctgtcaagttttgtctttcaaaatggtcctcattagcaagttaccaaaagtaaaaatagggcaataaagtaacagaattccttttaaacccatagtaagctcttctggcatgaatttatagccctcttctacccttccagccaaaggtcattccaaatgctatatgtggaatttgtctgaagggtaaggagtccaacaagaaaggaaaggctgaatcacttatacactgctcccaatgtgagaatagtggtaagtattgaaatgtctttttaaaattttaaccaccgtatttattggttcaaaaactagaatttatagtttcaggcagatttcaaccaaagagtcaccaaattaaatacacagggtagcttgtgaggcatagacacagcccatgtgttttcctctacattgtatattcatttctctttggcgatttgacattatagccattctctggaagtcctaaagcaaactagtattttatgtgccatattaagttaaaatttcttatgtgagataccactaatactggttttgatttaggccatccttcttgcctggatatgacaatggagcttgtttctatgattaagacctacccatggcagtgtatggaatgtaaaacatgcattatatgtggacaaccccaccatgaagaagaaatgatgttctgtgatatgtgtgacagaggttatcatactttttgtgtgggccttggtgctattccatcagtaaagattaaaaaaagagcaaacattatctttgggtgatgagactctcccagcactccaaaaggctgcataaacgctatcatgacatgaagagcttgtggactcttatgtgcaaatatgaccaaagctgtgattatacaggtcatgtccaccagcttttcatccctagacaattccaactaaaggataagtgaaaggccagaatgcccctgctaagttttggaagtatagttctatagaatgagctggtgtttttctactgaaatactaaagtaacaaagcctttatttttatatgttatctatttagaaacaacaaaatgactgctacgtctttatacatttctatagaaatctattatagatttctgtaaattgaggcagcatgacaattccagataactttagaacagagttgaataaatcacagtaattggactaaaacattacacagataattgtgtaattttagaacttacttgcatagttaacactgtataatactcttataaaatatatgcctacaacgaagtttcctgggaatcattaagcaagcaacataattatttttctgtagtaattcagatcaagtatgtagtacaagttatcattgtgctgttaaagttttaaagtgctgtcagcagagtacaccaggacttgaaagaatgctgttaagacacacagctgccagtgagcaggagagaaaaagtcttaaaaaagccaaattccggaatgggttttgaccttttgaagtatgatagtgtttgaatttcaggaaagattgtactttcttaaaggtccgtatcaccgtatggcattgcatctctcccatcccccttgacttgcaatgaattttgcatggcattgattacattgattaagtttacattttttccttaaattaaggaactcatagtgcccttctcaccacaaaatccagagaggaatatcattagtgatagctaaggcagaagagtttagatgggcttaaaattcagtcctgtaaagataatttttcattctatattaacaatttttttcctaggtcgctggatttgtgactgttgtcagcgggcccccccaacacccaggaaagtgggcagaagggggaaaaacagcaaagagggataaaatagtttttgactctaatactgtatatgcatttaagtggaatatttggtgccatttacaacattattttcatgccaataaaagattttttttgcaaattatgagcttaaaatctgcagttatttctgttaaaagctacgcttactctcgaaactaactccaggtagagaattcatcttccaaagtattttatagtaaccttggctcactccaaaaattcagtggaaatgtttagtaacttaagatacttaactgtttctccatagccccaaaagttaattttcatgaaacttcctaatctacattgtttccggcctaccataggtagcactgacaaagttatttaataactgaagaattttcataggtatgacaaatggcccactaagatttggtgcagctggatttagagttgtcattattggactggtacaggaacaaactttgtaaatacctgcctgccaggaaatcctttttgtatagaaaagtaccatcacctacttggggtacaggcatgaggctttagtccaggctcagggaagtgtacgtaaatcatttccaacttgattttagtaactcttgaaaacttacaccaacttcggttagaatctccagagtaaaattacaaagttatcaaccttttgatttgtgtcacagcatgaaaggttgctctattttatataaacctgttactgcaatcatttttagtcaacctgcctaatgaaaatggagtctaaacactttgtgcacagtccttttataggaattatgatctttaaaatactgtgcttgctgcttttcctatttttggggtaactgaggtaacaaaactgcgtatggctttatttttccatcccttgactaaaggtacctagaacttcaaccaagtacaagtagcaaggttcacagcaaactgcaatcagcttcacagatggagggttttatatcccagagtgtggtcaacgactcaaaagagaatttcaagtaccagtttcaaaatgctaattaatatcgtccagagaacagattcctcctcttgcgaggcgtcttccggggcaccagcgtgcttctggccggcatctgcgccgtcggcggggtaggcggcctcgccgaacgggtgctgctcgaccgtgccgtcgtagtacaccttcatctcgaactcgctctccaggtgggaggggtgtccatagacgccgatgcccactgggcgccggaagtgcgcggggatggacacggcgtccgggccgcaggtggccgattgcagctcgtagtcgtcgaagctggggtgcaggctgctggcggagacgtacagatccgcatctcccttgaggctgcgcatcctgaggactatcttgccctcgtggttcagccgcaggtagctgtagttcccggcgcctatctggccctggacgacgtgcaggagcacccactcctcggggacctcctcctcgtccgcgcagcttcccggagacaggacctgcgaggctaggagcagcagcagggccgtcgtccagggcgcggccctcccgcggggagcggccatggctggcggctcagctccggggcctgcaagtgggtcagtgctgctggggacaccggaggcgctcagcaccggagcctgtccccgccgtccgcacgcgggtccacggcgcgtccaggcgcctggtctgtcgctgggactgtcccttcccacccgcgtgaggccccggggaggaggggtgggttaacccctcccccgtagcgcggcgcccactcagggcaggggcaggggcaggggcagggccgctgtggcaccctcggactcaccaccactccccgcagggggccgcgctttatacatccggacc

SEQ ID NO: 457694 - DNA, 4157 bp, Homo sapiens
tagtgaatttttctaagtatagattcttttattagacatgcaaagagaataatcacacaactaagttttccacaaacgtttatgtacacgccaatgtatgcatgagacatctttcaattaaaaatgtttaaactgatttttttttaaataccactataccaatgaggataagctgattttttaacttagattttatagctctagttttgcagttttggaaaatagcaggttttaaacaaaattaatatatgagctatttaaaatggtctttttagagtaagtcttacacataatggtcatttgctacttggattttcttgtccaattaatagtgacatttgacattgtatttagtctttccttccattcattaaacaaatcttactgtgcatgtagggagtatagaatgctacatttaatcttacgagatcatgctgtttaccaaattttatgatgaaattaatgctttcttcagtaggcagtcttacattgtaggcagactcctgtcaagttttgtctttcaaaatggtcctcattagcaagttaccaaaagtaaaaatagggcaataaagtaacagaattccttttaaacccatagtaagctcttctggcatgaatttatagccctcttctacccttccagccaaaggtcattccaaatgctatatgtggaatttgtctgaagggtaaggagtccaacaagaaaggaaaggctgaatcacttatacactgctcccaatgtgagaatagtggtaagtattgaaatgtctttttaaaattttaaccaccgtatttattggttcaaaaactagaatttatagtttcaggcagatttcaaccaaagagtcaccaaattaaatacacagggtagcttgtgaggcatagacacagcccatgtgttttcctctacattgtatattcatttctttttatgtgccatattaagttaaaatttcttatgtgagataccactaatactggttttgatttaggccatccttcttgcctggatatgacaatggagcttgtttctatgattaagacctacccatggcagtgtatggaatgtaaaacatgcattatatgtggacaaccccaccatgaagaagaaatgatgttctgtgatatgtgtgacagaggttatcatactttttgtgtgggccttggtgctattccatcagtaaagattaaaaaaagagcaaacattatctttgggtgatgagactctcccagcactccaaaaggctgcataaacgctatcatgacatgaagagcttgtggactcttatgtgcaaatatgaccaaagctgtgattatacaggtcatgtccaccagcttttcatccctagacaattccaactaaaggataagtgaaaggccagaatgcccctgctaagttttggaagtatagttctatagaatgagctggtgtttttctactgaaatactaaagtaacaaagcctttatttttatatgttatctatttagaaacaacaaaatgactgctacgtctttatacatttctatagaaatctattatagatttctgtaaattgaggcagcatgacaattccagataactttagaacagagttgaataaatcacagtaattggactaaaacattacacagataattgtgtaattttagaacttacttgcatagttaacactgtataatactcttataaaatatatgcctacaacgaagtttcctgggaatcattaagcaagcaacataattatttttctgtagtaattcagatcaagtatgtagtacaagttatcattgtgctgttaaagttttaaagtgctgtcagcagagtacaccaggacttgaaagaatgctgttaagacacacagctgccagtgagcaggagagaaaaagtcttaaaaaagccaaattccggaatgggttttgaccttttgaagtatgatagtgtttgaatttcaggaaagattgtactttcttaaaggtccgtatcaccgtatggcattgcatctctcccatcccccttgacttgcaatgaattttgcatggcattgattacattgattaagtttacattttttccttaaattaaggaactcatagtgcccttctcaccacaaaatccagagaggaatatcattagtgatagctaaggcagaagagtttagatgggcttaaaattcagtcctgtaaagataatttttcattctatattaacaatttttttcctaggtcgctggatttgtgactgttgtcagcgggcccccccaacacccaggaaagtgggcagaagggggaaaaacagcaaagagggataaaatagtttttgactctaatactgtatatgcatttaagtggaatatttggtgccatttacaacattattttcatgccaataaaagattttttttgcaaattatgagcttaaaatctgcagttatttctgttaaaagctacgcttactctcgaaactaactccaggtagagaattcatcttccaaagtattttatagtaaccttggctcactccaaaaattcagtggaaatgtttagtaacttaagatacttaactgtttctccatagccccaaaagttaattttcatgaaacttcctaatctacattgtttccggcctaccataggtagcactgacaaagttatttaataactgaagaattttcataggtatgacaaatggcccactaagatttggtgcagctggatttagagttgtcattattggactggtacaggaacaaactttgtaaatacctgcctgccaggaaatcctttttgtatagaaaagtaccatcacctacttggggtacaggcatgaggctttagtccaggctcagggaagtgtacgtaaatcatttccaacttgattttagtaactcttgaaaacttacaccaacttcggttagaatctccagagtaaaattacaaagttatcaaccttttgatttgtgtcacagcatgaaaggttgctctattttatataaacctgttactgcaatcatttttagtcaacctgcctaatgaaaatggagtctaaacactttgtgcacagtccttttataggaattatgatctttaaaatactgtgcttgctgcttttcctatttttggggtaactgaggtaacaaaactgcgtatggctttatttttccatcccttgactaaaggtacctagaacttcaaccaagtacaagtagcaaggttcacagcaaactgcaatcagcttcacagatggagggttttatatcccagagtgtggtcaacgactcaaaagagaatttcaagtaccagtttcaaaatgctaattaatatcgtccagagaacagattcctcctcttgcgaggcgtcttccggggcaccagcgtgcttctggccggcatctgcgccgtcggcggggtaggcggcctcgccgaacgggtgctgctcgaccgtgccgtcgtagtacaccttcatctcgaactcgctctccaggtgggaggggtgtccatagacgccgatgcccactgggcgccggaagtgcgcggggatggacacggcgtccgggccgcaggtggccgattgcagctcgtagtcgtcgaagctggggtgcaggctgctggcggagacgtacagatccgcatctcccttgaggctgcgcatcctgaggactatcttgccctcgtggttcagccgcaggtagctgtagttcccggcgcctatctggccctggacgacgtgcaggagcacccactcctcggggacctcctcctcgtccgcgcagcttcccggagacaggacctgcgaggctaggagcagcagcagggccgtcgtccagggcgcggccctcccgcggggagcggccatggctggcggctcagctccggggcctgcaagtgggtcagtgctgctggggacaccggaggcgctcagcaccggagcctgtccccgccgtccgcacgcgggtccacggcgcgtccaggcgcctggtctgtcgctgggactgtcccttcccacccgcgtgaggccccggggaggaggggtgggttaacccctcccccgtagcgcggcgcccactcagggcaggggcaggggcaggggcagggccgctgtggcaccctcggactcaccaccactccccgcagggggccgcgctttatacatccggacc

SEQ ID NO: 457695 - DNA, 4685 bp, Homo sapiens
gctgatggcggcggcggccgggcccggggctgcgctgtccccgcggccgtgcgacagcgacccagccacccccggagcgcagtccccgaaggatgataatgaagataattcaaatgatgggacccagccatccaaaaggaggcgaatgggctcaggagatagttctaggagttgtgaaacttcaagtcaagatcttggttttagttactatccagcagaaaacttgatagagtacaaatggccacctgatgaaacaggagaatactatatgcttcaagaacaagtcagtgaatatttgggtgtgacctcctttaaaaggaaatatccagatttagagcgacgagatttgtctcacaaggagaaactctacctgagagagctaaatgtcattactgaaactcagtgcactctaggcttaacagcattgcgcagtgatgaagtgattgatttaatgataaaagaatatccagccaaacatgctgagtattctgttattctacaagaaaaagaacgtcaacgaattacagaccattataaagagtattcccaaatgcaacaacagaatactcagaaagttgaagccagtaaagtgcctgagtatattaagaaagctgccaaaaaagcagcagaatttaatagcaacttaaaccgggaacgcatggaagaaagaagagcttattttgacttgcagacacatgttatccaggtacctcaagggaagtacaaagttttgccaacagagcgaacaaaggtcagttcttacccagtggctctcatccccggacagttccaggaatattataagaggtactcaccagatgagctgcggtatctgccattaaacacagccctgtatgagccccctctggatcctgagctccctgctctagacagtgatggtgattcagatgatggcgaagatggtcgaggtgatgagaaacggaaaaataaaggcacttcggacagctcctctggcaatgtatctgaaggggaaagccctcctgacagccaggaggactctttccagggaagacagaaatcaaaagacaaagctgccactccaagaaaagatggtcccaaacgttctgtactgtccaagtcagttcctgggtacaagccaaaggtcattccaaatgctatatgtggaatttgtctgaagggtaaggagtccaacaagaaaggaaaggctgaatcacttatacactgctcccaatgtgagaatagtggtaagtattgaaatgtctttttaaaattttaaccaccgtatttattggttcaaaaactagaatttatagtttcaggcagatttcaaccaaagagtcaccaaattaaatacacagggtagcttgtgaggcatagacacagcccatgtgttttcctctacattgtatattcatttctctttggcgatttgacattatagccattctctggaagtcctaaagcaaactagtattttatgtgccatattaagttaaaatttcttatgtgagataccactaatactggttttgatttaggccatccttcttgcctggatatgacaatggagcttgtttctatgattaagacctacccatggcagtgtatggaatgtaaaacatgcattatatgtggacaaccccaccatgaagaagaaatgatgttctgtgatatgtgtgacagaggttatcatactttttgtgtgggccttggtgctattccatcagtaaagattaaaaaaagagcaaacattatctttgggtgatgagactctcccagcactccaaaaggctgcataaacgctatcatgacatgaagagcttgtggactcttatgtgcaaatatgaccaaagctgtgattatacaggtcatgtccaccagcttttcatccctagacaattccaactaaaggataagtgaaaggccagaatgcccctgctaagttttggaagtatagttctatagaatgagctggtgtttttctactgaaatactaaagtaacaaagcctttatttttatatgttatctatttagaaacaacaaaatgactgctacgtctttatacatttctatagaaatctattatagatttctgtaaattgaggcagcatgacaattccagataactttagaacagagttgaataaatcacagtaattggactaaaacattacacagataattgtgtaattttagaacttacttgcatagttaacactgtataatactcttataaaatatatgcctacaacgaagtttcctgggaatcattaagcaagcaacataattatttttctgtagtaattcagatcaagtatgtagtacaagttatcattgtgctgttaaagttttaaagtgctgtcagcagagtacaccaggacttgaaagaatgctgttaagacacacagctgccagtgagcaggagagaaaaagtcttaaaaaagccaaattccggaatgggttttgaccttttgaagtatgatagtgtttgaatttcaggaaagattgtactttcttaaaggtccgtatcaccgtatggcattgcatctctcccatcccccttgacttgcaatgaattttgcatggcattgattacattgattaagtttacattttttccttaaattaaggaactcatagtgcccttctcaccacaaaatccagagaggaatatcattagtgatagctaaggcagaagagtttagatgggcttaaaattcagtcctgtaaagataatttttcattctatattaacaatttttttcctaggtcgctggatttgtgactgttgtcagcgggcccccccaacacccaggaaagtgggcagaagggggaaaaacagcaaagagggataaaatagtttttgactctaatactgtatatgcatttaagtggaatatttggtgccatttacaacattattttcatgccaataaaagattttttttgcaaattatgagcttaaaatctgcagttatttctgttaaaagctacgcttactctcgaaactaactccaggtagagaattcatcttccaaagtattttatagtaaccttggctcactccaaaaattcagtggaaatgtttagtaacttaagatacttaactgtttctccatagccccaaaagttaattttcatgaaacttcctaatctacattgtttccggcctaccataggtagcactgacaaagttatttaataactgaagaattttcataggtatgacaaatggcccactaagatttggtgcagctggatttagagttgtcattattggactggtacaggaacaaactttgtaaatacctgcctgccaggaaatcctttttgtatagaaaagtaccatcacctacttggggtacaggcatgaggctttagtccaggctcagggaagtgtacgtaaatcatttccaacttgattttagtaactcttgaaaacttacaccaacttcggttagaatctccagagtaaaattacaaagttatcaaccttttgatttgtgtcacagcatgaaaggttgctctattttatataaacctgttactgcaatcatttttagtcaacctgcctaatgaaaatggagtctaaacactttgtgcacagtccttttataggaattatgatctttaaaatactgtgcttgctgcttttcctatttttggggtaactgaggtaacaaaactgcgtatggctttatttttccatcccttgactaaaggtacctagaacttcaaccaagtacaagtagcaaggttcacagcaaactgcaatcagcttcacagatggagggttttatatcccagagtgtggtcaacgactcaaaagagaatttcaagtaccagtttcaaaatgctaattaatatcgtccagagaacagattcctcctcttgcgaggcgtcttccggggcaccagcgtgcttctggccggcatctgcgccgtcggcggggtaggcggcctcgccgaacgggtgctgctcgaccgtgccgtcgtagtacaccttcatctcgaactcgctctccaggtgggaggggtgtccatagacgccgatgcccactgggcgccggaagtgcgcggggatggacacggcgtccgggccgcaggtggccgattgcagctcgtagtcgtcgaagctggggtgcaggctgctggcggagacgtacagatccgcatctcccttgaggctgcgcatcctgaggactatcttgccctcgtggttcagccgcaggtagctgtagttcccggcgcctatctggccctggacgacgtgcaggagcacccactcctcggggacctcctcctcgtccgcgcagcttcccggagacaggacctgcgaggctaggagcagcagcagggccgtcgtccagggcgcggccctcccgcggggagcggccatggctggcggctcagctccggggcctgcaagtgggtcagtgctgctggggacaccggaggcgctcagcaccggagcctgtccccgccgtccgcacgcgggtccacggcgcgtccaggcgcctggtctgtcgctgggactgtcccttcccacccgcgtgaggccccggggaggaggggtgggttaacccctcccccgtagcgcggcgcccactcagggcaggggcaggggcaggggcagggccgctgtggcaccctcggactcaccaccactccccgcagggggccgcgctttatacatccggacc

SEQ ID NO: 457696 - DNA, 4391 bp, Homo sapiens
gctgatggcggcggcggccgggcccggggctgcgctgtccccgcggccgtgcgacagcgacccagccacccccggagcgcagtccccgaaggatgataatgaagataattcaaatgatgggacccagccatccaaaaggaggcgaatgggctcaggagatagttctaggagttgtgaaacttcaagtcaagatcttggttttagttactatccagcagaaaacttgatagagtacaaatggccacctgatgaaacaggagaatactatatgcttcaagaacaagtcagtgaatatttgggtgtgacctcctttaaaaggaaatatccagatttagagcgacgagatttgtctcacaaggagaaactctacctgagagagctaaatgtcattactgaaactcagtgcactctaggcttaacagcattgcgcagtgatgaagtgattgatttaatgataaaagaatatccagccaaacatgctgagtattctgttattctacaagaaaaagaacgtcaacgaattacagaccattataaagagtattcccaaatgcaacaacagaatactcagaaagttgaagccagtaaagtgcctgagtatattaagaaagctgccaaaaaagcagcagaatttaatagcaacttaaaccgggaacgcatggaagaaagaagagcttattttgacttgcagacacatgttatccaggtacctcaagggaagtacaaagttttgccaacagagcgaacaaaggtcagttcttacccagtggctctcatccccggacagttccaggaatattataagaggtactcaccagatgagctgcggtatctgccattaaacacagccctgtatgagccccctctggatcctgagctccctgctctagacagtgatggtgattcagatgatggcgaagatggtcgaggtgatgagaaacggaaaaataaaggcacttcggacagctcctctggcaatgtatctgaaggggaaagccctcctgacagccaggaggactctttccagggaagacagaaatcaaaagacaaagctgccactccaagaaaagatggtcccaaacgttctgtactgtccaagtcagttcctgggtacaagccaaaggtcattccaaatgctatatgtggaatttgtctgaagggtaaggagtccaacaagaaaggaaaggctgaatcacttatacactgctcccaatgtgagaatagtggccatccttcttgcctggatatgacaatggagcttgtttctatgattaagacctacccatggcagtgtatggaatgtaaaacatgcattatatgtggacaaccccaccatgaagaagaaatgatgttctgtgatatgtgtgacagaggttatcatactttttgtgtgggccttggtgctattccatcagtaaagattaaaaaaagagcaaacattatctttgggtgatgagactctcccagcactccaaaaggctgcataaacgctatcatgacatgaagagcttgtggactcttatgtgcaaatatgaccaaagctgtgattatacaggtcatgtccaccagcttttcatccctagacaattccaactaaaggataagtgaaaggccagaatgcccctgctaagttttggaagtatagttctatagaatgagctggtgtttttctactgaaatactaaagtaacaaagcctttatttttatatgttatctatttagaaacaacaaaatgactgctacgtctttatacatttctatagaaatctattatagatttctgtaaattgaggcagcatgacaattccagataactttagaacagagttgaataaatcacagtaattggactaaaacattacacagataattgtgtaattttagaacttacttgcatagttaacactgtataatactcttataaaatatatgcctacaacgaagtttcctgggaatcattaagcaagcaacataattatttttctgtagtaattcagatcaagtatgtagtacaagttatcattgtgctgttaaagttttaaagtgctgtcagcagagtacaccaggacttgaaagaatgctgttaagacacacagctgccagtgagcaggagagaaaaagtcttaaaaaagccaaattccggaatgggttttgaccttttgaagtatgatagtgtttgaatttcaggaaagattgtactttcttaaaggtccgtatcaccgtatggcattgcatctctcccatcccccttgacttgcaatgaattttgcatggcattgattacattgattaagtttacattttttccttaaattaaggaactcatagtgcccttctcaccacaaaatccagagaggaatatcattagtgatagctaaggcagaagagtttagatgggcttaaaattcagtcctgtaaagataatttttcattctatattaacaatttttttcctaggtcgctggatttgtgactgttgtcagcgggcccccccaacacccaggaaagtgggcagaagggggaaaaacagcaaagagggataaaatagtttttgactctaatactgtatatgcatttaagtggaatatttggtgccatttacaacattattttcatgccaataaaagattttttttgcaaattatgagcttaaaatctgcagttatttctgttaaaagctacgcttactctcgaaactaactccaggtagagaattcatcttccaaagtattttatagtaaccttggctcactccaaaaattcagtggaaatgtttagtaacttaagatacttaactgtttctccatagccccaaaagttaattttcatgaaacttcctaatctacattgtttccggcctaccataggtagcactgacaaagttatttaataactgaagaattttcataggtatgacaaatggcccactaagatttggtgcagctggatttagagttgtcattattggactggtacaggaacaaactttgtaaatacctgcctgccaggaaatcctttttgtatagaaaagtaccatcacctacttggggtacaggcatgaggctttagtccaggctcagggaagtgtacgtaaatcatttccaacttgattttagtaactcttgaaaacttacaccaacttcggttagaatctccagagtaaaattacaaagttatcaaccttttgatttgtgtcacagcatgaaaggttgctctattttatataaacctgttactgcaatcatttttagtcaacctgcctaatgaaaatggagtctaaacactttgtgcacagtccttttataggaattatgatctttaaaatactgtgcttgctgcttttcctatttttggggtaactgaggtaacaaaactgcgtatggctttatttttccatcccttgactaaaggtacctagaacttcaaccaagtacaagtagcaaggttcacagcaaactgcaatcagcttcacagatggagggttttatatcccagagtgtggtcaacgactcaaaagagaatttcaagtaccagtttcaaaatgctaattaatatcgtccagagaacagattcctcctcttgcgaggcgtcttccggggcaccagcgtgcttctggccggcatctgcgccgtcggcggggtaggcggcctcgccgaacgggtgctgctcgaccgtgccgtcgtagtacaccttcatctcgaactcgctctccaggtgggaggggtgtccatagacgccgatgcccactgggcgccggaagtgcgcggggatggacacggcgtccgggccgcaggtggccgattgcagctcgtagtcgtcgaagctggggtgcaggctgctggcggagacgtacagatccgcatctcccttgaggctgcgcatcctgaggactatcttgccctcgtggttcagccgcaggtagctgtagttcccggcgcctatctggccctggacgacgtgcaggagcacccactcctcggggacctcctcctcgtccgcgcagcttcccggagacaggacctgcgaggctaggagcagcagcagggccgtcgtccagggcgcggccctcccgcggggagcggccatggctggcggctcagctccggggcctgcaagtgggtcagtgctgctggggacaccggaggcgctcagcaccggagcctgtccccgccgtccgcacgcgggtccacggcgcgtccaggcgcctggtctgtcgctgggactgtcccttcccacccgcgtgaggccccggggaggaggggtgggttaacccctcccccgtagcgcggcgcccactcagggcaggggcaggggcaggggcagggccgctgtggcaccctcggactcaccaccactccccgcagggggccgcgctttatacatccggacc

SEQ ID NO: 457697 - DNA, 4158 bp, Homo sapiens
tagtgaatttttctaagtatagattcttttattagacatgcaaagagaataatcacacaactaagttttccacaaacgtttatgtacacgccaatgtatgcatgagacatctttcaattaaaaatgtttaaactgatttttttttaaataccactataccaatgaggataagctgattttttaacttagattttatagctctagttttgcagttttggaaaatagcaggttttaaacaaaattaatatatgagctatttaaaatggtctttttagagtaagtcttacacataatggtcatttgctacttggattttcttgtccaattaatagtgacatttgacattgtatttagtctttccttccattcattaaacaaatcttactgtgcatgtagggagtatagaatgctacatttaatcttacgagatcatgctgtttaccaaattttatgatgaaattaatgctttcttcagtaggcagtcttacattgtaggcagactcctgtcaagttttgtctttcaaaatggtcctcattagcaagttaccaaaagtaaaaatagggcaataaagtaacagaattccttttaaacccatagtaagctcttctggcatgaatttatagccctcttctacccttccagccaaaggtcattccaaatgctatatgtggaatttgtctgaagggtaaggagtccaacaagaaaggaaaggctgaatcacttatacactgctcccaatgtgagaatagtggtaagtattgaaatgtctttttaaaattttaaccaccgtatttattggttcaaaaactagaatttatagtttcaggcagatttcaaccaaagagtcaccaaattaaatacacagggtagcttgtgaggcatagacacagcccatgtgttttcctctacattgtatattcatttctctttggcgatttgacattatagccattctctggaagtcctaaagcaaactagtattttatgtgccatattaagttaaaatttcttatgtgagataccactaatactggttttgatttaggccatccttcttgcctggatatgacaatggagcttgtttctatgattaagacctacccatggcagtgtatggaatgtaaaacatgcattatatgtggacaaccccaccatgaagaagaaatgatgttctgtgatatgtgtgacagaggttatcatactttttgtgtgggccttggtgctattccatcagtaaagattaaaaaaagagcaaacattatctttgggtgatgagactctcccagcactccaaaaggctgcataaacgctatcatgacatgaagagcttgtggactcttatgtgcaaatatgaccaaagctgtgattatacaggtcatgtccaccagcttttcatccctagacaattccaactaaaggataagtgaaaggccagaatgcccctgctaagttttggaagtatagttctatagaatgagctggtgtttttctactgaaatactaaagtaacaaagcctttatttttatatgttatctatttagaaacaacaaaatgactgctacgtctttatacatttctatagaaatctattatagatttctgtaaattgaggcagcatgacaattccagataactttagaacagagttgaataaatcacagtaattggactaaaacattacacagataattgtgtaattttagaacttacttgcatagttaacactgtataatactcttataaaatatatgcctacaacgaagtttcctgggaatcattaagcaagcaacataattatttttctgtagtaattcagatcaagtatgtagtacaagttatcattgtgctgttaaagttttaaagtgctgtcagcagagtacaccaggacttgaaagaatgctgttaagacacacagctgccagtgagcaggagagaaaaagtcttaaaaaagccaaattccggaatgggttttgaccttttgaagtatgatagtgtttgaatttcaggaaagattgtactttcttaaaggtccgtatcaccgtatggcattgcatctctcccatcccccttgacttgcaatgaattttgcatggcattgattacattgattaagtttacattttttccttaaattaaggaactcatagtgcccttctcaccacaaaatccagagaggaatatcattagtgatagctaaggcagaagagtttagatgggcttaaaattcagtcctgtaaagataatttttcattctatattaacaatttttttcctaggtcgctggatttgtgactgttgtcagcgggcccccccaacacccaggaaagtgggcagaagggggaaaaacagcaaagagggataaaatagtttttgactctaatactgtatatgcatttaagtggaatatttggtgccatttacaacattattttcatgccaataaaagattttttttgcaaattatgagcttaaaatctgcagttatttctgttaaaagctacgcttactctcgaaactaactccaggtagagaattcatcttccaaagtattttatagtaaccttggctcactccaaaaattcagtggaaatgtttagtaacttaagatacttaactgtttctccatagccccaaaagttaattttcatgaaacttcctaatctacattgtttccggcctaccataggtagcactgacaaagttatttaataactgaagaattttcataggtatgacaaatggcccactaagatttggtgcagctggatttagagttgtcattattggaatagaaaagtaccatcacctacttggggtacaggcatgaggctttagtccaggctcagggaagtgtacgtaaatcatttccaacttgattttagtaactcttgaaaacttacaccaacttcggttagaatctccagagtaaaattacaaagttatcaaccttttgatttgtgtcacagcatgaaaggttgctctattttatataaacctgttactgcaatcatttttagtcaacctgcctaatgaaaatggagtctaaacactttgtgcacagtccttttataggaattatgatctttaaaatactgtgcttgctgcttttcctatttttggggtaactgaggtaacaaaactgcgtatggctttatttttccatcccttgactaaaggtacctagaacttcaaccaagtacaagtagcaaggttcacagcaaactgcaatcagcttcacagatggagggttttatatcccagagtgtggtcaacgactcaaaagagaatttcaagtaccagtttcaaaatgctaattaatatcgtccagagaacagattcctcctcttgcgaggcgtcttccggggcaccagcgtgcttctggccggcatctgcgccgtcggcggggtaggcggcctcgccgaacgggtgctgctcgaccgtgccgtcgtagtacaccttcatctcgaactcgctctccaggtgggaggggtgtccatagacgccgatgcccactgggcgccggaagtgcgcggggatggacacggcgtccgggccgcaggtggccgattgcagctcgtagtcgtcgaagctggggtgcaggctgctggcggagacgtacagatccgcatctcccttgaggctgcgcatcctgaggactatcttgccctcgtggttcagccgcaggtagctgtagttcccggcgcctatctggccctggacgacgtgcaggagcacccactcctcggggacctcctcctcgtccgcgcagcttcccggagacaggacctgcgaggctaggagcagcagcagggccgtcgtccagggcgcggccctcccgcggggagcggccatggctggcggctcagctccggggcctgcaagtgggtcagtgctgctggggacaccggaggcgctcagcaccggagcctgtccccgccgtccgcacgcgggtccacggcgcgtccaggcgcctggtctgtcgctgggactgtcccttcccacccgcgtgaggccccggggaggaggggtgggttaacccctcccccgtagcgcggcgcccactcagggcaggggcaggggcaggggcagggccgctgtggcaccctcggactcaccaccactccccgcagggggccgcgctttatacatccggacc

SEQ ID NO: 457698 - DNA, 4158 bp, Homo sapiens
tagtgaatttttctaagtatagattcttttattagacatgcaaagagaataatcacacaactaagttttccacaaacgtttatgtacacgccaatgtatgcatgagacatctttcaattaaaaatgtttaaactgatttttttttaaataccactataccaatgaggataagctgattttttaacttagattttatagctctagttttgcagttttggaaaatagcaggttttaaacaaaattaatatatgagctatttaaaatggtctttttagagtaagtcttacacataatggtcatttgctacttggattttcttgtccaattaatagtgacatttgacattgtatttagtctttccttccattcattaaacaaatcttactgtgcatgtagggagtatagaatgctacatttaatcttacgagatcatgctgtttaccaaattttatgatgaaattaatgctttcttcagtaggcagtcttacattgtaggcagactcctgtcaagttttgtctttcaaaatggtcctcattagcaagttaccaaaagtaaaaatagggcaataaagtaacagaattccttttaaacccatagtaagctcttctggcatgaatttatagccctcttctacccttccagccaaaggtcattccaaatgctatatgtggaatttgtctgaagggtaaggagtccaacaagaaaggaaaggctgaatcacttatacactgctcccaatgtgagaatagtggtaagtattgaaatgtctttttaaaattttaaccaccgtatttattggttcaaaaactagaatttatagtttcaggcagatttcaaccaaagagtcaccaaattaaatacacagggtagcttgtgaggcatagacacagcccatgtgttttcctctacattgtatattcatttctctttggcgatttgacattatagccattctctggaagtcctaaagcaaactagtattttatgtgccatattaagttaaaatttcttatgtgagataccactaatactggttttgatttaggccatccttcttgcctggatatgacaatggagcttgtttctatgattaagacctacccatggcagtgtatggaatgtaaaacatgcattatatgtggacaaccccaccatgaagaagaaatgatgttctgtgatatgtgtgacagaggttatcatactttttgtgtgggccttggtgctattccatcagtaaagattaaaaaaagagcaaacattatctttgggtgatgagactctcccagcactccaaaaggctgcataaacgctatcatgacatgaagagcttgtggactcttatgtgcaaatatgaccaaagctgtgattatacaggtcatgtccaccagcttttcatccctagacaattccaactaaaggataagtgaaaggccagaatgcccctgctaagttttggaagtatagttctatagaatgagctggtgtttttctactgaaatactaaagtaacaaagcctttatttttatatgttatctatttagaaacaacaaaatgactgctacgtctttatacatttctatagaaatctattatagatttctgtaaattgaggcagcatgacaattccagataactttagaacagagttgaataaatcacagtaattggactaaaacattacacagataattgtgtaattttagaacttacttgcatagttaacactgtataatactcttataaaatatatgcctacaacgaagtttcctgggaatcattaagcaagcaacataattatttttctgtagtaattcagatcaagtatgtagtacaagttatcattgtgctgttaaagttttaaagtgctgtcagcagagtacaccaggacttgaaagaatgctgttaagacacacagctgccagtgagcaggagagaaaaatgtttgaatttcaggaaagattgtactttcttaaaggtccgtatcaccgtatggcattgcatctctcccatcccccttgacttgcaatgaattttgcatggcattgattacattgattaagtttacattttttccttaaattaaggaactcatagtgcccttctcaccacaaaatccagagaggaatatcattagtgatagctaaggcagaagagtttagatgggcttaaaattcagtcctgtaaagataatttttcattctatattaacaatttttttcctaggtcgctggatttgtgactgttgtcagcgggcccccccaacacccaggaaagtgggcagaagggggaaaaacagcaaagagggataaaatagtttttgactctaatactgtatatgcatttaagtggaatatttggtgccatttacaacattattttcatgccaataaaagattttttttgcaaattatgagcttaaaatctgcagttatttctgttaaaagctacgcttactctcgaaactaactccaggtagagaattcatcttccaaagtattttatagtaaccttggctcactccaaaaattcagtggaaatgtttagtaacttaagatacttaactgtttctccatagccccaaaagttaattttcatgaaacttcctaatctacattgtttccggcctaccataggtagcactgacaaagttatttaataactgaagaattttcataggtatgacaaatggcccactaagatttggtgcagctggatttagagttgtcattattggactggtacaggaacaaactttgtaaatacctgcctgccaggaaatcctttttgtatagaaaagtaccatcacctacttggggtacaggcatgaggctttagtccaggctcagggaagtgtacgtaaatcatttccaacttgattttagtaactcttgaaaacttacaccaacttcggttagaatctccagagtaaaattacaaagttatcaaccttttgatttgtgtcacagcatgaaaggttgctctattttatataaacctgttactgcaatcatttttagtcaacctgcctaatgaaaatggagtctaaacactttgtgcacagtccttttataggaattatgatctttaaaatactgtgcttgctgcttttcctatttttggggtaactgaggtaacaaaactgcgtatggctttatttttccatcccttgactaaaggtacctagaacttcaaccaagtacaagtagcaaggttcacagcaaactgcaatcagcttcacagatggagggttttatatcccagagtgtggtcaacgactcaaaagagaatttcaagtaccagtttcaaaatgctaattaatatcgtccagagaacagattcctcctcttgcgaggcgtcttccggggcaccagcgtgcttctggccggcatctgcgccgtcggcggggtaggcggcctcgccgaacgggtgctgctcgaccgtgccgtcgtagtacaccttcatctcgaactcgctctccaggtgggaggggtgtccatagacgccgatgcccactgggcgccggaagtgcgcggggatggacacggcgtccgggccgcaggtggccgattgcagctcgtagtcgtcgaagctggggtgcaggctgctggcggagacgtacagatccgcatctcccttgaggctgcgcatcctgaggactatcttgccctcgtggttcagccgcaggtagctgtagttcccggcgcctatctggccctggacgacgtgcaggagcacccactcctcggggacctcctcctcgtccgcgcagcttcccggagacaggacctgcgaggctaggagcagcagcagggccgtcgtccagggcgcggccctcccgcggggagcggccatggctggcggctcagctccggggcctgcaagtgggtcagtgctgctggggacaccggaggcgctcagcaccggagcctgtccccgccgtccgcacgcgggtccacggcgcgtccaggcgcctggtctgtcgctgggactgtcccttcccacccgcgtgaggccccggggaggaggggtgggttaacccctcccccgtagcgcggcgcccactcagggcaggggcaggggcaggggcagggccgctgtggcaccctcggactcaccaccactccccgcagggggccgcgctttatacatccggacc

SEQ ID NO: 457699 - DNA, 3348 bp, Homo sapiens
gctgatggcggcggcggccgggcccggggctgcgctgtccccgcggccgtgcgacagcgacccagccacccccggagcgcagtccccgaaggatgataatgaagataattcaaatgatgggacccagccatccaaaaggaggcgaatgggctcaggagatagttctaggagttgtgaaacttcaagtcaagatcttggttttagttactatccagcagaaaacttgatagagtacaaatggccacctgatgaaacaggagaatactatatgcttcaagaacaagtcagtgaatatttgggtgtgacctcctttaaaaggaaatatccagatttagagcgacgagatttgtctcacaaggagaaactctacctgagagagctaaatgtcattactgaaactcagtgcactctaggcttaacagcattgcgcagtgatgaagtgattgatttaatgataaaagaatatccagccaaacatgctgagtattctgttattctacaagaaaaagaacgtcaacgaattacagaccattataaagagtattcccaaatgcaacaacagaatactcagaaagttgaagccagtaaagtgcctgagtatattaagaaagctgccaaaaaagcagcagaatttaatagcaacttaaaccgggaacgcatggaagaaagaagagcttattttgacttgcagacacatgttatccaggtacctcaagggaagtacaaagttttgccaacagagcgaacaaaggtcagttcttacccagtggctctcatccccggacagttccaggaatattataagaggtactcaccagatgagctgcggtatctgccattaaacacagccctgtatgagccccctctggatcctgagctccctgctctagacagtgatggtgattcagatgatggcgaagatggtcgaggtgatgagaaacggaaaaataaaggcacttcggacagctcctctggcaatgtatctgaaggggaaagccctcctgacagccaggaggactctttccagggaagacagaaatcaaaagacaaagctgccactccaagaaaagatggtcccaaacgttctgtactgtccaagtcagttcctgggtacaagccaaaggtcattccaaatgctatatgtggaatttgtctgaagggtaaggagtccaacaagaaaggaaaggctgaatcacttatacactgctcccaatgtgagaatagtggccatccttcttgcctggatatgacaatggagcttgtttctatgattaagacctacccatggcagtgtatggaatgtaaaacatgcattatatgtggacaaccccaccatgaagaagaaatgatgttctgtgatatgtgtgacagaggttatcatactttttgtgtgggccttggtgctattccatcaggtcgctggatttgtgactgttgtcagcgggcccccccaacacccaggaaagtgggcagaagggggaaaaacagcaaagagggataaaatagtttttgactctaatactgtatatgcatttaagtggaatatttggtgccatttacaacattattttcatgccaataaaagattttttttgcaaattatgagcttaaaatctgcagttatttctgttaaaagctacgcttactctcgaaactaactccaggtagagaattcatcttccaaagtattttatagtaaccttggctcactccaaaaattcagtggaaatgtttagtaacttaagatacttaactgtttctccatagccccaaaagttaattttcatgaaacttcctaatctacattgtttccggcctaccataggtagcactgacaaagttatttaataactgaagaattttcataggtatgacaaatggcccactaagatttggtgcagctggatttagagttgtcattattggactggtacaggaacaaactttgtaaatacctgcctgccaggaaatcctttttgtatagaaaagtaccatcacctacttggggtacaggcatgaggctttagtccaggctcagggaagtgtacgtaaatcatttccaacttgattttagtaactcttgaaaacttacaccaacttcggttagaatctccagagtaaaattacaaagttatcaaccttttgatttgtgtcacagcatgaaaggttgctctattttatataaacctgttactgcaatcatttttagtcaacctgcctaatgaaaatggagtctaaacactttgtgcacagtccttttataggaattatgatctttaaaatactgtgcttgctgcttttcctatttttggggtaactgaggtaacaaaactgcgtatggctttatttttccatcccttgactaaaggtacctagaacttcaaccaagtacaagtagcaaggttcacagcaaactgcaatcagcttcacagatggagggttttatatcccagagtgtggtcaacgactcaaaagagaatttcaagtaccagtttcaaaatgctaattaatatcgtccagagaacagattcctcctcttgcgaggcgtcttccggggcaccagcgtgcttctggccggcatctgcgccgtcggcggggtaggcggcctcgccgaacgggtgctgctcgaccgtgccgtcgtagtacaccttcatctcgaactcgctctccaggtgggaggggtgtccatagacgccgatgcccactgggcgccggaagtgcgcggggatggacacggcgtccgggccgcaggtggccgattgcagctcgtagtcgtcgaagctggggtgcaggctgctggcggagacgtacagatccgcatctcccttgaggctgcgcatcctgaggactatcttgccctcgtggttcagccgcaggtagctgtagttcccggcgcctatctggccctggacgacgtgcaggagcacccactcctcggggacctcctcctcgtccgcgcagcttcccggagacaggacctgcgaggctaggagcagcagcagggccgtcgtccagggcgcggccctcccgcggggagcggccatggctggcggctcagctccggggcctgcaagtgggtcagtgctgctggggacaccggaggcgctcagcaccggagcctgtccccgccgtccgcacgcgggtccacggcgcgtccaggcgcctggtctgtcgctgggactgtcccttcccacccgcgtgaggccccggggaggaggggtgggttaacccctcccccgtagcgcggcgcccactcagggcaggggcaggggcaggggcagggccgctgtggcaccctcggactcaccaccactccccgcagggggccgcgctttatacatccggacc

SEQ ID NO: 457700 - DNA, 973 bp, Homo sapiens
tagtgaatttttctaagtatagattcttttattagacatgcaaagagaataatcacacaactaagttttccacaaacgtttatgtacacgccaatgtatgcatgagacatctttcaattaaaaatgtttaaactgatttttttttaaataccactataccaatgaggataagctgattttttaacttagattttatagctctagttttgcagttttggaaaatagcaggttttaaacaaaattaatatatgagctatttaaaatggtctttttagagtaagtcttacacataatggtcatttgctacttggattttcttgtccaattaatagtgacatttgacattgtatttagtctttccttccattcattaaacaaatcttactgtgcatgtagggagtatagaatgctacatttaatcttacgagatcatgctgtttaccaaattttatgatgaaattaatgctttcttcagtaggcagtcttacattgtaggcagactcctgtcaagttttgtctttcaaaatggtcctcattagcaagttaccaaaagtaaaaatagggcaataaagtaacagaattccttttaaacccatagtaagctcttctggcatgaatttatagccctcttctacccttccagccaaaggtcattccaaatgctatatgtggaatttgtctgaagggtaaggagtccaacaagaaaggaaaggctgaatcacttatacactgctcccaatgtgagaatagtggccatccttcttgcctggatatgacaatggagcttgtttctatgattaagacctacccatggcagtgtatggaatgtaaaacatgcattatatgtggacaaccccaccatgaagaagaaatgatgttctgtgatatgtgtgacagaggttatcatactttttgtgtgggccttggtgctattccatcagcgctggatttgtgactgtcgggctagtcgggg

SEQ ID NO: 457701 - DNA, 1934 bp, Homo sapiens
gctgatggcggcggcggccgggcccggggctgcgctgtccccgcggccgtgcgacagcgacccagccacccccggagcgcagtccccgaaggatgataatgaagataattcaaatgatgggacccagccatccaaaaggaggcgaatgggctcaggagatagttctaggagttgtgaaacttcaagtcaagatcttggttttagttactatccagcagaaaacttgatagagtacaaatggccacctgatgaaacaggagaatactatatgcttcaagaacaagtcagtgaatatttgggtgtgacctcctttaaaaggaaatatccagatttagagcgacgagatttgtctcacaaggagaaactctacctgagagagctaaatgtcattactgaaactcagtgcactctaggcttaacagcattgcgcagtgatgaagtgattgatttaatgataaaagaatatccagccaaacatgctgagtattctgttattctacaagaaaaagaacgtcaacgaattacagaccattataaagagtattcccaaatgcaacaacagaatactcagaaagttgaagccagtaaagtgcctgagtatattaagaaagctgccaaaaaagcagcagaatttaatagcaacttaaaccgggaacgcatggaagaaagaagagcttattttgacttgcagacacatgttatccaggtacctcaagggaagtacaaagttttgccaacagagcgaacaaaggtcagttcttacccagtggctctcatccccggacagttccaggaatattataagaggtactcaccagatgagctgcggtatctgccattaaacacagccctgtatgagccccctctggatcctgagctccctgctctagacagtgatggtgattcagatgatggcgaagatggtcgaggtgatgagaaacggaaaaataaaggcacttcggacagctcctctggcaatgtatctgaaggggaaagccctcctgacagccaggaggactctttccagggaagacagaaatcaaaagacaaagctgccactccaagaaaagatggtcccaaacgttctgtactgtccaagtcagttcctgggtacaaggtagaagaaaaaagcccctgactcagcttctttactgaccagcctctccctgaaatattttaacttgactttcacgattgtggagcttctgcctgctgtacctcactagctgttcttctatggtgtgccctttgtccgctgctttcttttttgctttatttccttggtggcttttctgtcacttttggctatggtttaccttctgttttctgtatatgtacaatttataagtctttttttttctttgaaagaataaccaggcaagtatgggtttttaaaacattatttcataggcagaagtttatattttctttccttggagtaaagatcataattatttggcattttaaatgccccagcatttagtgtagctaaagctgctgagctataaagtatgagtggatatactgttagactaagttgcattttttttagtgcctttcattaagaaagatctgggtttaatctaaggattatttgatccatatgctaaatttagctaactctgggatagaaaataataaaacctgttacttacattgtagtgatttttagcataaccttggtaaagagcctatatgattctatggcaagaattaaaacatacttgttaacttgttgatctgattatcctcagagtaaaggagtaggttgtcagcaactattattatattttgaacttttcctccctctgtctgcccctcccttttcttctgaagaaaaggtgaggtgagagatgagtagccttatttgcatatagggatttaagaatatcataaaaggaagaattagctgtacagtttcatatttgggatgg

SEQ ID NO: 457702 - DNA, 466 bp, Homo sapiens
gctgatggcggcggcggccgggcccggggctgcgctgtccccgcggccgtgcgacagcgacccagccacccccggagcgcagtccccgaaggatgataatgaagataattcaaatgatgggacccagccatccaaaaggaggcgaatgggctcaggagatagttctaggagttgtgaaacttcaagtcaagatcttgggtactgtcattttatcggttattaatattttttgtgatgttcctctttgccttaacatcctcttccctttcccccagctctggcaaaggcaattattaaaaattgtagaatattttcttcctgttctataatgtgccatcaaagttggtcttgctactgagtgtaattaaaaagcaattttatgatagtaaaatacatacatacataaaattaatcattttaacaatttttaagtgtgaaattcattggcatcagttacattcacagt

SEQ ID NO: 457703 - DNA, 400 bp, Homo sapiens
tggtgagcacgtggggactcttcctaaagccttgattcttagcatggaatcagttttgtgtttctctttatgttaacgtaggttatccaggtacctcaagggaagtacaaagttttgccaacagagcgaacaaaggtcagttcttacccagtggctctcatccccggacagttccaggaatattataagaggtatttagtagttttagttacagttggtatcggctattggtaaggggtttcagagccttttgtacttgcctcctaacaattttggggtctatagatatcaccgtaagatatcgtataggatttgtgttgctattcttctctggttctgtggtaaacaataccctgtagtcagaatttgaatatatgctggtgaagtctagatgcctctg

SEQ ID NO: 457704 - DNA, 4782 bp, Homo sapiens
gctgatggcggcggcggccgggcccggggctgcgctgtccccgcggccgtgcgacagcgacccagccacccccggagcgcagtccccgaaggatgataatgaagataattcaaatgatgggacccagccatccaaaaggaggcgaatgggctcaggagatagttctaggagttgtgaaacttcaagtcaagatcttggttttagttactatccagcagaaaacttgatagagtacaaatggccacctgatgaaacaggagaatactatatgcttcaagaacaagtcagtgaatatttgggtgtgacctcctttaaaaggaaatatccagatttagagcgacgagatttgtctcacaaggagaaactctacctgagagagctaaatgtcattactgaaactcagtgcactctaggcttaacagcattgcgcagtgatgaagtgattgatttaatgataaaagaatatccagccaaacatgctgagtattctgttattctacaagaaaaagaacgtcaacgaattacagaccattataaagagtattccgtaagtaattgaggtgactggcattttttatttgggttggggaaaatgacattttagaaagttatatgtgacttccaactgtattttttttttccagcaaatgcaacaacagaatactcagaaagttgaagccagtaaagtgcctgagtatattaagaaagctgccaaaaaagcagcagaatttaatagcaacttaaaccgggaacgcatggaagaaagaagagcttattttgacttgcagacacatgttatccaggtacctcaagggaagtacaaagttttgccaacagagcgaacaaaggtcagttcttacccagtggctctcatccccggacagttccaggaatattataagaggtactcaccagatgagctgcggtatctgccattaaacacagccctgtatgagccccctctggatcctgagctccctgctctagacagtgatggtgattcagatgatggcgaagatggtcgaggtgatgagaaacggaaaaataaaggcacttcggacagctcctctggcaatgtatctgaaggggaaagccctcctgacagccaggaggactctttccagggaagacagaaatcaaaagacaaagctgccactccaagaaaagatggtcccaaacgttctgtactgtccaagtcagttcctgggtacaagccaaaggtcattccaaatgctatatgtggaatttgtctgaagggtaaggagtccaacaagaaaggaaaggctgaatcacttatacactgctcccaatgtgagaatagtggtaagtattgaaatgtctttttaaaattttaaccaccgtatttattggttcaaaaactagaatttatagtttcaggcagatttcaaccaaagagtcaccaaattaaatacacagggtagcttgtgaggcatagacacagcccatgtgttttcctctacattgtatattcatttctctttggcgatttgacattatagccattctctggaagtcctaaagcaaactagtattttatgtgccatattaagttaaaatttcttatgtgagataccactaatactggttttgatttaggccatccttcttgcctggatatgacaatggagcttgtttctatgattaagacctacccatggcagtgtatggaatgtaaaacatgcattatatgtggacaaccccaccatgaagaagaaatgatgttctgtgatatgtgtgacagaggttatcatactttttgtgtgggccttggtgctattccatcagtaaagattaaaaaaagagcaaacattatctttgggtgatgagactctcccagcactccaaaaggctgcataaacgctatcatgacatgaagagcttgtggactcttatgtgcaaatatgaccaaagctgtgattatacaggtcatgtccaccagcttttcatccctagacaattccaactaaaggataagtgaaaggccagaatgcccctgctaagttttggaagtatagttctatagaatgagctggtgtttttctactgaaatactaaagtaacaaagcctttatttttatatgttatctatttagaaacaacaaaatgactgctacgtctttatacatttctatagaaatctattatagatttctgtaaattgaggcagcatgacaattccagataactttagaacagagttgaataaatcacagtaattggactaaaacattacacagataattgtgtaattttagaacttacttgcatagttaacactgtataatactcttataaaatatatgcctacaacgaagtttcctgggaatcattaagcaagcaacataattatttttctgtagtaattcagatcaagtatgtagtacaagttatcattgtgctgttaaagttttaaagtgctgtcagcagagtacaccaggacttgaaagaatgctgttaagacacacagctgccagtgagcaggagagaaaaagtcttaaaaaagccaaattccggaatgggttttgaccttttgaagtatgatagtgtttgaatttcaggaaagattgtactttcttaaaggtccgtatcaccgtatggcattgcatctctcccatcccccttgacttgcaatgaattttgcatggcattgattacattgattaagtttacattttttccttaaattaaggaactcatagtgcccttctcaccacaaaatccagagaggaatatcattagtgatagctaaggcagaagagtttagatgggcttaaaattcagtcctgtaaagataatttttcattctatattaacaatttttttcctaggtcgctggatttgtgactgttgtcagcgggcccccccaacacccaggaaagtgggcagaagggggaaaaacagcaaagagggataaaatagtttttgactctaatactgtatatgcatttaagtggaatatttggtgccatttacaacattattttcatgccaataaaagattttttttgcaaattatgagcttaaaatctgcagttatttctgttaaaagctacgcttactctcgaaactaactccaggtagagaattcatcttccaaagtattttatagtaaccttggctcactccaaaaattcagtggaaatgtttagtaacttaagatacttaactgtttctccatagccccaaaagttaattttcatgaaacttcctaatctacattgtttccggcctaccataggtagcactgacaaagttatttaataactgaagaattttcataggtatgacaaatggcccactaagatttggtgcagctggatttagagttgtcattattggactggtacaggaacaaactttgtaaatacctgcctgccaggaaatcctttttgtatagaaaagtaccatcacctacttggggtacaggcatgaggctttagtccaggctcagggaagtgtacgtaaatcatttccaacttgattttagtaactcttgaaaacttacaccaacttcggttagaatctccagagtaaaattacaaagttatcaaccttttgatttgtgtcacagcatgaaaggttgctctattttatataaacctgttactgcaatcatttttagtcaacctgcctaatgaaaatggagtctaaacactttgtgcacagtccttttataggaattatgatctttaaaatactgtgcttgctgcttttcctatttttggggtaactgaggtaacaaaactgcgtatggctttatttttccatcccttgactaaaggtacctagaacttcaaccaagtacaagtagcaaggttcacagcaaactgcaatcagcttcacagatggagggttttatatcccagagtgtggtcaacgactcaaaagagaatttcaagtaccagtttcaaaatgctaattaatatcgtccagagaacagattcctcctcttgcgaggcgtcttccggggcaccagcgtgcttctggccggcatctgcgccgtcggcggggtaggcggcctcgccgaacgggtgctgctcgaccgtgccgtcgtagtacaccttcatctcgaactcgctctccaggtgggaggggtgtccatagacgccgatgcccactgggcgccggaagtgcgcggggatggacacggcgtccgggccgcaggtggccgattgcagctcgtagtcgtcgaagctggggtgcaggctgctggcggagacgtacagatccgcatctcccttgaggctgcgcatcctgaggactatcttgccctcgtggttcagccgcaggtagctgtagttcccggcgcctatctggccctggacgacgtgcaggagcacccactcctcggggacctcctcctcgtccgcgcagcttcccggagacaggacctgcgaggctaggagcagcagcagggccgtcgtccagggcgcggccctcccgcggggagcggccatggctggcggctcagctccggggcctgcaagtgggtcagtgctgctggggacaccggaggcgctcagcaccggagcctgtccccgccgtccgcacgcgggtccacggcgcgtccaggcgcctggtctgtcgctgggactgtcccttcccacccgcgtgaggccccggggaggaggggtgggttaacccctcccccgtagcgcggcgcccactcagggcaggggcaggggcaggggcagggccgctgtggcaccctcggactcaccaccactccccgcagggggccgcgctttatacatccggacc

SEQ ID NO: 457705 - DNA, 3159 bp, Homo sapiens
gctgatggcggcggcggccgggcccggggctgcgctgtccccgcggccgtgcgacagcgacccagccacccccggagcgcagtccccgaaggatgataatgaagataattcaaatgatgggacccagccatccaaaaggaggcgaatgggctcaggagatagttctaggagttgtgaaacttcaagtcaagatcttggttttagttactatccagcagaaaacttgatagagtacaaatggccacctgatgaaacaggagaatactatatgcttcaagaacaagtcagtgaatatttgggtgtgacctcctttaaaaggaaatatccagatttagagcgacgagatttgtctcacaaggagaaactctacctgagagagctaaatgtcattactgaaactcagtgcactctaggcttaacagcattgcgcagtgatgaagtgattgatttaatgataaaagaatatccagccaaacatgctgagtattctgttattctacaagaaaaagaacgtcaacgaattacagaccattataaagagtattcccaaatgcaacaacagaatactcagaaagttgaagccagtaaagtgcctgagtatattaagaaagctgccaaaaaagcagcagaatttaatagcaacttaaaccgggaacgcatggaagaaagaagagcttattttgacttgcagacacatgttatccaggtacctcaagggaagtacaaagttttgccaacagagcgaacaaaggtcagttcttacccagtggctctcatccccggacagttccaggaatattataagaggtactcaccagatgagctgcggtatctgccattaaacacagccctgtatgagccccctctggatcctgagctccctgctctagacagtgatggtgattcagatgatggcgaagatggtcgaggtgatgagaaacggaaaaataaaggcacttcggacagctcctctggcaatgtatctgaaggggaaagccctcctgacagccaggaggactctttccagggaagacagaaatcaaaagacaaagctgccactccaagaaaagatggtcccaaacgttctgtactgtccaagtcagttcctgggtacaagccaaaggtcattccaaatgctatatgtggaatttgtctgaagggtaaggagtccaacaagaaaggaaaggctgaatcacttatacactgctcccaatgtgagaatagtggtcgctggatttgtgactgttgtcagcgggcccccccaacacccaggaaagtgggcagaagggggaaaaacagcaaagagggataaaatagtttttgactctaatactgtatatgcatttaagtggaatatttggtgccatttacaacattattttcatgccaataaaagattttttttgcaaattatgagcttaaaatctgcagttatttctgttaaaagctacgcttactctcgaaactaactccaggtagagaattcatcttccaaagtattttatagtaaccttggctcactccaaaaattcagtggaaatgtttagtaacttaagatacttaactgtttctccatagccccaaaagttaattttcatgaaacttcctaatctacattgtttccggcctaccataggtagcactgacaaagttatttaataactgaagaattttcataggtatgacaaatggcccactaagatttggtgcagctggatttagagttgtcattattggactggtacaggaacaaactttgtaaatacctgcctgccaggaaatcctttttgtatagaaaagtaccatcacctacttggggtacaggcatgaggctttagtccaggctcagggaagtgtacgtaaatcatttccaacttgattttagtaactcttgaaaacttacaccaacttcggttagaatctccagagtaaaattacaaagttatcaaccttttgatttgtgtcacagcatgaaaggttgctctattttatataaacctgttactgcaatcatttttagtcaacctgcctaatgaaaatggagtctaaacactttgtgcacagtccttttataggaattatgatctttaaaatactgtgcttgctgcttttcctatttttggggtaactgaggtaacaaaactgcgtatggctttatttttccatcccttgactaaaggtacctagaacttcaaccaagtacaagtagcaaggttcacagcaaactgcaatcagcttcacagatggagggttttatatcccagagtgtggtcaacgactcaaaagagaatttcaagtaccagtttcaaaatgctaattaatatcgtccagagaacagattcctcctcttgcgaggcgtcttccggggcaccagcgtgcttctggccggcatctgcgccgtcggcggggtaggcggcctcgccgaacgggtgctgctcgaccgtgccgtcgtagtacaccttcatctcgaactcgctctccaggtgggaggggtgtccatagacgccgatgcccactgggcgccggaagtgcgcggggatggacacggcgtccgggccgcaggtggccgattgcagctcgtagtcgtcgaagctggggtgcaggctgctggcggagacgtacagatccgcatctcccttgaggctgcgcatcctgaggactatcttgccctcgtggttcagccgcaggtagctgtagttcccggcgcctatctggccctggacgacgtgcaggagcacccactcctcggggacctcctcctcgtccgcgcagcttcccggagacaggacctgcgaggctaggagcagcagcagggccgtcgtccagggcgcggccctcccgcggggagcggccatggctggcggctcagctccggggcctgcaagtgggtcagtgctgctggggacaccggaggcgctcagcaccggagcctgtccccgccgtccgcacgcgggtccacggcgcgtccaggcgcctggtctgtcgctgggactgtcccttcccacccgcgtgaggccccggggaggaggggtgggttaacccctcccccgtagcgcggcgcccactcagggcaggggcaggggcaggggcagggccgctgtggcaccctcggactcaccaccactccccgcagggggccgcgctttatacatccggacc

SEQ ID NO: 457706 - DNA, 1350 bp, Homo sapiens
gctgatggcggcggcggccgggcccggggctgcgctgtccccgcggccgtgcgacagcgacccagccacccccggagcgcagtccccgaaggatgataatgaagataattcaaatgatgggacccagccatccaaaaggaggcgaatgggctcaggagatagttctaggagttgtgaaacttcaagtcaagatcttggttttagttactatccagcagaaaacttgatagagtacaaatggccacctgatgaaacaggagaatactatatgcttcaagaacaagtcagtgaatatttgggtgtgacctcctttaaaaggaaatatccagatttagagcgacgagatttgtctcacaaggagaaactctacctgagagagctaaatgtcattactgaaactcagtgcactctaggcttaacagcattgcgcagtgatgaagtgattgatttaatgataaaagaatatccagccaaacatgctgagtattctgttattctacaagaaaaagaacgtcaacgaattacagaccattataaagagtattcccaaatgcaacaacagaatactcagaaagttgaagccagtaaagtgcctgagtatattaagaaagctgccaaaaaagcagcagaatttaatagcaacttaaaccgggaacgcatggaagaaagaagagcttattttgacttgcagacacatgttatccaggtacctcaagggaagtacaaagttttgccaacagagcgaacaaaggtcagttcttacccagtggctctcatccccggacagttccaggaatattataagaggtactcaccagatgagctgcggtatctgccattaaacacagccctgtatgagccccctctggatcctgagctccctgctctagacagtgatggtgattcagatgatggcgaagatggtcgaggtgatgagaaacggaaaaataaaggcacttcggacagctcctctggcaatgtatctgaaggggaaagccctcctgacagccaggaggactctttccagggaagacagaaatcaaaagacaaagctgccactccaagaaaagatggtcccaaacgttctgtactgtccaagtcagttcctgggtacaagccaaaggtcattccaaatgctatatgtggaatttgtctgaagggtaaggagtccaacaagaaaggaaaggctgaatcacttatacactgctcccaatgtgagaatagtgccatccttcttgcctggatatgacaaggaggctgtttcttaagttgctatgcctcagtttcctcatctataaaatggggggaaataataacggactaccttgtagggttgtcttaaggattaaa

SEQ ID NO: 457707 - DNA, 1860 bp, Homo sapiens
  misc_feature (9)..(9): n is a, c, g, or t
gaattcggnacgagagagagagagattacaggaccagataacaaaggaatttacaaaggagacagagaatccagtgggaaatacacatttgctgctcacatggatggaacatacaaattttgttttagtaaccggatgtccaccatgactccaaaaatagtgatgttcaccattgatattggggaggctccaaaaggacaagatatggaaacagaagctcaccagaacaagctagaagaaatgatcaatgagctagcagtggcgatgacagctgtaaagcacgaacaggaatacatggaagtccgggagagaatacacagagccatcaacgacaacacaaacagcagagtggtcctttggtccttctttgaagctcttgttctagttgccatgacattgggacagatctactacctgaagagattttttgaagtccggagagttgtttaaaaagcctcttcctgatgatcccaactcagaattcactgtttaccaaacaccttggtcataataatgtcattagtttctccatttttattttctgaactgtacattcacaacttatgtttctttgagattaatagatattgggggaaaaacgcctttttaggaaaattatagtgaaaatttgacagttgattggcataatttcttgtttgaatgctgcctccattatataggtccttccaggaactcaaacactgtaagtgaaatatgggagtatagtttttattatttcttcttttccttttgttttcataatataatgcagtttgttcaggaaatcagcacaaagcctgatagtactttactaaaatgactgcattctttggattccttcagtctatggttcaagtcactaaagattcatttttgttgagtccttatgagaaacagcagtatgaatcttgacggtttctgcccgtcctaatggcagagctctctgacttgggtgtatgctgccaggctgggtactttcatactttgttttcttgttttgctttaaaactacgactcagcatacattttcccacatacatttttacattgtaccttaggactcagtcatctccacttaaattgatgacacaagcagctaataaccatttctgggtttctgcctaaccccctaattgtctgttaaagccaattctctgggtgtcccagtgagtggtggctttttttctttccacattggcacattcacttctcccactcttggcatgtaagaaataagcatttacataattggaaaaatctggatttctgatgccaaagggttaaagcttcttggatttcatttcattgatatacagccactattttatttttgatcagtggcctttgggccactgttcagggtactgaccatcagtgtcagcattagggttttggttttgtttcttttgggtctttcttttttggcacatgtgaatcttgtttgtgtaaaatgaaattactttctcttgttctctgatgatgggtttaaaattaaaagagcatccggttttggtatggggatgatccaggattatgttgtgactgatacatattagttacttgtgctttttttttttttttggatctttgcaagggcaaaactacaagtaacgagttttatataattaatttaaatttgttacaggttttcatgttcaggataaaccatacttccaccttgggtgagaacacttgcaacagtttattaatgaggtgactttcaccttaggacaactgttgcatgccaagttttttgtgtgtgtgaaacacttcaaaactgatttaaaagatgtaaatttaaaattggttgtatctaatatgccccaggttcggtaaataaacaattctttttaaaaacag

SEQ ID NO: 457708 - DNA, 2221 bp, Homo sapiens
ttttttttggaccaagtctcgctctgtcgcccaggctggagtgcagtggcacgatctcgactcactgcaacctctgcctcccgggttcaagcgattttcctgcctcagcctcctgagtagctgggaatacaggcgtgcgccaccatgcccggctaatttcgtgtttttagtagagacggagttttaccatgttggccaggctggtcttgaactcctgacctcaagtgatctgcctgccttggcctcccaaagtgctgtgattacaggcgtgagccaccatgcccagccatattcttggtgaatttcttactgccattagacattacttataaagtctatgacttaatcttttgtgacattttatgcatttctctcttgcctccagattacaggaccagataacaaaggaatttacaaaggagacagagaatccagtgggaaatacacatttgctgctcacatggatggaacatacaaattttgttttagtaaccggatgtccaccatgactccaaaaatagtgatgttcaccattgatattggggaggctccaaaaggacaagatatggaaacagaagctcaccagaacaagctagaagaaatgatcaatgagctagcagtggcgatgacagctgtaaagcacgaacaggaatacatggaagtccgggagagaatacacagagccatcaacgacaacacaaacagcagagtggtcctttggtccttctttgaagctcttgttctagttgccatgacattgggacagatctactacctgaagagattttttgaagtccggagagttgtttaaaaagcctcttcctgatgatcccaactcagaattcactgtttaccaaacaccttggtcataataatgtcattagtttctccatttttattttctgaactgtacattcacaacttatgtttctttgagattaatagatattgggggaaaaacgcctttttaggaaaattatagtgaaaatttgacagttgattggcataatttcttgtttgaatgctgcctccattatataggtccttccaggaactcaaacactgtaagtgaaatatgggagtatagtttttattatttcttcttttccttttgttttcataatataatgcagtttgttcaggaaatcagcacaaagcctgatagtactttactaaaatgactgcattctttggattccttcagtctatggttcaagtcactaaagattcatttttgttgagtccttatgagaaacagcagtatgaatcttgacggtttctgcccgtcctaatggcagagctctctgacttgggtgtatgctgccaggctgggtactttcatactttgttttcttgttttgctttaaaactacgactcagcatacattttcccacatacatttttacattgtaccttaggactcagtcatctccacttaaattgatgacacaagcagctaataaccatttctgggtttctgcctaaccccctaattgtctgttaaagccaattctctgggtgtcccagtgagtggtggctttttttctttccacattggcacattcacttctcccactcttggcatgtaagaaataagcatttacataattggaaaaatctggatttctgatgccaaagggttaaagcttcttggatttcatttcattgatatacagccactattttatttttgatcagtggcctttgggccactgttcagggtactgaccatcagtgtcagcattagggttttggttttgtttcttttgggtctttcttttttggcacatgtgaatcttgtttgtgtaaaatgaaattactttctcttgttctctgatgatgggtttaaaattaaaagagcatccggttttggtatggggatgatccaggattatgttgtgactgatacatattagttacttgtgctttttttttttttttggatctttgcaagggcaaaactacaagtaacgagttttatataattaatttaaatttgttacaggttttcatgttcaggataaaccatacttccaccttgggtgagaacacttgcaacagtttattaatgaggtgactttcaccttaggacaactgttgcatgccaagttttttgtgtgtgtgaaacacttcaaaactgatttaaaagatgtaaatttaaaattggttgtatctaatatgccccaggttcggtaaataaacaattctttttaaaaacag

SEQ ID NO: 457709 - DNA, 2095 bp, Homo sapiens
ctggttggccctactgggaaaaaaaaaaaaaaaaaaaaagggcggcggtggctgagaaggcagcggggcggcggcggcggcggcggcggctgtggaggccgcagtccgggtcctggcttcggcctcagccccaccatggtgacgcttgctgaactgctggtgctcctggccgctctcctggccacggtctcgggctatttcgttagcatcgacgcccatgctgaagagtgcttctttgagcgggtcacctcgggcaccaagatgggcctcatcttcgaggtggcggagggcggcttcctggacatcgacgtggagattacaggaccagataacaaaggaatttacaaaggagacagagaatccagtgggaaatacacatttgctgctcacatggatggaacatacaaattttgttttagtaaccggatgtccaccatgactccaaaaatagtgatgttcaccattgatattggggaggctccaaaaggacaagatatggaaacagaagctcaccagaacaagctagaagaaatgatcaatgagctagcagtggcgatgacagctgtaaagcacgaacaggaatacatggaagtccgggagagaatacacagagccatcaacgacaacacaaacagcagagtggtcctttggtccttctttgaagctcttgttctagttgccatgacattgggacagatctactacctgaagagattttttgaagtccggagagttgtttaaaaagcctcttcctgatgatcccaactcagaattcactgtttaccaaacaccttggtcataataatgtcattagtttctccatttttattttctgaactgtacattcacaacttatgtttctttgagattaatagatattgggggaaaaacgcctttttaggaaaattatagtaggtccttccaggaactcaaacactgtaagtgaaatatgggagtatagtttttattatttcttcttttccttttgttttcataatataatgcagtttgttcaggaaatcagcacaaagcctgatagtactttactaaaatgactgcattctttggattccttcagtctatggttcaagtcactaaagattcatttttgttgagtccttatgagaaacagcagtatgaatcttgacggtttctgcccgtcctaatggcagagctctctgacttgggtgtatgctgccaggctgggtactttcatactttgttttcttgttttgctttaaaactacgactcagcatacattttcccacatacatttttacattgtaccttaggactcagtcatctccacttaaattgatgacacaagcagctaataaccatttctgggtttctgcctaaccccctaattgtctgttaaagccaattctctgggtgtcccagtgagtggtggctttttttctttccacattggcacattcacttctcccactcttggcatgtaagaaataagcatttacataattggaaaaatctggatttctgatgccaaagggttaaagcttcttggatttcatttcattgatatacagccactattttatttttgatcagtggcctttgggccactgttcagggtactgaccatcagtgtcagcattagggttttggttttgtttcttttgggtctttcttttttggcacatgtgaatcttgtttgtgtaaaatgaaattactttctcttgttctctgatgatgggtttaaaattaaaagagcatccggttttggtatggggatgatccaggattatgttgtgactgatacatattagttacttgtgctttttttttttttttggatctttgcaagggcaaaactacaagtaacgagttttatataattaatttaaatttgttacaggttttcatgttcaggataaaccatacttccaccttgggtgagaacacttgcaacagtttattaatgaggtgactttcaccttaggacaactgttgcatgccaagttttttgtgtgtgtgaaacacttcaaaactgatttaaaagatgtaaatttaaaattggttgtatctaatatgccccaggttcggtaaataaacaattctttttaaaaacag

SEQ ID NO: 457710 - DNA, 2097 bp, Homo sapiens
ctggttggccctactgggaaaaaaaaaaaaaaaaaaaaagggcggcggtggctgagaaggcagcggggcggcggcggcggcggcggcggctgtggaggccgcagtccgggtcctggcttcggcctcagccccaccatggtgacgcttgctgaactgctggtgctcctggccgctctcctggccacggtctcgggctatttcgttagcatcgacgcccatgctgaagagtgcttctttgagcgggtcacctcgggcaccaagatgggcctcatcttcgaggtggcggagggcggcttcctggacatcgacgtggagattacaggaccagataacaaaggaatttacaaaggagacagagaatccagtgggaaatacacatttgctgctcacatggatggaacatacaaattttgttttagtaaccggatgtccaccatgactccaaaaatagtgatgttcaccattgatattggggaggctccaaaaggacaagatatggaaacagaagctcaccagaacaagctagaagaaatgatcaatgagctagcagtggcgatgacagctgtaaagcacgaacaggaatacatggaagtccgggagagaatacacagagccatcaacgacaacacaaacagcagagtggtcctttggtccttctttgaagctcttgttctagttgccatgacattgggacagatctactacctgaagagattttttgaagtccggagagttgtttaaaaagcctcttcctgatgatcccaactcagaattcactgtttaccaaacaccttggtcataataatgtcattagtttctccatttttattttctgaactgtacattcacaacttatgtttctttgagattaatagatattgggggaaaaacgcctttttaggaaaattatagtgaaaatttgacagttgattggcataatttcttgtttgaatgctgcctccattatataggtccttccaggaactcaaacactgtaagtgaaatatgggagtatagtttttattatttcttcttttccttttgttttcataatataatgcagtttgttcaggaaatcagcacaaagcctgatagtactttaattcatttttgttgagtccttatgagaaacagcagtatgaatcttgacggtttctgcccgtcctaatggcagagctctctgacttgggtgtatgctgccaggctgggtactttcatactttgttttcttgttttgctttaaaactacgactcagcatacattttcccacatacatttttacattgtaccttaggactcagtcatctccacttaaattgatgacacaagcagctaataaccatttctgggtttctgcctaaccccctaattgtctgttaaagccaattctctgggtgtcccagtgagtggtggctttttttctttccacattggcacattcacttctcccactcttggcatgtaagaaataagcatttacataattggaaaaatctggatttctgatgccaaagggttaaagcttcttggatttcatttcattgatatacagccactattttatttttgatcagtggcctttgggccactgttcagggtactgaccatcagtgtcagcattagggttttggttttgtttcttttgggtctttcttttttggcacatgtgaatcttgtttgtgtaaaatgaaattactttctcttgttctctgatgatgggtttaaaattaaaagagcatccggttttggtatggggatgatccaggattatgttgtgactgatacatattagttacttgtgctttttttttttttttggatctttgcaagggcaaaactacaagtaacgagttttatataattaatttaaatttgttacaggttttcatgttcaggataaaccatacttccaccttgggtgagaacacttgcaacagtttattaatgaggtgactttcaccttaggacaactgttgcatgccaagttttttgtgtgtgtgaaacacttcaaaactgatttaaaagatgtaaatttaaaattggttgtatctaatatgccccaggttcggtaaataaacaattctttttaaaaacag

SEQ ID NO: 457711 - DNA, 2097 bp, Homo sapiens
ctggttggccctactgggaaaaaaaaaaaaaaaaaaaaagggcggcggtggctgagaaggcagcggggcggcggcggcggcggcggcggctgtggaggccgcagtccgggtcctggcttcggcctcagccccaccatggtgacgcttgctgaactgctggtgctcctggccgctctcctggccacggtctcgggctatttcgttagcatcgacgcccatgctgaagagtgcttctttgagcgggtcacctcgggcaccaagatgggcctcatcttcgaggtggcggagggcggcttcctggacatcgacgtggagattacaggaccagataacaaaggaatttacaaaggagacagagaatccagtgggaaatacacatttgctgctcacatggatggaacatacaaattttgttttagtaaccggatgtccaccatgactccaaaaatagtgatgttcaccattgatattggggaggctcccaatgagctagcagtggcgatgacagctgtaaagcacgaacaggaatacatggaagtccgggagagaatacacagagccatcaacgacaacacaaacagcagagtggtcctttggtccttctttgaagctcttgttctagttgccatgacattgggacagatctactacctgaagagattttttgaagtccggagagttgtttaaaaagcctcttcctgatgatcccaactcagaattcactgtttaccaaacaccttggtcataataatgtcattagtttctccatttttattttctgaactgtacattcacaacttatgtttctttgagattaatagatattgggggaaaaacgcctttttaggaaaattatagtgaaaatttgacagttgattggcataatttcttgtttgaatgctgcctccattatataggtccttccaggaactcaaacactgtaagtgaaatatgggagtatagtttttattatttcttcttttccttttgttttcataatataatgcagtttgttcaggaaatcagcacaaagcctgatagtactttactaaaatgactgcattctttggattccttcagtctatggttcaagtcactaaagattcatttttgttgagtccttatgagaaacagcagtatgaatcttgacggtttctgcccgtcctaatggcagagctctctgacttgggtgtatgctgccaggctgggtactttcatactttgttttcttgttttgctttaaaactacgactcagcatacattttcccacatacatttttacattgtaccttaggactcagtcatctccacttaaattgatgacacaagcagctaataaccatttctgggtttctgcctaaccccctaattgtctgttaaagccaattctctgggtgtcccagtgagtggtggctttttttctttccacattggcacattcacttctcccactcttggcatgtaagaaataagcatttacataattggaaaaatctggatttctgatgccaaagggttaaagcttcttggatttcatttcattgatatacagccactattttatttttgatcagtggcctttgggccactgttcagggtactgaccatcagtgtcagcattagggttttggttttgtttcttttgggtctttcttttttggcacatgtgaatcttgtttgtgtaaaatgaaattactttctcttgttctctgatgatgggtttaaaattaaaagagcatccggttttggtatggggatgatccaggattatgttgtgactgatacatattagttacttgtgctttttttttttttttggatctttgcaagggcaaaactacaagtaacgagttttatataattaatttaaatttgttacaggttttcatgttcaggataaaccatacttccaccttgggtgagaacacttgcaacagtttattaatgaggtgactttcaccttaggacaactgttgcatgccaagttttttgtgtgtgtgaaacacttcaaaactgatttaaaagatgtaaatttaaaattggttgtatctaatatgccccaggttcggtaaataaacaattctttttaaaaacag

SEQ ID NO: 457712 - DNA, 2191 bp, Homo sapiens
ctggttggccctactgggaaaaaaaaaaaaaaaaaaaaagggcggcggtggctgagaaggcagcggggcggcggcggcggcggcggcggctgtggaggccgcagtccgggtcctggcttcggcctcagccccaccatggtgacgcttgctgaactgctggtgctcctggccgctctcctggccacggtctcgggctatttcgttagcatcgacgcccatgctgaagagtgcttctttgagcgggtcacctcgggcaccaagatgggcctcatcttcgaggtggcggagggcggcttcctggacatcgacgtggagattacaggaccagataacaaaggaatttacaaaggagacagagaatccagtgggaaatacacatttgctgctcacatggatggaacatacaaattttgttttagtaaccggatgtccaccatgactccaaaaatagtgatgttcaccattgatattggggaggctccaaaaggacaagatatggaaacagaagctcaccagaacaagctagaagaaatgatcaatgagctagcagtggcgatgacagctgtaaagcacgaacaggaatacatggaagtccgggagagaatacacagagccagtcagtgaatgccgtcactttgcagcagtgtctgatggtgtcaacgacaacacaaacagcagagtggtcctttggtccttctttgaagctcttgttctagttgccatgacattgggacagatctactacctgaagagattttttgaagtccggagagttgtttaaaaagcctcttcctgatgatcccaactcagaattcactgtttaccaaacaccttggtcataataatgtcattagtttctccatttttattttctgaactgtacattcacaacttatgtttctttgagattaatagatattgggggaaaaacgcctttttaggaaaattatagtgaaaatttgacagttgattggcataatttcttgtttgaatgctgcctccattatataggtccttccaggaactcaaacactgtaagtgaaatatgggagtatagtttttattatttcttcttttccttttgttttcataatataatgcagtttgttcaggaaatcagcacaaagcctgatagtactttactaaaatgactgcattctttggattccttcagtctatggttcaagtcactaaagattcatttttgttgagtccttatgagaaacagcagtatgaatcttgacggtttctgcccgtcctaatggcagagctctctgacttgggtgtatgctgccaggctgggtactttcatactttgttttcttgttttgctttaaaactacgactcagcatacattttcccacatacatttttacattgtaccttaggactcagtcatctccacttaaattgatgacacaagcagctaataaccatttctgggtttctgcctaaccccctaattgtctgttaaagccaattctctgggtgtcccagtgagtggtggctttttttctttccacattggcacattcacttctcccactcttggcatgtaagaaataagcatttacataattggaaaaatctggatttctgatgccaaagggttaaagcttcttggatttcatttcattgatatacagccactattttatttttgatcagtggcctttgggccactgttcagggtactgaccatcagtgtcagcattagggttttggttttgtttcttttgggtctttcttttttggcacatgtgaatcttgtttgtgtaaaatgaaattactttctcttgttctctgatgatgggtttaaaattaaaagagcatccggttttggtatggggatgatccaggattatgttgtgactgatacatattagttacttgtgctttttttttttttttggatctttgcaagggcaaaactacaagtaacgagttttatataattaatttaaatttgttacaggttttcatgttcaggataaaccatacttccaccttgggtgagaacacttgcaacagtttattaatgaggtgactttcaccttaggacaactgttgcatgccaagttttttgtgtgtgtgaaacacttcaaaactgatttaaaagatgtaaatttaaaattggttgtatctaatatgccccaggttcggtaaataaacaattctttttaaaaacag

SEQ ID NO: 457713 - DNA, 1395 bp, Homo sapiens
acctcgggccatcttatgtgaaaaaaagagggaagaggtcagagaatgggaggtacctaggaactgaagtactgggtaaattagagccaaatactgaatccaagagtgaggcagatctcactatacagaccggaatatctcactatcagatcgataggaaaatttgacagttgattggcataatttcttgtttgaatgctgcctccattatataggtccttccaggaactcaaacactgtaagtgaaatatgggagtatagtttttattatttcttcttttccttttgttttcataatataatgcagtttgttcaggaaatcagcacaaagcctgatagtactttactaaaatgactgcattctttggattccttcagtctatggttcaagtcactaaagattcatttttgttgagtccttatgagaaacagcagtatgaatcttgacggtttctgcccgtcctaatggcagagctctctgacttgggtgtatgctgccaggctgggtactttcatactttgttttcttgttttgctttaaaactacgactcagcatacattttcccacatacatttttacattgtaccttaggactcagtcatctccacttaaattgatgacacaagcagctaataaccatttctgggtttctgcctaaccccctaattgtctgttaaagccaattctctgggtgtcccagtgagtggtggctttttttctttccacattggcacattcacttctcccactcttggcatgtaagaaataagcatttacataattggaaaaatctggatttctgatgccaaagggttaaagcttcttggatttcatttcattgatatacagccactattttatttttgatcagtggcctttgggccactgttcagggtactgaccatcagtgtcagcattagggttttggttttgtttcttttgggtctttcttttttggcacatgtgaatcttgtttgtgtaaaatgaaattactttctcttgttctctgatgatgggtttaaaattaaaagagcatccggttttggtatggggatgatccaggattatgttgtgactgatacatattagttacttgtgctttttttttttttttggatctttgcaagggcaaaactacaagtaacgagttttatataattaatttaaatttgttacaggttttcatgttcaggataaaccatacttccaccttgggtgagaacacttgcaacagtttattaatgaggtgactttcaccttaggacaactgttgcatgccaagttttttgtgtgtgtgaaacacttcaaaactgatttaaaagatgtaaatttaaaattggttgtatctaatatgccccaggttcggtaaataaacaattctttttaaaaacag

SEQ ID NO: 457714 - DNA, 1023 bp, Homo sapiens
ggaccggctatcacattatccactaaagattcatttttgttgagtccttatgagaaacagcagtatgaatcttgacggtttctgcccgtcctaatggcagagctctctgacttgggtgtatgctgccaggctgggtactttcatactttgttttcttgttttgctttaaaactacgactcagcatacattttcccacatacatttttacattgtaccttaggactcagtcatctccacttaaattgatgacacaagcagctaataaccatttctgggtttctgcctaaccccctaattgtctgttaaagccaattctctgggtgtcccagtgagtggtggctttttttctttccacattggcacattcacttctcccactcttggcatgtaagaaataagcatttacataattggaaaaatctggatttctgatgccaaagggttaaagcttcttggatttcatttcattgatatacagccactattttatttttgatcagtggcctttgggccactgttcagggtactgaccatcagtgtcagcattagggttttggttttgtttcttttgggtctttcttttttggcacatgtgaatcttgtttgtgtaaaatgaaattactttctcttgttctctgatgatgggtttaaaattaaaagagcatccggttttggtatggggatgatccaggattatgttgtgactgatacatattagttacttgtgctttttttttttttttggatctttgcaagggcaaaactacaagtaacgagttttatataattaatttaaatttgttacaggttttcatgttcaggataaaccatacttccaccttgggtgagaacacttgcaacagtttattaatgaggtgactttcaccttaggacaactgttgcatgccaagttttttgtgtgtgtgaaacacttcaaaactgatttaaaagatgtaaatttaaaattggttgtatctaatatgccccaggttcggtaaataaacaattctttttaaaaacag

SEQ ID NO: 457715 - DNA, 1182 bp, Homo sapiens
ctggttggccctactgggaaaaaaaaaaaaaaaaaaaaagggcggcggtggctgagaaggcagcggggcggcggcggcggcggcggcggctgtggaggccgcagtccgggtcctggcttcggcctcagccccaccatggtgacgcttgctgaactgctggtgctcctggccgctctcctggccacggtctcgggctatttcgttagcatcgacgcccatgctgaagagtgcttctttgagcgggtcacctcgggcaccaagatgggcctcatcttcgaggtggcggagggcggcttcctggacatcgacgtggagattacaggaccagataacaaaggaatttacaaaggagacagagaatccagtgggaaatacacatttgctgctcacatggatggaacatacaaattttgttttagtaaccggatgtccaccatgactccaaaaatagtgatgttcaccattgatattggggaggctccaaaaggacaagatatggaaacagaagctcaccagaacaagctagaagaaatgatcaatgagctagcagtggcgatgacagctgtaaagcacgaacaggaatacatggaagtccgggagagaatacacagagccatcaacgacaacacaaacagcagagtggtcctttggtccttctttgaagctcttgttctagttgccatgacattgggacagatctactacctgaagagattttttgaagtccggagagttgtttaaaaagcctcttcctgatgatcccaactcagaattcactgtttaccaaacaccttggtcataataatgtcattagtttctccatttttattttctgaactgtacattcacaacttatgtttctttgagattaatagatattgggggaaaaacgcctttttaggaaaattatagtgaaaatttgacagttgattggcataatttcttgtttgaatgctgcctccattatattttcatgttcaggataaaccatacttccaccttgggtgagaacacttgcaacagtttattaatgaggtgactttcaccttaggacaactgttgcatgccaagttttttgtgtgtgtgaaacacttcaaaactgatttaaaagatgtaaatttaaaattggttgtatctaatatgccccaggttcggtaaataaacaattctttttaaaaacag

SEQ ID NO: 457716 - DNA, 918 bp, Homo sapiens
ctggttggccctactgggaaaaaaaaaaaaaaaaaaaaagggcggcggtggctgagaaggcagcggggcggcggcggcggcggcggcggctgtggaggccgcagtccgggtcctggcttcggcctcagccccaccatggtgacgcttgctgaactgctggtgctcctggccgctctcctggccacggtctcgggctatttcgttagcatcgacgcccatgctgaagagtgcttctttgagcgggtcacctcgggcaccaagatgggcctcatcttcgaggtggcggagggcggcttcctggacatcgacgtggagattacaggaccagataacaaaggaatttacaaaggagacagagaatccagtgggaaatacacatttgctgctcacatggatggaacatacaaattttgttttagtaaccggatgtccaccatgactccaaaaatagtgatgttcaccattgatattggggaggctccaaaaggacaagatatggaaacagaagctcaccagaacaagctagaagaaatgatcaatgagctagcagtggcgatgacagctgtaaagcacgaacaggaatacatggaagtccgggagagaatacacagagccatcaacgacaacacaaacagcagagtggtcctttggtccttctttgaagctcttgttctagttgccatgacattgggacagatctactacctgaagagattttttgaagtccggagagttgtttaaaaagcctcttcctgatgatcccaactcagaattcactgtttaccaaacaccttggtcataataatgtcattagtttctccatttatatctattaatctcaaagaaacataagttgtgaatgtacagttcagaaaataaaaatggagaaactaatgacattatgtcgacgcggccgcg

SEQ ID NO: 457717 - DNA, 969 bp, Homo sapiens
ggaccggctatcacattatccactaaagattcatttttgttgagtccttatgagaaacagcagtatgaatcttgacggtttctgcccgtcctaatggcagagctctctgacttgggtgtatgctgccaggctgggtactttcatactttgttttcttgttttgctttaaaactacgactcagcatacattttcccacatacatttttacattgtaccttaggactcagtcatctccacttaaattgatgacacaagcagctaataaccatttctgggtttctgcctaaccccctaattgtctgttaaagccaattctctgggtgtcccagtgagtggtggctttttttctttccacattggcacattcacttctcccactcttggcatgtaagaaataagcatttacataattggaaaaatctggatttctgatgccaaagggttaaagcttcttggatttcatttcattgatatacagccactattttatttttgatcagtggcctttgggccactgttcagggtactgaccatcagtgtcagcattagggttttggttttgtttcttttgggtctttcttttttggcacatgtgaatcttgtttgtgtaaaatgaaattactttctcttgttctctgatgatgggtttaatgatacatattagttacttgtgctttttttttttttttggatctttgcaagggcaaaactacaagtaacgagttttatataattaatttaaatttgttacaggttttcatgttcaggataaaccatacttccaccttgggtgagaacacttgcaacagtttattaatgaggtgactttcaccttaggacaactgttgcatgccaagttttttgtgtgtgtgaaacacttcaaaactgatttaaaagatgtaaatttaaaattggttgtatctaatatgccccaggttcggtaaataaacaattctttttaaaaacag

SEQ ID NO: 457718 - DNA, 805 bp, Homo sapiens
ctggttggccctactgggaaaaaaaaaaaaaaaaaaaaagggcggcggtggctgagaaggcagcggggcggcggcggcggcggcggcggctgtggaggccgcagtccgggtcctggcttcggcctcagccccaccatggtgacgcttgctgaactgctggtgctcctggccgctctcctggccacggtctcgggctatttcgttagcatcgacgcccatgctgaagagtgcttctttgagcgggtcacctcgggcaccaagatgggcctcatcttcgaggtggcggagggcggcttcctggacatcgacgtggagattacaggaccagataacaaaggaatttacaaaggagacagagaatccagtgggaaatacacatttgctgctcacatggatggaacatacaaattttgttttagtaaccggatgtccaccatgactccaaaaatagtgatgttcaccattgatattggggaggctccaaaaggacaagatatggaaacagaagctcaccagaacaagctagaagaaatgatcaatgagctagcagtggcgatgacagctgtaaagcacgaacaggaatacatggaagtccgggagagaatacacagagccatcaacgacacacaacagcaaagggtctttggtcctcttgagctctgttctagtgcatgacctgggacgactatactgaaagattttgaagcgggattgttgctttctgagatccatcgatcctgttccacccggttacagtgatgtccccatatcgacggctcaacatgttttggtaactgggggcctt

SEQ ID NO: 457719 - DNA, 808 bp, Homo sapiens
  misc_feature (633)..(634): n is a, c, g, or t
  misc_feature (636)..(637): n is a, c, g, or t
ctggttggccctactgggaaaaaaaaaaaaaaaaaaaaagggcggcggtggctgagaaggcagcggggcggcggcggcggcggcggcggctgtggaggccgcagtccgggtcctggcttcggcctcagccccaccatggtgacgcttgctgaactgctggtgctcctggccgctctcctggccacggtctcgggctatttcgttagcatcgacgcccatgctgaagagtgcttctttgagcgggtcacctcgggcaccaagatgggcctcatcttcgaggtggcggagggcggcttcctggacatcgacgtggagattacaggaccagataacaaaggaatttacaaaggagacagagaatccagtgggaaatacacatttgctgctcacatggatggaacatacaaattttgttttagtaaccggatgtccaccatgactccaaaaatagtgatgttcaccattgatattggggaggctccaaaaggacaagatatggaaacagaagctcaccagaacaagctagaagaaatgatcaatgagctagcagtggcgatgacagctgtaaagcacgaacaggaatacatggaagtccgggagagaatacacagagccaaaaaaaaaaaaaaaaannannaaaaaaaaagagaataaaaaaaaagggggggctttttgtggggggggaaaaaaggagttaaaaaatgggctgtttaaaaattttttcgggacacccttttttaaaaggggaaaaaggcggccccaaaagagggggataaaattgaaaaggggtacggtaatgtgagaaaaa

SEQ ID NO: 457720 - DNA, 2151 bp, Homo sapiens
ctggttggccctactgggaaaaaaaaaaaaaaaaaaaaagggcggcggtggctgagaaggcagcggggcggcggcggcggcggcggcggctgtggaggccgcagtccgggtcctggcttcggcctcagccccaccatggtgacgcttgctgaactgctggtgctcctggccgctctcctggccacggtctcgggctatttcgttagcatcgacgcccatgctgaagagtgcttctttgagcgggtcacctcgggcaccaagatgggcctcatcttcgaggtggcggagggcggcttcctggacatcgacgtggagattacaggaccagataacaaaggaatttacaaaggagacagagaatccagtgggaaatacacatttgctgctcacatggatggaacatacaaattttgttttagtaaccggatgtccaccatgactccaaaaatagtgatgttcaccattgatattggggaggctccaaaaggacaagatatggaaacagaagctcaccagaacaagctagaagaaatgatcaatgagctagcagtggcgatgacagctgtaaagcacgaacaggaatacatggaagtccgggagagaatacacagagccatcaacgacaacacaaacagcagagtggtcctttggtccttctttgaagctcttgttctagttgccatgacattgggacagatctactacctgaagagattttttgaagtccggagagttgtttaaaaagcctcttcctgatgatcccaactcagaattcactgtttaccaaacaccttggtcataataatgtcattagtttctccatttttattttctgaactgtacattcacaacttatgtttctttgagattaatagatattgggggaaaaacgcctttttaggaaaattatagtgaaaatttgacagttgattggcataatttcttgtttgaatgctgcctccattatataggtccttccaggaactcaaacactgtaagtgaaatatgggagtatagtttttattatttcttcttttccttttgttttcataatataatgcagtttgttcaggaaatcagcacaaagcctgatagtactttactaaaatgactgcattctttggattccttcagtctatggttcaagtcactaaagattcatttttgttgagtccttatgagaaacagcagtatgaatcttgacggtttctgcccgtcctaatggcagagctctctgacttgggtgtatgctgccaggctgggtactttcatactttgttttcttgttttgctttaaaactacgactcagcatacattttcccacatacatttttacattgtaccttaggactcagtcatctccacttaaattgatgacacaagcagctaataaccatttctgggtttctgcctaaccccctaattgtctgttaaagccaattctctgggtgtcccagtgagtggtggctttttttctttccacattggcacattcacttctcccactcttggcatgtaagaaataagcatttacataattggaaaaatctggatttctgatgccaaagggttaaagcttcttggatttcatttcattgatatacagccactattttatttttgatcagtggcctttgggccactgttcagggtactgaccatcagtgtcagcattagggttttggttttgtttcttttgggtctttcttttttggcacatgtgaatcttgtttgtgtaaaatgaaattactttctcttgttctctgatgatgggtttaaaattaaaagagcatccggttttggtatggggatgatccaggattatgttgtgactgatacatattagttacttgtgctttttttttttttttggatctttgcaagggcaaaactacaagtaacgagttttatataattaatttaaatttgttacaggttttcatgttcaggataaaccatacttccaccttgggtgagaacacttgcaacagtttattaatgaggtgactttcaccttaggacaactgttgcatgccaagttttttgtgtgtgtgaaacacttcaaaactgatttaaaagatgtaaatttaaaattggttgtatctaatatgccccaggttcggtaaataaacaattctttttaaaaacag

SEQ ID NO: 457721 - DNA, 2598 bp, Homo sapiens
ctggttggccctactgggaaaaaaaaaaaaaaaaaaaaagggcggcggtggctgagaaggcagcggggcggcggcggcggcggcggcggctgtggaggccgcagtccgggtcctggcttcggcctcagccccaccatggtgacgcttgctgaactgctggtgctcctggccgctctcctggccacggtctcgggctatttcgttagcatcgacgcccatgctgaagagtgcttctttgagcgggtcacctcgggcaccaagatgggcctcatcttcgaggtggcggagggcggcttcctggacatcgacgtggagattacaggaccagataacaaaggaatttacaaaggagacagagaatccagtgggaaatacacatttgctgctcacatggatggaacatacaaattttgttttagtaaccggatgtccaccatgactccaaaaatagtgatgttcaccattgatattggggaggctccaaaaggacaagatatggaaacagaagctcaccagaacaagctagaagaaatgatcaatgagctagcagtggcgatgacagctgtaaagcacgaacaggaatacatggaagtccgggagagaatacacagagccatcaacgacaacacaaacagcagagtggtcctttggtccttctttgaagctcttgttctagttgccatgacattgggacagatctactacctgaagagattttttgaagtccggagagttgtttaaaaagcctcttcctgatgatcccaactcagaattcactgtttaccaaacaccttggtcataataatgtcattagtttctccatttttattttctgaactgtacattcacaacttatgtttctttgagattaatagatattgggggaaaaacgcctttttaggaaaattatagtgaaaatttgacagttgattggcataatttcttgtttgaatgctgcctccattatataggtccttccaggaactcaaacactgtaagtgaaatatgggagtatagtttttattatttcttcttttccttttgttttcataatataatgcagtttgttcaggaaatcagcacaaagcctgatagtactttactaaaatgactgcattctttggattccttcagtctatggttcaagtcactaaagattcatttttgttgagtccttatgagaaacagcagtatgaatcttgacggtttctgcccgtcctaatggcagagctctctgacttgggtgtatgctgccaggctgggtactttcatactttgttttcttgttttgctttaaaactacgactcagcatacattttcccacatacatttttacattgtaccttaggactcagtcatctccacttaaattgatgacacaagcagctaataaccatttctgggtttctgcctaaccccctaattgtctgttaaagccaattctctgggtgtcccagtgagtggtggctttttttctttccacattggcacattcacttctcccactcttggcatgtaagaaataagcatttacataattggaaaaatctggatttctgatgccaaagggttaaagcttcttggatttcatttcattgatatacagccactattttatttttgatcagtggcctttgggccactgttcagggtactgaccatcagtgtcagcattagggttttggttttgtttcttttgggtctttcttttttggcacatgtgaatcttgtttgtgtaaaatgaaattactttctcttgttctctgatgatgggtttaaaattaaaagagcatccggttttggtatggggatgatccaggattatgttgtgactgatacatattagttacttgtgctttttttttttttttggatctttgcaagggcaaaactacaagtaacgagttttatataattaatttaaatttgttacaggttttcatgttcaggataaaccatacttccaccttgggtgagaacacttgcaacagtttattaatgaggtgactttcaccttaggacaactgttgcatgccaagttttttgtgtgtgtgaaacacttcaaaactgatttaaaagatgtaaatttaaaattggttgtatctaatatgccccaggttcggtaaataaacaattctttttaaaaacagtattctgtgttttatatattgacagctaatccacattttttacacaccaactttctgttcttatttgacatgagacatgttcatgttttctgagtatttatacctattacgtctgttactttttaattctataaacttgaggatagtgaatggtaccaagttttagtttctgcataggttttccagtgtggcttctctgatggatcagtgctaaaatcttaagtatttttctatttgggaaaaaagggttgaattattttcacttgcccacgtagtttatgaatgtgggaaatagcttcaaagacagattaaatgatttgcccaaggccacagaaaagagtgaaaggtggaaccggagactagatcaccacctgtagaaactgttcttcctctgtgaaactaacggcctgctggtaataaaagtagctaccatttcttgaaaaaaaa

SEQ ID NO: 457722 - DNA, 2343 bp, Homo sapiens
  misc_feature (2168)..(2169): n is a, c, g, or t
  misc_feature (2171)..(2172): n is a, c, g, or t
ctggttggccctactgggaaaaaaaaaaaaaaaaaaaaagggcggcggtggctgagaaggcagcggggcggcggcggcggcggcggcggctgtggaggccgcagtccgggtcctggcttcggcctcagccccaccatggtgacgcttgctgaactgctggtgctcctggccgctctcctggccacggtctcgggctatttcgttagcatcgacgcccatgctgaagagtgcttctttgagcgggtcacctcgggcaccaagatgggcctcatcttcgaggtggcggagggcggcttcctggacatcgacgtggagattacaggaccagataacaaaggaatttacaaaggagacagagaatccagtgggaaatacacatttgctgctcacatggatggaacatacaaattttgttttagtaaccggatgtccaccatgactccaaaaatagtgatgttcaccattgatattggggaggctccaaaaggacaagatatggaaacagaagctcaccagaacaagctagaagaaatgatcaatgagctagcagtggcgatgacagctgtaaagcacgaacaggaatacatggaagtccgggagagaatacacagagccatcaacgacaacacaaacagcagagtggtcctttggtccttctttgaagctcttgttctagttgccatgacattgggacagatctactacctgaagagattttttgaagtccggagagttgtttaaaaagcctcttcctgatgatcccaactcagaattcactgtttaccaaacaccttggtcataataatgtcattagtttctccatttttattttctgaactgtacattcacaacttatgtttctttgagattaatagatattgggggaaaaacgcctttttaggaaaattatagtgaaaatttgacagttgattggcataatttcttgtttgaatgctgcctccattatataggtccttccaggaactcaaacactgtaagtgaaatatgggagtatagtttttattatttcttcttttccttttgttttcataatataatgcagtttgttcaggaaatcagcacaaagcctgatagtactttactaaaatgactgcattctttggattccttcagtctatggttcaagtcactaaagattcatttttgttgagtccttatgagaaacagcagtatgaatcttgacggtttctgcccgtcctaatggcagagctctctgacttgggtgtatgctgccaggctgggtactttcatactttgttttcttgttttgctttaaaactacgactcagcatacattttcccacatacatttttacattgtaccttaggactcagtcatctccacttaaattgatgacacaagcagctaataaccatttctgggtttctgcctaaccccctaattgtctgttaaagccaattctctgggtgtcccagtgagtggtggctttttttctttccacattggcacattcacttctcccactcttggcatgtaagaaataagcatttacataattggaaaaatctggatttctgatgccaaagggttaaagcttcttggatttcatttcattgatatacagccactattttatttttgatcagtggcctttgggccactgttcagggtactgaccatcagtgtcagcattagggttttggttttgtttcttttgggtctttcttttttggcacatgtgaatcttgtttgtgtaaaatgaaattactttctcttgttctctgatgatgggtttaaaattaaaagagcatccggttttggtatggggatgatccaggattatgttgtgactgatacatattagttacttgtgctttttttttttttttggatctttgcaagggcaaaactacaagtaacgagttttatataattaatttaaatttgttacaggttttcatgttcaggataaaccatacttccaccttgggtgagaacacttgcaacagtttattaatgaggtgactttcaccttaggacaactgttgcatgccaagttttttgtgtgtgtgaaacacttcaaaactgatttaaaagatgtaaatttaaaattggttgtatctaatatgccccaggttcggtaaataaacaattctttttaaaaacagaaaaaaaaaaaaaaaannannaaaaaaaaagagaataaaaaaaaagggggggctttttgtggggggggaaaaaaggagttaaaaaatgggctgtttaaaaattttttcgggacacccttttttaaaaggggaaaaaggcggccccaaaagagggggataaaattgaaaaggggtacggtaatgtgagaaaaa

SEQ ID NO: 457723 - DNA, 2097 bp, Homo sapiens
ctggttggccctactgggaaaaaaaaaaaaaaaaaaaaagggcggcggtggctgagaaggcagcggggcggcggcggcggcggcggcggctgtggaggccgcagtccgggtcctggcttcggcctcagccccaccatggtgacgcttgctgaactgctggtgctcctggccgctctcctggccacggtctcgggctatttcgttagcatcgacgcccatgctgaagagtgcttctttgagcgggtcacctcgggcaccaagatgggcctcatcttcgaggtggcggagggcggcttcctggacatcgacgtggagattacaggaccagataacaaaggaatttacaaaggagacagagaatccagtgggaaatacacatttgctgctcacatggatggaacatacaaattttgttttagtaaccggatgtccaccatgactccaaaaatagtgatgttcaccattgatattggggaggctccaaaaggacaagatatggaaacagaagctcaccagaacaagctagaagaaatgatcaatgagctagcagtggcgatgacagctgtaaagcacgaacaggaatacatggaagtccgggagagaatacacagagccatcaacgacaacacaaacagcagagtggtcctttggtccttctttgaagctcttgttctagttgccatgacattgggacagatctactacctgaagagattttttgaagtccggagagttgtttaaaaagcctcttcctgatgatcccaactcagaattcactgtttaccaaacaccttggtcataataatgtcattagtttctccatttttattttctgaactgtacattcacaacttatgtttctttgagattaatagatattgggggaaaaacgcctttttaggaaaattatagtgaaaatttgacagttgattggcataatttcttgtttgaatgctgcctccattatataggtccttccaggaactcaaacactgtaagtgaaatatgggagtatagtttttattatttcttcttttccttttgttttcataatataatgcagtttgttcaggaaatcagcacaaagcctgatagtactttactaaaatgactgcattctttggattccttcagtctatggttcaagtcactaaagattcatttttgttgagtccttatgagaaacagcagtatgaatcttgacggtttctgcccgtcctaatggcagagctctctgacttgggtgtatgctgccaggctgggtactttcatactttgttttcttgttttgctttaaaactacgactcagcatacattttcccacatacatttttacattgtaccttaggactcagtcatctccacttaaattgatgacacaagcagctaataaccatttctgggtttctgcctaaccccctaattgtctgttaaagccaattctctgggtgtcccagtgagtggtggctttttttctttccacattggcacattcacttctcccactcttggcatgtaagaaataagcatttacataattggaaaaatctggatttctgatgccaaagggttaaagcttcttggatttcatttcattgatatacagccactattttatttttgatcagtggcctttgggccactgttcagggtactgaccatcagtgtcagcattagggttttggttttgtttcttttgggtctttcttttttggcacatgtgaatcttgtttgtgtaaaatgaaattactttctcttgttctctgatgatgggtttaatgatacatattagttacttgtgctttttttttttttttggatctttgcaagggcaaaactacaagtaacgagttttatataattaatttaaatttgttacaggttttcatgttcaggataaaccatacttccaccttgggtgagaacacttgcaacagtttattaatgaggtgactttcaccttaggacaactgttgcatgccaagttttttgtgtgtgtgaaacacttcaaaactgatttaaaagatgtaaatttaaaattggttgtatctaatatgccccaggttcggtaaataaacaattctttttaaaaacag

SEQ ID NO: 457724 - DNA, 2126 bp, Homo sapiens
ctggttggccctactgggaaaaaaaaaaaaaaaaaaaaagggcggcggtggctgagaaggcagcggggcggcggcggcggcggcggcggctgtggaggccgcagtccgggtcctggcttcggcctcagccccaccatggtgacgcttgctgaactgctggtgctcctggccgctctcctggccacggtctcgggctatttcgttagcatcgacgcccatgctgaagagtgcttctttgagcgggtcacctcgggcaccaagatgggcctcatcttcgaggtggcggagggcggcttcctggacatcgacgtggagattacaggaccagataacaaaggaatttacaaaggagacagagaatccagtgggaaatacacatttgctgctcacatggatggaacatacaaattttgttttagtaaccggatgtccaccatgactccaaaaatagtgatgttcaccattgatattggggaggctccaaaaggacaagatatggaaacagaagctcaccagaacaagctagaagaaatgatcaatgagctagcagtggcgatgacagctgtaaagcacgaacaggaatacatggaatcaacgacaacacaaacagcagagtggtcctttggtccttctttgaagctcttgttctagttgccatgacattgggacagatctactacctgaagagattttttgaagtccggagagttgtttaaaaagcctcttcctgatgatcccaactcagaattcactgtttaccaaacaccttggtcataataatgtcattagtttctccatttttattttctgaactgtacattcacaacttatgtttctttgagattaatagatattgggggaaaaacgcctttttaggaaaattatagtgaaaatttgacagttgattggcataatttcttgtttgaatgctgcctccattatataggtccttccaggaactcaaacactgtaagtgaaatatgggagtatagtttttattatttcttcttttccttttgttttcataatataatgcagtttgttcaggaaatcagcacaaagcctgatagtactttactaaaatgactgcattctttggattccttcagtctatggttcaagtcactaaagattcatttttgttgagtccttatgagaaacagcagtatgaatcttgacggtttctgcccgtcctaatggcagagctctctgacttgggtgtatgctgccaggctgggtactttcatactttgttttcttgttttgctttaaaactacgactcagcatacattttcccacatacatttttacattgtaccttaggactcagtcatctccacttaaattgatgacacaagcagctaataaccatttctgggtttctgcctaaccccctaattgtctgttaaagccaattctctgggtgtcccagtgagtggtggctttttttctttccacattggcacattcacttctcccactcttggcatgtaagaaataagcatttacataattggaaaaatctggatttctgatgccaaagggttaaagcttcttggatttcatttcattgatatacagccactattttatttttgatcagtggcctttgggccactgttcagggtactgaccatcagtgtcagcattagggttttggttttgtttcttttgggtctttcttttttggcacatgtgaatcttgtttgtgtaaaatgaaattactttctcttgttctctgatgatgggtttaaaattaaaagagcatccggttttggtatggggatgatccaggattatgttgtgactgatacatattagttacttgtgctttttttttttttttggatctttgcaagggcaaaactacaagtaacgagttttatataattaatttaaatttgttacaggttttcatgttcaggataaaccatacttccaccttgggtgagaacacttgcaacagtttattaatgaggtgactttcaccttaggacaactgttgcatgccaagttttttgtgtgtgtgaaacacttcaaaactgatttaaaagatgtaaatttaaaattggttgtatctaatatgccccaggttcggtaaataaacaattctttttaaaaacag

SEQ ID NO: 457725 - DNA, 958 bp, Homo sapiens
  misc_feature (850)..(850): n is a, c, g, or t
  misc_feature (879)..(880): n is a, c, g, or t
  misc_feature (912)..(912): n is a, c, g, or t
  misc_feature (946)..(946): n is a, c, g, or t
  misc_feature (958)..(958): n is a, c, g, or t
ctggttggccctactgggaaaaaaaaaaaaaaaaaaaaagggcggcggtggctgagaaggcagcggggcggcggcggcggcggcggcggctgtggaggccgcagtccgggtcctggcttcggcctcagccccaccatggtgacgcttgctgaactgctggtgctcctggccgctctcctggccacggtctcgggctatttcgttagcatcgacgcccatgctgaagagtgcttctttgagcgggtcacctcgggcaccaagatgggcctcatcttcgaggtggcggagggcggcttcctggacatcgacgtggagattacaggaccagataacaaaggaatttacaaaggagacagagaatccagtgggaaatacacatttgctgctcacatggatggaacatacaaattttgttttagtaaccggatgtccaccatgactccaaaaatagtgatgttcaccattgatattggggaggctccaaaaggacaagatatggaaacagaagctcaccagaacaagctagaagaaatgatcaatgagctagcagtggcgatgacagctgtaaagcacgaacaggaatacatggaagtccgggagagaatacacagagccatcaacgacaacacaaacagcagagtggtcctttggtccttctttgaagctcttgttctagttgccatgacattgggacagatctactacctgaagagattttttgaagtccggagagttgtttaaaaagcctcttcctgatgatcccaactcagaattcactgtttaccaaacaccttggtcataataatgtcattagtttctccattttaatttttcctgaaactggtacaanttcacaaactttaaaggttttccttttgnngatttaattagattatttgggggggaaaaaanccccctttttttaagggaaaaattttttatgggnaaattttgacan

SEQ ID NO: 457726 - DNA, 951 bp, Homo sapiens
ctggttggccctactgggaaaaaaaaaaaaaaaaaaaaagggcggcggtggctgagaaggcagcggggcggcggcggcggcggcggcggctgtggaggccgcagtccgggtcctggcttcggcctcagccccaccatggtgacgcttgctgaactgctggtgctcctggccgctctcctggccacggtctcgggctatttcgttagcatcgacgcccatgctgaagagtgcttctttgagcgggtcacctcgggcaccaagatgggcctcatcttcgaggtggcggagggcggcttcctggacatcgacgtggagattacaggaccagataacaaaggaatttacaaaggagacagagaatccagtgggaaatacacatttgctgctcacatggatggaacatacaaattttgttttagtaaccggatgtccaccatgactccaaaaatagtgatgttcaccattgatattggggaggctccaaaaggacaagatatggaaacagaagctcaccagaacaagctagaagaaatgatcaatgagctagcagtggcgatgacagctgtaaagcacgaacaggaatacatggaagtccgggagagaatacacagagccatcaacgacaacacaaacagcagagtggtcctttggtccttctttgaagctcttgttctagttgccatgacattgggacagatctactacctgaagagattttttgaagtccggagagttgtttaaaaagcctcttcctgatgatcccaactcagaattcactgtttaccaaacaccttggtcataataatgtcattagtttctccatttcgcgcaggggttttccaactcagcaagttatgtttcgtacgagaagtatagagattggagtgcatgcagcttgactatagaaaatatccttccaatatgatcacttacgggctatgagttctctgg

SEQ ID NO: 457727 - DNA, 378 bp, Homo sapiens
ctggttggccctactgggaaaaaaaaaaaaaaaaaaaaagggcggcggtggctgagaaggcagcggggcggcggcggcggcggcggcggctgtggaggccgcagtccgggtcctggcttcggcctcagccccaccatggtgacgcttgctgaactgctggtgctcctggccgctctcctggccacggtctcgggctatttcgttagcatcgacgcccatgctgaagagtgcttctttgagcgggtcacctcgggcaccaagatgggcctcatcttcgaggtggcggagggcggcttcctggacatcgacgtggaggtgcgggctagctgcccgcagctgaggcttggtcgcgtggccactcggggattggtggcacct

SEQ ID NO: 457728 - DNA, 699 bp, Homo sapiens
  misc_feature (545)..(545): n is a, c, g, or t
gcttttctaaaaaaaaaaaaaaaaaaaaaaattggcggccgctccaactcagaatagaaacggttcctttttgtttttttaaaaatgatttttaaataccgttttttacaccgttctctcggtactttttttaagctaagtcagcattgtcttccagtgttaaaggcatccctcacctctgcattgaacttacgtatccatgccaaggaatggaatttccatcctgagccagttcagttaggtgtcaattgatactattttaattttttatgcaatctgatgagatgagctcagatttaaaaatctcaaaagcacgtttattgtaacaagaattgttatgtattaatactgcagttttcaataaagattgacttgtgttgcaaaaaaaaaaaaaaaaaaaaaaaaaaaaaaaaaaaaaaaagggggggggggtaaaaaaattccccgggggggccccattttgggtcccccgtttttttttgacccaagggcgcgcccaatagggggggggtattaaagaggaaaggggcggggcccgggttaancaacgtgcggtggggaacactcggcgtggggttctgtggaaggcccctcttcgtggggtgcacctattgggaccactactcaagagatagtcacggaattaacttacgtgtagcttgaacaacggattccggaaaaatcgtcacggtgttgatg

SEQ ID NO: 457729 - DNA, 660 bp, Homo sapiens
  misc_feature (628)..(628): n is a, c, g, or t
aaagaaggaaaccacaacacagaacttgcaagcaaatccacgctcccacatcccagggggcaaaaatccaagaggattgagagaaatatcagaaaaccctcttattcctactgccagcactggcctggggtccagacacttccaaggcctcctcaccacatccagggaggtggccccggctccacttccacagtaggaggacctgaggctcccacactggggtctttgcccttgtccagggatgcgtggtccatgctctgctgctccaagtctcagtgcatcaaccaccctgcctctctctgcaaggaacccacgcggtgcagaccagtgggcaaggcagctgggccagatctcaggccagccgtttgtgctcctagcagggttgctgtgctggccacacggagaggccctagagagcctcatggattgtaactaaagaagaaacggttcctttttgtttttttaaaaatgatttttaaataccgttttttacaccgttctctcggtactttttttaagctaagtcagcattgtcttccagtgttaaaggcatccctcacctctgcaaggaacccacgcgcgtgggttccttgcagagagagaagcctaaactgctaatctaccaagncactgtacagagagccacgcggggatcctcta

SEQ ID NO: 457730 - DNA, 390 bp, Homo sapiens
gttctctctatagtggagggtgtataaagcagagtggtctttatccacttttattaacacatctgaatgtgaaggtcaagagaggaaagtgatatgtcctaagtcagagtagagtcaacaagaaaataagacaaacagcgactgagcccctggtgtatactgggcattggccagctacgggggatatggagatgaagaaaacataacccttctgcaaggaacccacgcggtgcagaccagtgggcaaggcagctgggccagatctcaggccagccgtttgtgctcctagcagggttgctgtgctggccacacggagaggccctagagagcctcatggattgtaactaaagagcgtgggttccttgcagatggctcctagccttcataact

SEQ ID NO: 457731 - DNA, 5744 bp, Homo sapiens
ggagtctcgctctgtcgctaggctggagtgcagtggcatgatctcagctcactgcaactttgcctcccaggctcaagtgattctcctgcctcagcctcccgcatagcagggactacaggcgtgcgccaccacacccagctaatttttgtatttttagtagagacggggtttcaccatgttggccaggctggtctcaaactcctgacctcaggtgatctgcccacctcggcctcccaaagtgctgggattacaggagtgcaccaccgtacctggcctttccccttgcttttagtggacatatagctaacaatttttactccttagcttctgatggactgaggagaattgtgaaaaaaagtttatcatgccctggtttggcacccattaggacatcgagtgtcccttttctgttcttcgctggttgggggcagcatgaaatgcattgttttatagcagcctagagaaaggactctagctacctgctttttggggactggtactggagaaaaatctgagagcaaaagtgcttggctaaattcccttttttttcttttagtttttgaaatcatgaatcctgtttatagtcctggatcttctggggttccctatgcaaatgccaaaggaattggttatccagctggttttcccatgggctatgcagcagcagctcctgcctattctcctaacatgtatcctggagcgaatcctaccttccaaacaggttacactcctggcacaccttacaaagtgtcctgttcccccaccagcggggctgtgccaccgtactcctcctccccgaacccctaccagactgccgtgtaccctgtgcgaagtgcctacccccagcagagcccgtatgcacagcaaggcacgtactacacacagccgctgtatgcagcacctcctcacgtcatccaccacaccacggtggtgcagcccaacggcatgcctgcaacggtgtaccctgctcccatcccccctcctagaggcaacggggtcaccatgggcatggtggctgggaccaccatggccatgtcagcaggtaccctgctgactgctcactccccaactcctgtcgccccccacccggtcactgtgcccacgtaccgggccccaggaacgcccacttacagctatgtgccccctcagtggtgatcacctgcaaatgtttgaggacggagctgtgcagtcacattattggggattccacagctggtgctgcaggccttgcgcctccaaccaggactttcttcttaatgctctcgacacttagctaaacacgactatatcccggcccagcaggccccagcgccgttagtctccagctgactctgtgggttggtcttaaagcaaattctgttttgtggactgcctggcaattttttagctaactgtaatgataaaaagggagtattaatctattctgaatcatatctagttgaatgcatgtttaaaaaaacaaacacaaaaagcttgctcaatctacctgcagtgactgatgcaaaaccatcatatgcaaaatccaaaggaatggaaacgtattttacaacttgtatcactaatgcactgttgtaatgtatgcaaagtcttacagttataagtgttaaagtgaatttcttcatagagcatctgaaatatcttagatgattcttcaaccttttggggttgatgtgggttgccagttagggatgtggacattttagttttcagcgacctgtttctttggcactgactgtcctgggagggagttgcgaggtttgggagagagtagggaagccacagctgcttgggtgcagctggttcatggacatccctttgagtttaggcttggtggagtcagtggaacagggacatgcttaaagctcatcatgaaagattatggtagtgtggccagtgaaatttggggcgaggggggtggtttatgtgtcagcaaagcagtttctctgctatctaaattttcattacagttctcttagagagatgatgtttttatatgtctttattggaaaagtcctatgtaaaactaaattattttcctgggatggaagaaatgtgaaagagaaacagccatgcttgcaggaggtattgtcctctgctttatttagcttagaaaatcattcctttttttttttttttcctggagaaatgtttgaatcagctgaaaacaggtaggcattgctgtttttccccaacaaagaagggcaaaggtttcagctgtatgttatgaagaaagtggtatatttaagaatgagttaaaagggaacaaaactttatttaaaattcctccaatttcttgtagaaaggcagggccgtggatatgtctggaaatgtagaaacctgtagctgcttctgggatcacccacctgatggtggtgacttgtctgctgaggccggctggaggggacgcttagagatggggcgagggggaggccagtgtctgttgtctgcgagcctctcctgccatctcttttgcagctgagggcacttggcacaaagcaagcacagacagcagagagggccaggcagtgctggagtgcgtttgctggcagggtttattgtgggagaggaatttgagtttaggatctgaatcttgtacataagaaatgaaaaggcttccctccaccccgcccccaaaatatgcccgtcctgtatccatgagagtgcatgtcggttctcagtgagggtcagagtgggggtgggggatgtaaggcctgggtccctttcagcggcctctagggcaggagcgtgcgtcttcttcccagtgcagtggtggtttgagtgctgtgggctctggtggggagggggctctgctcctcttcatttgctggtagctgggtcagggcactggcgcccagtgaggatgcccactagcattctgccccagttggttggtggggggacacctgaccactgagcctttggtaaccttattttttatagtaagtacttcttataattttctttttcacatcttattttataagaagtttaggaatatttttgcatggatcattgtaaacagcagattctttattcctgatgtctattaacatagaatgtttactgataagtactttaaattgcttcatgagcacttaatccatcttagtgtctatgtgtgggggcagacatttaccgcaggcacacagtttgtgcccctttcttcaagtctctgttggtaattccatctgtttagtggatggttggcaggattagtaggttctaacggttccaggggttcagctgaccaagtagcagagaagtcttttttcccaattgagtgctaatagattaggataaaatactcacaatgttagtgtatgcttttaaaaagccccacacaacaaaatggaaacatacatgtacaactcctgtgagggctggagtcttggggttcaggaggaggttagaagttacaggcatctcttcaggcttgcttggtacttggcacacacaggatggtgttttaaagagtgggctgcaccccccacacgccatttacatcagcttcataaacacttttcttcctccctgtaacttaaccttttttcccttttatgaagttgagaggctttatgaaataagtttgcattgcacatccgtgcagaaatctttctgactttgaaatttttaggacgtcagctgtcagatacgaaaggtagatatcaggtaagaatctggacttaggaaatagtcacaaaactgtcataggttgtaattttatcaacattcgcttctagtaaaattaaagtcaattaagaaatagaacttgggtcaaaattctgttacaaagcttcataatttgtcccgaagcatatggtggagcattctgagaaatttgctttttgtgtgtttgacattcctaatttgggagtccttcagctgaattactattcttttagaagttgagacagcaggtaagcaaaggacctagttcatgtaaacatggacatcatgatggctatttaaaaaatatttgttctacaccttctcccctgaggcttggggagtgtgttcagccgctgcagtttctctgctcatggaggtcttgtttggatctgtgctggcggctgagcatttagtgtgagccagtgacccatgaacttgccgctctgtgagggccagagtcagggccagtcatggtaatgggcctgaaggcacttccagaaccttttatgtctctcgtgagccatctgttaagaacgttcttcttggtgtggtttgtaggcctacctgtcgctattctgggaaaccttcttgagtgctatgcaaatgtgttcacaggcaatgggggtggtcctgagccttggggtgggcacctggtcagtgagtgtcttgcccttccccagctgggcatacagtaccttgctctttctggtggcatcatctggctgtgatgaatgaggtctaggaaataatttgcatgtgtcttgggggacacaacagtaacgagaggaaatacattattacagcaacttgcgacgtactaatacctgtcagtgttggcccccgtaaggtatgtaaggcacctgtgagtgccagtgagtgctggtgaaaggccaacatgtactagttatgtaagtattggtgtctgctttaaaaaaggagacccagacttcacctgtcctttttaaacatttgagaacagtgttactctgagcagttgggccaccttcaccttatccgacagctgactgttggatgtgtccattgtcgccagtttggctgttgcccggacaggacaggacctccattgggcgcagcagcaggtggcaggggtgtggcttgaggtgggtggcagcgtctggtcctcctctctggtgctttctgagagggtctctaaagcagagtgtggttggcctgggggaaggcagagcacgtatttctcccctctagtacctctgcatttgtgagtgttccctctggctttctgaagggcagcagactcttgagtatactgcagaggacatgctttatcagtaggtcctgagggctccaggggctcaactgaccaagtaacacagaagttggggtatgtggcctatttgggtcggaaactgcatgtttcagaaagtttgtctctttttcctactcattatttgaagaagagagagcctgtggggatagccttatcttggtccacaggactgaagtgaagtcacttgggaaggggagacagaggatgagcggcgtctgtgtagggacccccccccgggcctgcagaagggtggtgtgctcccaggactggcatgacaggtgtctcctcctcaccacaggctgtgcccatgagtccctgtgcagaccagtgggcaaggcagctgggccagatctcaggccagccgtttgtgctcctagcagggttgctgtgctggccacacggagaggccctagagagcctcatggattgtaactaaagaagaaacggttcctttttgtttttttaaaaatgatttttaaataccgttttttacaccgttctctcggtactttttttaagctaagtcagcattgtcttccagtgttaaaggcatccctcacctctgcattgaacttacgtatccatgccaaggaatggaatttccatcctgagccagttcagttaggtgtcaattgatactattttaattttttatgcaatctgatgagatgagctcagatttaaaaatctcaaaagcacgtttattgtaacaagaattgttatgtattaatactgcagttttcaataaagattgacttgtgttgca

SEQ ID NO: 457732 - DNA, 5603 bp, Homo sapiens
ttctgagggaaagccaggcgtggtggctcacacctataatcccagcactttgggaggccgaggcgggtggatcaactgaaatcaggagttcaagaccagcctggctaacgtgatgaaaccccgtctctactaaaaatagaaaaattagccaggtgtggtgacacacacctgtaatcccagctcttcggaaggctgaggcaggagaatcgcttgaacctgggaggcagaggttgcagtgagccaagatcatgccattgcactccagcctgggcgatgaaagtgaaactctgtctcaaaagacgacaacgataaaaaaaacaaagttctgcgggaagaagacaactagagacatgctgttggccacacatagtgctcttggggctgcttaagtctgtggagttctggggaagaaggtaagagcgatggctttgcaggagctctagtgattgtcgctacttcagttgatgacatgagattgttctttatttttcttcagctggttttcccatgggctatgcagcagcagctcctgcctattctcctaacatgtatcctggagcgaatcctaccttccaaacaggttacactcctggcacaccttacaaagtgtcctgttcccccaccagcggggctgtgccaccgtactcctcctccccgaacccctaccagactgccgtgtaccctgtgcgaagtgcctacccccagcagagcccgtatgcacagcaaggcacgtactacacacagccgctgtatgcagcacctcctcacgtcatccaccacaccacggtggtgcagcccaacggcatgcctgcaacggtgtaccctgctcccatcccccctcctagaggcaacggggtcaccatgggcatggtggctgggaccaccatggccatgtcagcaggtaccctgctgactgctcactccccaactcctgtcgccccccacccggtcactgtgcccacgtaccgggccccaggaacgcccacttacagctatgtgccccctcagtggtgatcacctgcaaatgtttgaggacggagctgtgcagtcacattattggggattccacagctggtgctgcaggccttgcgcctccaaccaggactttcttcttaatgctctcgacacttagctaaacacgactatatcccggcccagcaggccccagcgccgttagtctccagctgactctgtgggttggtcttaaagcaaattctgttttgtggactgcctggcaattttttagctaactgtaatgataaaaagggagtattaatctattctgaatcatatctagttgaatgcatgtttaaaaaaacaaacacaaaaagcttgctcaatctacctgcagtgactgatgcaaaaccatcatatgcaaaatccaaaggaatggaaacgtattttacaacttgtatcactaatgcactgttgtaatgtatgcaaagtcttacagttataagtgttaaagtgaatttcttcatagagcatctgaaatatcttagatgattcttcaaccttttggggttgatgtgggttgccagttagggatgtggacattttagttttcagcgacctgtttctttggcactgactgtcctgggagggagttgcgaggtttgggagagagtagggaagccacagctgcttgggtgcagctggttcatggacatccctttgagtttaggcttggtggagtcagtggaacagggacatgcttaaagctcatcatgaaagattatggtagtgtggccagtgaaatttggggcgaggggggtggtttatgtgtcagcaaagcagtttctctgctatctaaattttcattacagttctcttagagagatgatgtttttatatgtctttattggaaaagtcctatgtaaaactaaattattttcctgggatggaagaaatgtgaaagagaaacagccatgcttgcaggaggtattgtcctctgctttatttagcttagaaaatcattcctttttttttttttttcctggagaaatgtttgaatcagctgaaaacaggtaggcattgctgtttttccccaacaaagaagggcaaaggtttcagctgtatgttatgaagaaagtggtatatttaagaatgagttaaaagggaacaaaactttatttaaaattcctccaatttcttgtagaaaggcagggccgtggatatgtctggaaatgtagaaacctgtagctgcttctgggatcacccacctgatggtggtgacttgtctgctgaggccggctggaggggacgcttagagatggggcgagggggaggccagtgtctgttgtctgcgagcctctcctgccatctcttttgcagctgagggcacttggcacaaagcaagcacagacagcagagagggccaggcagtgctggagtgcgtttgctggcagggtttattgtgggagaggaatttgagtttaggatctgaatcttgtacataagaaatgaaaaggcttccctccaccccgcccccaaaatatgcccgtcctgtatccatgagagtgcatgtcggttctcagtgagggtcagagtgggggtgggggatgtaaggcctgggtccctttcagcggcctctagggcaggagcgtgcgtcttcttcccagtgcagtggtggtttgagtgctgtgggctctggtggggagggggctctgctcctcttcatttgctggtagctgggtcagggcactggcgcccagtgaggatgcccactagcattctgccccagttggttggtggggggacacctgaccactgagcctttggtaaccttattttttatagtaagtacttcttataattttctttttcacatcttattttataagaagtttaggaatatttttgcatggatcattgtaaacagcagattctttattcctgatgtctattaacatagaatgtttactgataagtactttaaattgcttcatgagcacttaatccatcttagtgtctatgtgtgggggcagacatttaccgcaggcacacagtttgtgcccctttcttcaagtctctgttggtaattccatctgtttagtggatggttggcaggattagtaggttctaacggttccaggggttcagctgaccaagtagcagagaagtcttttttcccaattgagtgctaatagattaggataaaatactcacaatgttagtgtatgcttttaaaaagccccacacaacaaaatggaaacatacatgtacaactcctgtgagggctggagtcttggggttcaggaggaggttagaagttacaggcatctcttcaggcttgcttggtacttggcacacacaggatggtgttttaaagagtgggctgcaccccccacacgccatttacatcagcttcataaacacttttcttcctccctgtaacttaaccttttttcccttttatgaagttgagaggctttatgaaataagtttgcattgcacatccgtgcagaaatctttctgactttgaaatttttaggacgtcagctgtcagatacgaaaggtagatatcaggtaagaatctggacttaggaaatagtcacaaaactgtcataggttgtaattttatcaacattcgcttctagtaaaattaaagtcaattaagaaatagaacttgggtcaaaattctgttacaaagcttcataatttgtcccgaagcatatggtggagcattctgagaaatttgctttttgtgtgtttgacattcctaatttgggagtccttcagctgaattactattcttttagaagttgagacagcaggtaagcaaaggacctagttcatgtaaacatggacatcatgatggctatttaaaaaatatttgttctacaccttctcccctgaggcttggggagtgtgttcagccgctgcagtttctctgctcatggaggtcttgtttggatctgtgctggcggctgagcatttagtgtgagccagtgacccatgaacttgccgctctgtgagggccagagtcagggccagtcatggtaatgggcctgaaggcacttccagaaccttttatgtctctcgtgagccatctgttaagaacgttcttcttggtgtggtttgtaggcctacctgtcgctattctgggaaaccttcttgagtgctatgcaaatgtgttcacaggcaatgggggtggtcctgagccttggggtgggcacctggtcagtgagtgtcttgcccttccccagctgggcatacagtaccttgctctttctggtggcatcatctggctgtgatgaatgaggtctaggaaataatttgcatgtgtcttgggggacacaacagtaacgagaggaaatacattattacagcaacttgcgacgtactaatacctgtcagtgttggcccccgtaaggtatgtaaggcacctgtgagtgccagtgagtgctggtgaaaggccaacatgtactagttatgtaagtattggtgtctgctttaaaaaaggagacccagacttcacctgtcctttttaaacatttgagaacagtgttactctgagcagttgggccaccttcaccttatccgacagctgactgttggatgtgtccattgtcgccagtttggctgttgcccggacaggacaggacctccattgggcgcagcagcaggtggcaggggtgtggcttgaggtgggtggcagcgtctggtcctcctctctggtgctttctgagagggtctctaaagcagagtgtggttggcctgggggaaggcagagcacgtatttctcccctctagtacctctgcatttgtgagtgttccctctggctttctgaagggcagcagactcttgagtatactgcagaggacatgctttatcagtaggtcctgagggctccaggggctcaactgaccaagtaacacagaagttggggtatgtggcctatttgggtcggaaactgcatgtttcagaaagtttgtctctttttcctactcattatttgaagaagagagagcctgtggggatagccttatcttggtccacaggactgaagtgaagtcacttgggaaggggagacagaggatgagcggcgtctgtgtagggacccccccccgggcctgcagaagggtggtgtgctcccaggactggcatgacaggtgtctcctcctcaccacaggctgtgcccatgagtccctgtgcagaccagtgggcaaggcagctgggccagatctcaggccagccgtttgtgctcctagcagggttgctgtgctggccacacggagaggccctagagagcctcatggattgtaactaaagaagaaacggttcctttttgtttttttaaaaatgatttttaaataccgttttttacaccgttctctcggtactttttttaagctaagtcagcattgtcttccagtgttaaaggcatccctcacctctgcattgaacttacgtatccatgccaaggaatggaatttccatcctgagccagttcagttaggtgtcaattgatactattttaattttttatgcaatctgatgagatgagctcagatttaaaaatctcaaaagcacgtttattgtaacaagaattgttatgtattaatactgcagttttcaataaagattgacttgtgttgca

SEQ ID NO: 457733 - DNA, 6061 bp, Homo sapiens
  misc_feature (5907)..(5907): n is a, c, g, or t
ggagtctcgctctgtcgctaggctggagtgcagtggcatgatctcagctcactgcaactttgcctcccaggctcaagtgattctcctgcctcagcctcccgcatagcagggactacaggcgtgcgccaccacacccagctaatttttgtatttttagtagagacggggtttcaccatgttggccaggctggtctcaaactcctgacctcaggtgatctgcccacctcggcctcccaaagtgctgggattacaggagtgcaccaccgtacctggcctttccccttgcttttagtggacatatagctaacaatttttactccttagcttctgatggactgaggagaattgtgaaaaaaagtttatcatgccctggtttggcacccattaggacatcgagtgtcccttttctgttcttcgctggttgggggcagcatgaaatgcattgttttatagcagcctagagaaaggactctagctacctgctttttggggactggtactggagaaaaatctgagagcaaaagtgcttggctaaattcccttttttttcttttagtttttgaaatcatgaatcctgtttatagtcctggatcttctggggttccctatgcaaatgccaaaggaattggttatccagctggttttcccatgggctatgcagcagcagctcctgcctattctcctaacatgtatcctggagcgaatcctaccttccaaacaggttacactcctggcacaccttacaaagtgtcctgttcccccaccagcggggctgtgccaccgtactcctcctccccgaacccctaccagactgccgtgtaccctgtgcgaagtgcctacccccagcagagcccgtatgcacagcaaggcacgtactacacacagccgctgtatgcagcacctcctcacgtcatccaccacaccacggtggtgcagcccaacggcatgcctgcaacggtgtaccctgctcccatcccccctcctagaggcaacggggtcaccatgggcatggtggctgggaccaccatggccatgtcagcaggtaccctgctgactgctcactccccaactcctgtcgccccccacccggtcactgtgcccacgtaccgggccccaggaacgcccacttacagctatgtgccccctcagtggtgatcacctgcaaatgtttgaggacggagctgtgcagtcacattattggggattccacagctggtgctgcaggccttgcgcctccaaccaggactttcttcttaatgctctcgacacttagctaaacacgactatatcccggcccagcaggccccagcgccgttagtctccagctgactctgtgggttggtcttaaagcaaattctgttttgtggactgcctggcaattttttagctaactgtaatgataaaaagggagtattaatctattctgaatcatatctagttgaatgcatgtttaaaaaaacaaacacaaaaagcttgctcaatctacctgcagtgactgatgcaaaaccatcatatgcaaaatccaaaggaatggaaacgtattttacaacttgtatcactaatgcactgttgtaatgtatgcaaagtcttacagttataagtgttaaagtgaatttcttcatagagcatctgaaatatcttagatgattcttcaaccttttggggttgatgtgggttgccagttagggatgtggacattttagttttcagcgacctgtttctttggcactgactgtcctgggagggagttgcgaggtttgggagagagtagggaagccacagctgcttgggtgcagctggttcatggacatccctttgagtttaggcttggtggagtcagtggaacagggacatgcttaaagctcatcatgaaagattatggtagtgtggccagtgaaatttggggcgaggggggtggtttatgtgtcagcaaagcagtttctctgctatctaaattttcattacagttctcttagagagatgatgtttttatatgtctttattggaaaagtcctatgtaaaactaaattattttcctgggatggaagaaatgtgaaagagaaacagccatgcttgcaggaggtattgtcctctgctttatttagcttagaaaatcattcctttttttttttttttcctggagaaatgtttgaatcagctgaaaacaggtaggcattgctgtttttccccaacaaagaagggcaaaggtttcagctgtatgttatgaagaaagtggtatatttaagaatgagttaaaagggaacaaaactttatttaaaattcctccaatttcttgtagaaaggcagggccgtggatatgtctggaaatgtagaaacctgtagctgcttctgggatcacccacctgatggtggtgacttgtctgctgaggccggctggaggggacgcttagagatggggcgagggggaggccagtgtctgttgtctgcgagcctctcctgccatctcttttgcagctgagggcacttggcacaaagcaagcacagacagcagagagggccaggcagtgctggagtgcgtttgctggcagggtttattgtgggagaggaatttgagtttaggatctgaatcttgtacataagaaatgaaaaggcttccctccaccccgcccccaaaatatgcccgtcctgtatccatgagagtgcatgtcggttctcagtgagggtcagagtgggggtgggggatgtaaggcctgggtccctttcagcggcctctagggcaggagcgtgcgtcttcttcccagtgcagtggtggtttgagtgctgtgggctctggtggggagggggctctgctcctcttcatttgctggtagctgggtcagggcactggcgcccagtgaggatgcccactagcattctgccccagttggttggtggggggacacctgaccactgagcctttggtaaccttattttttatagtaagtacttcttataattttctttttcacatcttattttataagaagtttaggaatatttttgcatggatcattgtaaacagcagattctttattcctgatgtctattaacatagaatgtttactgataagtactttaaattgcttcatgagcacttaatccatcttagtgtctatgtgtgggggcagacatttaccgcaggcacacagtttgtgcccctttcttcaagtctctgttggtaattccatctgtttagtggatggttggcaggattagtaggttctaacggttccaggggttcagctgaccaagtagcagagaagtcttttttcccaattgagtgctaatagattaggataaaatactcacaatgttagtgtatgcttttaaaaagccccacacaacaaaatggaaacatacatgtacaactcctgtgagggctggagtcttggggttcaggaggaggttagaagttacaggcatctcttcaggcttgcttggtacttggcacacacaggatggtgttttaaagagtgggctgcaccccccacacgccatttacatcagcttcataaacacttttcttcctccctgtaacttaaccttttttcccttttatgaagttgagaggctttatgaaataagtttgcattgcacatccgtgcagaaatctttctgactttgaaatttttaggacgtcagctgtcagatacgaaaggtagatatcaggtaagaatctggacttaggaaatagtcacaaaactgtcataggttgtaattttatcaacattcgcttctagtaaaattaaagtcaattaagaaatagaacttgggtcaaaattctgttacaaagcttcataatttgtcccgaagcatatggtggagcattctgagaaatttgctttttgtgtgtttgacattcctaatttgggagtccttcagctgaattactattcttttagaagttgagacagcaggtaagcaaaggacctagttcatgtaaacatggacatcatgatggctatttaaaaaatatttgttctacaccttctcccctgaggcttggggagtgtgttcagccgctgcagtttctctgctcatggaggtcttgtttggatctgtgctggcggctgagcatttagtgtgagccagtgacccatgaacttgccgctctgtgagggccagagtcagggccagtcatggtaatgggcctgaaggcacttccagaaccttttatgtctctcgtgagccatctgttaagaacgttcttcttggtgtggtttgtaggcctacctgtcgctattctgggaaaccttcttgagtgctatgcaaatgtgttcacaggcaatgggggtggtcctgagccttggggtgggcacctggtcagtgagtgtcttgcccttccccagctgggcatacagtaccttgctctttctggtggcatcatctggctgtgatgaatgaggtctaggaaataatttgcatgtgtcttgggggacacaacagtaacgagaggaaatacattattacagcaacttgcgacgtactaatacctgtcagtgttggcccccgtaaggtatgtaaggcacctgtgagtgccagtgagtgctggtgaaaggccaacatgtactagttatgtaagtattggtgtctgctttaaaaaaggagacccagacttcacctgtcctttttaaacatttgagaacagtgttactctgagcagttgggccaccttcaccttatccgacagctgactgttggatgtgtccattgtcgccagtttggctgttgcccggacaggacaggacctccattgggcgcagcagcaggtggcaggggtgtggcttgaggtgggtggcagcgtctggtcctcctctctggtgctttctgagagggtctctaaagcagagtgtggttggcctgggggaaggcagagcacgtatttctcccctctagtacctctgcatttgtgagtgttccctctggctttctgaagggcagcagactcttgagtatactgcagaggacatgctttatcagtaggtcctgagggctccaggggctcaactgaccaagtaacacagaagttggggtatgtggcctatttgggtcggaaactgcatgtttcagaaagtttgtctctttttcctactcattatttgaagaagagagagcctgtggggatagccttatcttggtccacaggactgaagtgaagtcacttgggaaggggagacagaggatgagcggcgtctgtgtagggacccccccccgggcctgcagaagggtggtgtgctcccaggactggcatgacaggtgtctcctcctcaccacaggctgtgcccatgagtccctgtgcagaccagtgggcaaggcagctgggccagatctcaggccagccgtttgtgctcctagcagggttgctgtgctggccacacggagaggccctagagagcctcatggattgtaactaaagaagaaacggttcctttttgtttttttaaaaatgatttttaaataccgttttttacaccgttctctcggtactttttttaagctaagtcagcattgtcttccagtgttaaaggcatccctcacctctgcattgaacttacgtatccatgccaaggaatggaatttccatcctgagccagttcagttaggtgtcaattgatactattttaattttttatgcaatctgatgagatgagctcagatttaaaaatctcaaaagcacgtttattgtaacaagaattgttatgtattaatactgcagttttcaataaagattgacttgtgttgcaaaaaaaaaaaaaaaaaaaaaaaaaaaaaaaaaaaaaaaagggggggggggtaaaaaaattccccgggggggccccattttgggtcccccgtttttttttgacccaagggcgcgcccaatagggggggggtattaaagaggaaaggggcggggcccgggttaancaacgtgcggtggggaacactcggcgtggggttctgtggaaggcccctcttcgtggggtgcacctattgggaccactactcaagagatagtcacggaattaacttacgtgtagcttgaacaacggattccggaaaaatcgtcacggtgttgatg

SEQ ID NO: 457734 - DNA, 5690 bp, Homo sapiens
ggagtctcgctctgtcgctaggctggagtgcagtggcatgatctcagctcactgcaactttgcctcccaggctcaagtgattctcctgcctcagcctcccgcatagcagggactacaggcgtgcgccaccacacccagctaatttttgtatttttagtagagacggggtttcaccatgttggccaggctggtctcaaactcctgacctcaggtgatctgcccacctcggcctcccaaagtgctgggattacaggagtgcaccaccgtacctggcctttccccttgcttttagtggacatatagctaacaatttttactccttagcttctgatggactgaggagaattgtgaaaaaaagtttatcatgccctggtttggcacccattaggacatcgagtgtcccttttctgttcttcgctggttgggggcagcatgaaatgcattgttttatagcagcctagagaaaggactctagctacctgctttttggggactggtactggagaaaaatctgagagcaaaagtgcttggctaaattcccttttttttcttttagtttttgaaatcatgaatcctgtttatagtcctggatcttctggggttccctatgcaaatgccaaaggaattggttatccagctggttttcccatgggctatgcagcagcagctcctgcctattctcctaacatgtatcctggagcgaatcctaccttccaaacaggttacactcctggcacaccttacaaagtgtcctgttcccccaccagcggggctgtgccaccgtactcctcctccccgaacccctaccagactgccgtgtaccctgtgcgaagtgcctacccccagcagagcccgtatgcacagcaaggcacgtactacacacagccgctgtatgcagcacctcctcacgtcatccaccacaccacggtggtgcagcccaacggcatgcctgcaacggtgtaccctgctcccatcccccctcctagaggcaacggggtcaccatgggcatggtggctgggaccaccatggccatgtcagcaggtaccctgctgactgctcactccccaactcctgtcgccccccacccggtcactgtgcccacgtaccgggccccaggaacgcccacttacagctatgtgccccctcagtggtgatcacctgcaaatgtttgaggacggagctgtgcagtcacattattggggattccacagctggtgctgcaggccttgcgcctccaaccaggactttcttcttaatgctctcgacacttagctaaacacgactatatcccggcccagcaggccccagcgccgttagtctccagctgactctgtgggttggtcttaaagcaaattctgttttgtggactgcctggcaattttttagctaactgtaatgataaaaagggagtattaatctattctgaatcatatctagttgaatgcatgtttaaaaaaacaaacacaaaaagcttgctcaatctacctgcagtgactgatgcaaaaccatcatatgcaaaatccaaaggaatggaaacgtattttacaacttgtatcactaatgcactgttgtaatgtatgcaaagtcttacagttataagtgttaaagtgaatttcttcatagagcatctgaaatatcttagatgattcttcaaccttttggggttgatgtgggttgccagttagggatgtggacattttagttttcagcgacctgtttctttggcactgactgtcctgggagggagttgcgaggtttgggagagagtagggaagccacagctgcttgggtgcagctggttcatggacatccctttgagtttaggcttggtggagtcagtggaacagggacatgcttaaagctcatcatgaaagattatggtagtgtggccagtgaaatttggggcgaggggggtggtttatgtgtcagcaaagcagtttctctgctatctaaattttcattacagttctcttagagagatgatgtttttatatgtctttattggaaaagtcctatgtaaaactaaattattttcctgggatggaagaaatgtgaaagagaaacagccatgcttgcaggaggtattgtcctctgctttatttagcttagaaaatcattcctttttttttttttttcctggagaaatgtttgaatcagctgaaaacaggtaggcattgctgtttttccccaacaaagaagggcaaaggtttcagctgtatgttatgaagaaagtggtatatttaagaatgagttaaaagggaacaaaactttatttaaaattcctccaatttcttgtagaaaggcagggccgtggatatgtctggaaatgtagaaacctgtagctgcttctgggatcacccacctgatggtggtgacttgtctgctgaggccggctggaggggacgcttagagatggggcgagggggaggccagtgtctgttgtctgcgagcctctcctgccatctcttttgcagctgagggcacttggcacaaagcaagcacagacagcagagagggccaggcagtgctggagtgcgtttgctggcagggtttattgtgggagaggaatttgagtttaggatctgaatcttgtacataagaaatgaaaaggcttccctccaccccgcccccaaaatatgcccgtcctgtatccatgagagtgcatgtcggttctcagtgagggtcagagtgggggtgggggatgtaaggcctgggtccctttcagcggcctctagggcaggagcgtgcgtcttcttcccagtgcagtggtggtttgagtgctgtgggctctggtggggagggggctctgctcctcttcatttgctggtagctgggtcagggcactggcgcccagtgaggatgcccactagcattctgccccagttggttggtggggggacacctgaccactgagcctttggtaaccttattttttatagtaagtacttcttataattttctttttcacatcttattttataagaagtttaggaatatttttgcatggatcattgtaaacagcagattctttattcctgatgtctattaacatagaatgtttactgataagtactttaaattgcttcatgagcacttaatccatcttagtgtctatgtgtgggggcagacatttaccgcaggcacacagtttgtgcccctttcttcaagtctctgttggtaattccatctgtttagtggatggttggcaggattagtaggttctaacggttccaggggttcagctgaccaagtagcagagaagtcttttttcccaattgagtgctaatagattaggataaaatactcacaatgttagtgtatgcttttaaaaagccccacacaacaaaatggaaacatacatgtacaactcctgtgagggctggagtcttggggttcaggaggaggttagaagttacaggcatctcttcaggcttgcttggtacttggcacacacaggatggtgttttaaagagtgggctgcaccccccacacgccatttacatcagcttcataaacacttttcttcctccctgtaacttaaccttttttcccttttatgaagttgagaggctttatgaaataagtttgcattgcacatccgtgcagaaatctttctgactttgaaatttttaggacgtcagctgtcagatacgaaaggtagatatcaggtaagaatctggacttaggaaatagtcacaaaactgtcataggttgtaattttatcaacattcgcttctagtaaaattaaagtcaattaagaaatagaacttggttctgagaaatttgctttttgtgtgtttgacattcctaatttgggagtccttcagctgaattactattcttttagaagttgagacagcaggtaagcaaaggacctagttcatgtaaacatggacatcatgatggctatttaaaaaatatttgttctacaccttctcccctgaggcttggggagtgtgttcagccgctgcagtttctctgctcatggaggtcttgtttggatctgtgctggcggctgagcatttagtgtgagccagtgacccatgaacttgccgctctgtgagggccagagtcagggccagtcatggtaatgggcctgaaggcacttccagaaccttttatgtctctcgtgagccatctgttaagaacgttcttcttggtgtggtttgtaggcctacctgtcgctattctgggaaaccttcttgagtgctatgcaaatgtgttcacaggcaatgggggtggtcctgagccttggggtgggcacctggtcagtgagtgtcttgcccttccccagctgggcatacagtaccttgctctttctggtggcatcatctggctgtgatgaatgaggtctaggaaataatttgcatgtgtcttgggggacacaacagtaacgagaggaaatacattattacagcaacttgcgacgtactaatacctgtcagtgttggcccccgtaaggtatgtaaggcacctgtgagtgccagtgagtgctggtgaaaggccaacatgtactagttatgtaagtattggtgtctgctttaaaaaaggagacccagacttcacctgtcctttttaaacatttgagaacagtgttactctgagcagttgggccaccttcaccttatccgacagctgactgttggatgtgtccattgtcgccagtttggctgttgcccggacaggacaggacctccattgggcgcagcagcaggtggcaggggtgtggcttgaggtgggtggcagcgtctggtcctcctctctggtgctttctgagagggtctctaaagcagagtgtggttggcctgggggaaggcagagcacgtatttctcccctctagtacctctgcatttgtgagtgttccctctggctttctgaagggcagcagactcttgagtatactgcagaggacatgctttatcagtaggtcctgagggctccaggggctcaactgaccaagtaacacagaagttggggtatgtggcctatttgggtcggaaactgcatgtttcagaaagtttgtctctttttcctactcattatttgaagaagagagagcctgtggggatagccttatcttggtccacaggactgaagtgaagtcacttgggaaggggagacagaggatgagcggcgtctgtgtagggacccccccccgggcctgcagaagggtggtgtgctcccaggactggcatgacaggtgtctcctcctcaccacaggctgtgcccatgagtccctgtgcagaccagtgggcaaggcagctgggccagatctcaggccagccgtttgtgctcctagcagggttgctgtgctggccacacggagaggccctagagagcctcatggattgtaactaaagaagaaacggttcctttttgtttttttaaaaatgatttttaaataccgttttttacaccgttctctcggtactttttttaagctaagtcagcattgtcttccagtgttaaaggcatccctcacctctgcattgaacttacgtatccatgccaaggaatggaatttccatcctgagccagttcagttaggtgtcaattgatactattttaattttttatgcaatctgatgagatgagctcagatttaaaaatctcaaaagcacgtttattgtaacaagaattgttatgtattaatactgcagttttcaataaagattgacttgtgttgca

SEQ ID NO: 457735 - DNA, 6021 bp, Homo sapiens
ggagtctcgctctgtcgctaggctggagtgcagtggcatgatctcagctcactgcaactttgcctcccaggctcaagtgattctcctgcctcagcctcccgcatagcagggactacaggcgtgcgccaccacacccagctaatttttgtatttttagtagagacggggtttcaccatgttggccaggctggtctcaaactcctgacctcaggtgatctgcccacctcggcctcccaaagtgctgggattacaggagtgcaccaccgtacctggcctttccccttgcttttagtggacatatagctaacaatttttactccttagcttctgatggactgaggagaattgtgaaaaaaagtttatcatgccctggtttggcacccattaggacatcgagtgtcccttttctgttcttcgctggttgggggcagcatgaaatgcattgttttatagcagcctagagaaaggactctagctacctgctttttggggactggtactggagaaaaatctgagagcaaaagtgcttggctaaattcccttttttttcttttagtttttgaaatcatgaatcctgtttatagtcctggatcttctggggttccctatgcaaatgccaaaggaattggttatccagctggttttcccatgggctatgcagcagcagctcctgcctattctcctaacatgtatcctggagcgaatcctaccttccaaacaggttacactcctggcacaccttacaaagtgtcctgttcccccaccagcggggctgtgccaccgtactcctcctccccgaacccctaccagactgccgtgtaccctgtgcgaagtgcctacccccagcagagcccgtatgcacagcaaggcacgtactacacacagccgctgtatgcagcacctcctcacgtcatccaccacaccacggtggtgcagcccaacggcatgcctgcaacggtgtaccctgctcccatcccccctcctagaggcaacggggtcaccatgggcatggtggctgggaccaccatggccatgtcagcaggtaccctgctgactgctcactccccaactcctgtcgccccccacccggtcactgtgcccacgtaccgggccccaggaacgcccacttacagctatgtgccccctcagtggtgatcacctgcaaatgtttgaggacggagctgtgcagtcacattattggggattccacagctggtgctgcaggccttgcgcctccaaccaggactttcttcttaatgctctcgacacttagctaaacacgactatatcccggcccagcaggccccagcgccgttagtctccagctgactctgtgggttggtcttaaagcaaattctgttttgtggactgcctggcaattttttagctaactgtaatgataaaaagggagtattaatctattctgaatcatatctagttgaatgcatgtttaaaaaaacaaacacaaaaagcttgctcaatctacctgcagtgactgatgcaaaaccatcatatgcaaaatccaaaggaatggaaacgtattttacaacttgtatcactaatgcactgttgtaatgtatgcaaagtcttacagttataagtgttaaagtgaatttcttcatagagcatctgaaatatcttagatgattcttcaaccttttggggttgatgtgggttgccagttagggatgtggacattttagttttcagcgacctgtttctttggcactgactgtcctgggagggagttgcgaggtttgggagagagtagggaagccacagctgcttgggtgcagctggttcatggacatccctttgagtttaggcttggtggagtcagtggaacagggacatgcttaaagctcatcatgaaagattatggtagtgtggccagtgaaatttggggcgaggggggtggtttatgtgtcagcaaagcagtttctctgctatctaaattttcattacagttctcttagagagatgatgtttttatatgtctttattggaaaagtcctatgtaaaactaaattattttcctgggatggaagaaatgtgaaagagaaacagccatgcttgcaggaggtattgtcctctgctttatttagcttagaaaatcattcctttttttttttttttcctggagaaatgtttgaatcagctgaaaacaggtaggcattgctgtttttccccaacaaagaagggcaaaggtttcagctgtatgttatgaagaaagtggtatatttaagaatgagttaaaagggaacaaaactttatttaaaattcctccaatttcttgtagaaaggcagggccgtggatatgtctggaaatgtagaaacctgtagctgcttctgggatcacccacctgatggtggtgacttgtctgctgaggccggctggaggggacgcttagagatggggcgagggggaggccagtgtctgttgtctgcgagcctctcctgccatctcttttgcagctgagggcacttggcacaaagcaagcacagacagcagagagggccaggcagtgctggagtgcgtttgctggcagggtttattgtgggagaggaatttgagtttaggatctgaatcttgtacataagaaatgaaaaggcttccctccaccccgcccccaaaatatgcccgtcctgtatccatgagagtgcatgtcggttctcagtgagggtcagagtgggggtgggggatgtaaggcctgggtccctttcagcggcctctagggcaggagcgtgcgtcttcttcccagtgcagtggtggtttgagtgctgtgggctctggtggggagggggctctgctcctcttcatttgctggtagctgggtcagggcactggcgcccagtgaggatgcccactagcattctgccccagttggttggtggggggacacctgaccactgagcctttggtaaccttattttttatagtaagtacttcttataattttctttttcacatcttattttataagaagtttaggaatatttttgcatggatcattgtaaacagcagattctttattcctgatgtctattaacatagaatgtttactgataagtactttaaattgcttcatgagcacttaatccatcttagtgtctatgtgtgggggcagacatttaccgcaggcacacagtttgtgcccctttcttcaagtctctgttggtaattccatctgtttagtggatggttggcaggattagtaggttctaacggttccaggggttcagctgaccaagtagcagagaagtcttttttcccaattgagtgctaatagattaggataaaatactcacaatgttagtgtatgcttttaaaaagccccacacaacaaaatggaaacatacatgtacaactcctgtgagggctggagtcttggggttcaggaggaggttagaagttacaggcatctcttcaggcttgcttggtacttggcacacacaggatggtgttttaaagagtgggctgcaccccccacacgccatttacatcagcttcataaacacttttcttcctccctgtaacttaaccttttttcccttttatgaagttgagaggctttatgaaataagtttgcattgcacatccgtgcagaaatctttctgactttgaaatttttaggacgtcagctgtcagatacgaaaggtagatatcaggtaagaatctggacttaggaaatagtcacaaaactgtcataggttgtaattttatcaacattcgcttctagtaaaattaaagtcaattaagaaatagaacttgggtcaaaattctgttacaaagcttcataatttgtcccgaagcatatggtggagcattctgagaaatttgctttttgtgtgtttgacattcctaatttgggagtccttcagctgaattactattcttttagaagttgagacagcaggtaagcaaaggacctagttcatgtaaacatggacatcatgatggctatttaaaaaatatttgttctacaccttctcccctgaggcttggggagtgtgttcagccgctgcagtttctctgctcatggaggtcttgtttggatctgtgctggcggctgagcatttagtgtgagccagtgacccatgaacttgccgctctgtgagggccagagtcagggccagtcatggtaatgggcctgaaggcacttccagaaccttttatgtctctcgtgagccatctgttaagaacgttcttcttggtgtggtttgtaggcctacctgtcgctattctgggaaaccttcttgagtgctatgcaaatgtgttcacaggcaatgggggtggtcctgagccttggggtgggcacctggtcagtgagtgtcttgcccttccccagctgggcatacagtaccttgctctttctggtggcatcatctggctgtgatgaatgaggtctaggaaataatttgcatgtgtcttgggggacacaacagtaacgagaggaaatacattattacagcaacttgcgacgtactaatacctgtcagtgttggcccccgtaaggtatgtaaggcacctgtgagtgccagtgagtgctggtgaaaggccaacatgtactagttatgtaagtattggtgtctgctttaaaaaaggagacccagacttcacctgtcctttttaaacatttgagaacagtgttactctgagcagttgggccaccttcaccttatccgacagctgactgttggatgtgtccattgtcgccagtttggctgttgcccggacaggacaggacctccattgggcgcagcagcaggtggcaggggtgtggcttgaggtgggtggcagcgtctggtcctcctctctggtgctttctgagagggtctctaaagcagagtgtggttggcctgggggaaggcagagcacgtatttctcccctctagtacctctgcatttgtgagtgttccctctggctttctgaagggcagcagactcttgagtatactgcagaggacatgctttatcagtaggtcctgagggctccaggggctcaactgaccaagtaacacagaagttggggtatgtggcctatttgggtcggaaactgcatgtttcagaaagtttgtctctttttcctactcattatttgaagaagagagagcctgtggggatagccttatcttggtccacaggactgaagtgaagtcacttgggaaggggagacagaggatgagcggcgtctgtgtagggacccccccccgggcctgcagaagggtggtgtgctcccaggactggcatgacaggtgtctcctcctcaccacaggctgtgcccatgagtccctgtgcagaccagtgggcaaggcagctgggccagatctcaggccagccgtttgtgctcctagcagggttgctgtgctggccacacggagaggccctagagagcctcatggattgtaactaaagaagaaacggttcctttttgtttttttaaaaatgatttttaaataccgttttttacaccgttctctcggtactttttttaagctaagtcagcattgtcttccagtgttaaaggcatccctcacctctgcattgaacttacgtatccatgccaaggaatggaatttccatcctgagccagttcagttaggtgtcaattgatactattttaattttttatgcaatctgatgagatgagctcagatttaaaaatctcaaaagcacgtttattgtaacaagaattgttatgtattaatactgcagttttcaataaagattgacttgtgttgcaggctggtgtggccgaaacaaatacacacagcaacaaccacaacaaaccactttttggggcggcttgggcctcaagaagaaagtttataaacccatcttcgtgggcggcggcgcccaagataggtatttagacatggcgacacgcgtggcccaagagaccgtggcacggaaagggcggggttcccacaaaaaaaacgcgctgcggaccggggttctagaacatccaagtggtagcgcatcgggccaaacagaccaagagcgacatcgcgcggagaggg

SEQ ID NO: 457736 - DNA, 5610 bp, Homo sapiens
ggagtctcgctctgtcgctaggctggagtgcagtggcatgatctcagctcactgcaactttgcctcccaggctcaagtgattctcctgcctcagcctcccgcatagcagggactacaggcgtgcgccaccacacccagctaatttttgtatttttagtagagacggggtttcaccatgttggccaggctggtctcaaactcctgacctcaggtgatctgcccacctcggcctcccaaagtgctgggattacaggagtgcaccaccgtacctggcctttccccttgcttttagtggacatatagctaacaatttttactccttagcttctgatggactgaggagaattgtgaaaaaaagtttatcatgccctggtttggcacccattaggacatcgagtgtcccttttctgttcttcgctggttgggggcagcatgaaatgcattgttttatagcagcctagagaaaggactctagctacctgctttttggggactggtactggagaaaaatctgagagcaaaagtgcttggctaaattcccttttttttcttttagtttttgaaatcatgaatcctgtttatagtcctggatcttctggggttccctatgcaaatgccaaaggaattggttatccagctggttttcccatgggctatgcagcagcagctcctgcctattctcctaacatgtatcctggagcgaatcctaccttccaaacaggttacactcctggcacaccttacaaagtgtcctgttcccccaccagcggggctgtgccaccgtactcctcctccccgaacccctaccagactgccgtgtaccctgtgcgaagtgcctacccccagcagagcccgtatgcacagcaaggcacgtactacacacagccgctgtatgcagcacctcctcacgtcatccaccacaccacggtggtgcagcccaacggcatgcctgcaacggtgtaccctgctcccatcccccctcctagaggcaacggggtcaccatgggcatggtggctgggaccaccatggccatgtcagcaggtaccctgctgactgctcactccccaactcctgtcgccccccacccggtcactgtgcccacgtaccgggccccaggaacgcccacttacagctatgtgccccctcagtggtgatcacctgcaaatgtttgaggacggagctgtgcagtcacattattggggattccacagctggtgctgcaggccttgcgcctccaaccaggactttcttcttaatgctctcgacacttagctaaacacgactatatcccggcccagcaggccccagcgccgttagtctccagctgactctgtgggttggtcttaaagcaaattctgttttgtggactgcctggcaattttttagctaactgtaatgataaaaagggagtattaatctattctgaatcatatctagttgaatgcatgtttaaaaaaacaaacacaaaaagcttgctcaatctacctgcagtgactgatgcaaaaccatcatatgcaaaatccaaaggaatggaaacgtattttacaacttgtatcactaatgcactgttgtaatgtatgcaaagtcttacagttataagtgttaaagtgaatttcttcatagagcatctgaaatatcttagatgattcttcaaccttttggggttgatgtgggttgccagttagggatgtggacattttagttttcagcgacctgtttctttggcactgactgtcctgggagggagttgcgaggtttgggagagagtagggaagccacagctgcttgggtgcagctggttcatggacatccctttgagtttaggcttggtggagtcagtggaacagggacatgcttaaagctcatcatgaaagattatggtagtgtggccagtgaaatttggggcgaggggggtggtttatgtgtcagcaaagcagtttctctgctatctaaattttcattacagttctcttagagagatgatgtttttatatgtctttattggaaaagtcctatgtaaaactaaattattttcctgggatggaagaaatgtgaaagagaaacagccatgcttgcaggaggtattgtcctctgctttatttagcttagaaaatcattcctttttttttttttttcctggagaaatgtttgaatcagctgaaaacaggtaggcattgctgtttttccccaacaaagaagggcaaaggtttcagctgtatgttatgaagaaagtggtatatttaagaatgagttaaaagggaacaaaactttatttaaaattcctccaatttcttgtagaaaggcagggccgtggatatgtctggaaatgtagaaacctgtagctgcttctgggatcacccacctgatggtggtgacttgtctgctgaggccggctggaggggacgcttagagatggggcgagggggaggccagtgtctgttgtctgcgagcctctcctgccatctcttttgcagctgagggcacttggcacaaagcaagcacagacagcagagagggccaggcagtgctggagtgcgtttgctggcagggtttattgtgggagaggaatttgagtttaggatctgaatcttgtacataagaaatgaaaaggcttccctccaccccgcccccaaaatatgcccgtcctgtatccatgagagtgcatgtcggttctcagtgagggtcagagtgggggtgggggatgtaaggcctgggtccctttcagcggcctctagggcaggagcgtgcgtcttcttcccagtgcagtggtggtttgagtgctgtgggctctggtggggagggggctctgctcctcttcatttgctggtagctgggtcagggcactggcgcccagtgaggatgcccactagcattctgccccagttggttggtggggggacacctgaccactgagcctttggtaaccttattttttatagtaagtacttcttataattttctttttcacatcttattttataagaagtttaggaatatttttgcatggatcattgtaaacagcagattctttattcctgatgtctattaacatagaatgtttactgataagtactttaaattgcttcatgagcacttaatccatcttagtgtctatgtgtgggggcagacatttaccgcaggcacacagtttgtgcccctttcttcaagtctctgttggtaattccatctgtttagtggatggttggcaggattagtaggttctaacggttccaggggttcagctgaccaagtagcagagaagtcttttttcccaattgagtgctaatagattaggataaaatactcacaatgttagtgtatgcttttaaaaagccccacacaacaaaatggaaacatacatgtacaactcctgtgagggctggagtcttggggttcaggaggaggttagaagttacaggcatctcttcaggcttgcttggtacttggcacacacaggatggtgttttaaagagtgggctgcaccccccacacgccatttacatcagcttcataaacacttttcttcctccctgtaacttaaccttttttcccttttatgaagttgagaggctttatgaaataagtttgcattgcacatccgtgcagaaatctttctgactttgaaatttttaggacgtcagctgtcagatacgaaaggtagatatcaggtaagaatctggacttaggaaatagtcacaaaactgtcataggttgtaattttatcaacattcgcttctagtaaaattaaagtcaattaagaaatagaacttgggtcaaaattctgttacaaagcttcataatttgtcccgaagcatatggtggagcattctgagaaatttgctttttgtgtgtttgacattcctaatttgggagtccttcagctgaattactattcttttagaagttgagacagcaggtaagcaaaggacctagttcatgtaaacatggacatcatgatggctatttaaaaaatatttgttctacaccttctcccctgaggcttggggagtgtgttcagccgctgcagtttctctgctcatggaggtcttgtttggatctgtgctggcggctgagcatttagtgtgagccagtgacccatgaacttgccgctctgtgagggccagagtcagggccagtcatggtaatgggcctgaaggcacttccagaaccttttatgtctctcgtgagccatctgttaagaacgttcttcttggtgtggtttgtaggcctacctgtcgctattctgggaaaccttcttgagtgctatgcaaatgtgttcacaggcaatgggggtggtcctgagccttggggtgggcacctggtcagtgagtgtcttgcccttccccagctgggcatacagtaccttgctctttctggtggcatcatctggctgtgatgaatgaggtctaggaaataatttgcatgtgtcttgggggacacaacagtaacgagaggaaatacattattacagcaacttgcgacgtactaatacctgtcagtgttggcccccgtaaggtatgtaaggcacctgtgagtgccagtgagtgctggtgaaaggccaacatgtactagttatgtaagtattggtgtctgctttaaaaaaggagacccagacttcacctgtcctttttaaacatttgagaacagtgttactctgagcagttgggccaccttcaccttatccgacagctgactgttggatgtgtccattgtcgccagtttggctgttgcccggacaggacaggacctccattgggcgcagcagcaggtggcaggggtgtggcttgaggtgggtggcagcgtctggtcctcctctctggtgctttctgagagggtctctaaagcagagtgtggttggcctgggggaaggcagagcacgtatttctcccctctagtacctctgcatttgtgagtgttccctctggctttctgaagggcagcagactcttgagtatactgcagaggacatgctttatcagtaggtcctgagggctccaggggctcaactgaccaagtaacacagaagttggggtatgtggcctatttgggtcggaaactgcatgtttcagaaagtttgtctctttttcctactcattatttgaagaagagagagcctgtggggatagccttatcttggtccacaggactgaagtgaagtcacttgggaaggggagacagaggatgagcggcgtctgtgtagggacccccccccgggcctgcagaagggtggtgtgctcccaggactggcatgacaggtgtctcctcctcaccacaggctgtgcccatgagtccctgtgcagaccagtgggcaaggcagctgggccagatctcaggccagccgtttgtgctcctagcagggttgctgtgctggccacacggagaggccctagagagcctcatggattgtaactaaagaagaaacggttcctttttgtttttttaaaaatgatttttaaataccgttttttacaccgttctctcggtactttttttaagctaagtcagcattgtcttccagtgttaaaggcatccctcacctctgcaaggaacccacgcacacacacctctgcaaggaacccacgcacacacacctctgcaaggaacccacg

SEQ ID NO: 457737 - DNA, 5619 bp, Homo sapiens
ggagtctcgctctgtcgctaggctggagtgcagtggcatgatctcagctcactgcaactttgcctcccaggctcaagtgattctcctgcctcagcctcccgcatagcagggactacaggcgtgcgccaccacacccagctaatttttgtatttttagtagagacggggtttcaccatgttggccaggctggtctcaaactcctgacctcaggtgatctgcccacctcggcctcccaaagtgctgggattacaggagtgcaccaccgtacctggcctttccccttgcttttagtggacatatagctaacaatttttactccttagcttctgatggactgaggagaattgtgaaaaaaagtttatcatgccctggtttggcacccattaggacatcgagtgtcccttttctgttcttcgctggttgggggcagcatgaaatgcattgttttatagcagcctagagaaaggactctagctacctgctttttggggactggtactggagaaaaatctgagagcaaaagtgcttggctaaattcccttttttttcttttagtttttgaaatcatgaatcctgtttatagtcctggatcttctggggttccctatgcaaatgccaaaggaattggttatccagctggttttcccatgggctatgcagcagcagctcctgcctattctcctaacatgtatcctggagcgaatcctaccttccaaacaggttacactcctggcacaccttacaaagtgtcctgttcccccaccagcggggctgtgccaccgtactcctcctccccgaacccctaccagactgccgtgtaccctgtgcgaagtgcctacccccagcagagcccgtatgcacagcaaggcacgtactacacacagccgctgtatgcagcacctcctcacgtcatccaccacaccacggtggtgcagcccaacggcatgcctgcaacggtgtaccctgctcccatcccccctcctagaggcaacggggtcaccatgggcatggtggctgggaccaccatggccatgtcagcaggtaccctgctgactgctcactccccaactcctgtcgccccccacccggtcactgtgcccacgtaccgggccccaggaacgcccacttacagctatgtgccccctcagtggtgatcacctgcaaatgtttgaggacggagctgtgcagtcacattattggggattccacagctggtgctgcaggccttgcgcctccaaccaggactttcttcttaatgctctcgacacttagctaaacacgactatatcccggcccagcaggccccagcgccgttagtctccagctgactctgtgggttggtcttaaagcaaattctgttttgtggactgcctggcaattttttagctaactgtaatgataaaaagggagtattaatctattctgaatcatatctagttgaatgcatgtttaaaaaaacaaacacaaaaagcttgctcaatctacctgcagtgactgatgcaaaaccatcatatgcaaaatccaaaggaatggaaacgtattttacaacttgtatcactaatgcactgttgtaatgtatgcaaagtcttacagttataagtgttaaagtgaatttcttcatagagcatctgaaatatcttagatgattcttcaaccttttggggttgatgtgggttgccagttagggatgtggacattttagttttcagcgacctgtttctttggcactgactgtcctgggagggagttgcgaggtttgggagagagtagggaagccacagctgcttgggtgcagctggttcatggacatccctttgagtttaggcttggtggagtcagtggaacagggacatgcttaaagctcatcatgaaagattatggtagtgtggccagtgaaatttggggcgaggggggtggtttatgtgtcagcaaagcagtttctctgctatctaaattttcattacagttctcttagagagatgatgtttttatatgtctttattggaaaagtcctatgtaaaactaaattattttcctgggatggaagaaatgtgaaagagaaacagccatgcttgcaggaggtattgtcctctgctttatttagcttagaaaatcattcctttttttttttttttcctggagaaatgtttgaatcagctgaaaacaggtaggcattgctgtttttccccaacaaagaagggcaaaggtttcagctgtatgttatgaagaaagtggtatatttaagaatgagttaaaagggaacaaaactttatttaaaattcctccaatttcttgtagaaaggcagggccgtggatatgtctggaaatgtagaaacctgtagctgcttctgggatcacccacctgatggtggtgacttgtctgctgaggccggctggaggggacgcttagagatggggcgagggggaggccagtgtctgttgtctgcgagcctctcctgccatctcttttgcagctgagggcacttggcacaaagcaagcacagacagcagagagggccaggcagtgctggagtgcgtttgctggcagggtttattgtgggagaggaatttgagtttaggatctgaatcttgtacataagaaatgaaaaggcttccctccaccccgcccccaaaatatgcccgtcctgtatccatgagagtgcatgtcggttctcagtgagggtcagagtgggggtgggggatgtaaggcctgggtccctttcagcggcctctagggcaggagcgtgcgtcttcttcccagtgcagtggtggtttgagtgctgtgggctctggtggggagggggctctgctcctcttcatttgctggtagctgggtcagggcactggcgcccagtgaggatgcccactagcattctgccccagttggttggtggggggacacctgaccactgagcctttggtaaccttattttttatagtaagtacttcttataattttctttttcacatcttattttataagaagtttaggaatatttttgcatggatcattgtaaacagcagattctttattcctgatgtctattaacatagaatgtttactgataagtactttaaattgcttcatgagcacttaatccatcttagtgtctatgtgtgggggcagacatttaccgcaggcacacagtttgtgcccctttcttcaagtctctgttggtaattccatctgtttagtggatggttggcaggattagtaggttctaacggttccaggggttcagctgaccaagtagcagagaagtcttttttcccaattgagtgctaatagattaggataaaatactcacaatgttagtgtatgcttttaaaaagccccacacaacaaaatggaaacatacatgtacaactcctgtgagggctggagtcttggggttcaggaggaggttagaagttacaggcatctcttcaggcttgcttggtacttggcacacacaggatggtgttttaaagagtgggctgcaccccccacacgccatttacatcagcttcataaacacttttcttcctccctgtaacttaaccttttttcccttttatgaagttgagaggctttatgaaataagtttgcattgcacatccgtgcagaaatctttctgactttgaaatttttaggacgtcagctgtcagatacgaaaggtagatatcaggtaagaatctggacttaggaaatagtcacaaaactgtcataggttgtaattttatcaacattcgcttctagtaaaattaaagtcaattaagaaatagaacttgggtcaaaattctgttacaaagcttcataatttgtcccgaagcatatggtggagcattctgagaaatttgctttttgtgtgtttgacattcctaatttgggagtccttcagctgaattactattcttttagaagttgagacagcaggtaagcaaaggacctagttcatgtaaacatggacatcatgatggctatttaaaaaatatttgttctacaccttctcccctgaggcttggggagtgtgttcagccgctgcagtttctctgctcatggaggtcttgtttggatctgtgctggcggctgagcatttagtgtgagccagtgacccatgaacttgccgctctgtgagggccagagtcagggccagtcatggtaatgggcctgaaggcacttccagaaccttttatgtctctcgtgagccatctgttaagaacgttcttcttggtgtggtttgtaggcctacctgtcgctattctgggaaaccttcttgagtgctatgcaaatgtgttcacaggcaatgggggtggtcctgagccttggggtgggcacctggtcagtgagtgtcttgcccttccccagctgggcatacagtaccttgctctttctggtggcatcatctggctgtgatgaatgaggtctaggaaataatttgcatgtgtcttgggggacacaacagtaacgagaggaaatacattattacagcaacttgcgacgtactaatacctgtcagtgttggcccccgtaaggtatgtaaggcacctgtgagtgccagtgagtgctggtgaaaggccaacatgtactagttatgtaagtattggtgtctgctttaaaaaaggagacccagacttcacctgtcctttttaaacatttgagaacagtgttactctgagcagttgggccaccttcaccttatccgacagctgactgttggatgtgtccattgtcgccagtttggctgttgcccggacaggacaggacctccattgggcgcagcagcaggtggcaggggtgtggcttgaggtgggtggcagcgtctggtcctcctctctggtgctttctgagagggtctctaaagcagagtgtggttggcctgggggaaggcagagcacgtatttctcccctctagtacctctgcatttgtgagtgttccctctggctttctgaagggcagcagactcttgagtatactgcagaggacatgctttatcagtaggtcctgagggctccaggggctcaactgaccaagtaacacagaagttggggtatgtggcctatttgggtcggaaactgcatgtttcagaaagtttgtctctttttcctactcattatttgaagaagagagagcctgtggggatagccttatcttggtccacaggactgaagtgaagtcacttgggaaggggagacagaggatgagcggcgtctgtgtagggacccccccccgggcctgcagaagggtggtgtgctcccaggactggcatgacaggtgtctcctcctcaccacaggctgtgcccatgagtccctgtgcagaccagtgggcaaggcagctgggccagatctcaggccagccgtttgtgctcctagcagggttgctgtgctggccacacggagaggccctagagagcctcatggattgtaactaaagaagaaacggttcctttttgtttttttaaaaatgatttttaaataccgttttttacaccgttctctcggtactttttttaagctaagtcagcattgtcttccagtgttaaaggcatccctcacctctgcattgaacttacgtatccatgtccccgtacatcgttagaagcttgaattcgagcagtagtagtagtaggcggccgc

SEQ ID NO: 457738 - DNA, 1178 bp, Homo sapiens
accttatccgagtaacactgttctcaaatgtttaaaaaggacaggtgaagtctggctgtcctttttaaacatttgagaacagtgttactctgagcagttgggccaccttcaccttatccgacagctgactgttggatgtgtccattgtcgccagtttggctgttgcccggacaggacaggacctccattgggcgcagcagcaggtggcaggggtgtggcttgaggtgggtggcagcgtctggtcctcctctctggtgctttctgagagggtctctaaagcagagtgtggttggcctgggggaaggcagagcacgtatttctcccctctagtacctctgcatttgtgagtgttccctctggctttctgaagggcagcagactcttgagtatactgcagaggacatgctttatcagtaggtcctgagggctccaggggctcaactgaccaagtaacacagaagttggggtatgtggcctatttgggtcggaaactgcatgtttcagaaagtttgtctctttttcctactcattatttgaagaagagagagcctgtggggatagccttatcttggtccacaggactgaagtgaagtcacttgggaaggggagacagaggatgagcggcgtctgtgtagggacccccccccgggcctgcagaagggtggtgtgctcccaggactggcatgacaggtgtctcctcctcaccacaggctgtgcccatgagtccctgtgcagaccagtgggcaaggcagctgggccagatctcaggccagccgtttgtgctcctagcagggttgctgtgctggccacacggagaggccctagagagcctcatggattgtaactaaagaagaaacggttcctttttgtttttttaaaaatgatttttaaataccgttttttacaccgttctctcggtactttttttaagctaagtcagcattgtcttccagtgttaaaggcatccctcacctctgcattgaacttacgtatccatgccaaggaatggaatttccatcctgagccagttcagttaggtgtcaattgatactattttaattttttatgcaatctgatgagatgagctcagatttaaaaatctcaaaagcacgtttattgtaacaagaattgttatgtattaatactgcagttttcaataaagattgacttgtgttgca

SEQ ID NO: 457739 - DNA, 924 bp, Homo sapiens
agcgcgggctgcggagaggcgggccgggccaagcggagccgagcgagcgggagcgcggcgtccgggaggcggcggagacgcggggctcggagggtcagcctcttatcgtagcaggtctcctcggcacgccccccttgtttcgccccacggccaagcccgccgcgggccggcgtgcgctggtcactgaggcccaggtcgccgccgcggcgcgtttttgaaatcatgaatcctgtttatagtcctggatcttctggggttccctatgcaaatgccaaaggaattggttatccagctggttttcccatgggctatgcagcagcagctcctgcctattctcctaacatgtatcctggagcgaatcctaccttccaaacaggttacactcctggcacaccttacaaagtgtcctgttcccccaccagcggggctgtgccaccgtactcctcctcaccacaggctgtgcccatgagtccctgtgcagaccagtgggcaaggcagctgggccagatctcaggccagccgtttgtgctcctagcagggttgctgtgctggccacacggagaggccctagagagcctcatggattgtaactaaagaagaaacggttcctttttgtttttttaaaaatgatttttaaataccgttttttacaccgttctctcggtactttttttaagctaagtcagcattgtcttccagtgttaaaggcatccctcacctctgcattgaacttacgtatccatgccaaggaatggaatttccatcctgagccagttcagttaggtgtcaattgatactattttaattttttatgcaatctgatgagatgagctcagatttaaaaatctcaaaagcacgtttattgtaacaagaattgttatgtattaatactgcagttttcaataaagattgacttgtgttgca

SEQ ID NO: 457740 - DNA, 882 bp, Homo sapiens
ggagtctcgctctgtcgctaggctggagtgcagtggcatgatctcagctcactgcaactttgcctcccaggctcaagtgattctcctgcctcagcctcccgcatagcagggactacaggcgtgcgccaccacacccagctaatttttgtatttttagtagagacggggtttcaccatgttggccaggctggtctcaaactcctgacctcaggtgatctgcccacctcggcctcccaaagtgctgggattacaggagtgcaccaccgtacctggcctttccccttgcttttagtggacatatagctaacaatttttactccttagcttctgatggactgaggagaattgtgaaaaaaagtttatcatgccctggtttggcacccattaggacatcgagtgtcccttttctgttcttcgctggttgggggcagcatgaaatgcattgttttatagcagcctagagaaaggactctagctacctgctttttggggactggtactggagaaaaatctgagagcaaaagtgcttggctaaattcccttttttttcttttagtttttgaaatcatgaatcctgtttatagtcctggatcttctggggttccctatgcaaatgccaaaggaattggttatccaggtaagtaagtaaaattttgttttcatttttgaactttgaatacttggtatattttcatgtcactaagaatgctttctattgacaaacgcagctcaaagtggcttagacaagaaagaaaatacctggaagtgaaaaatcaaatgataggactggatttggtcaaaacttgatctagtggctccagcagttgggaccaggatctagtttctctacctcctggtctcagcttcgcttcctcagtatta

SEQ ID NO: 457741 - DNA, 1822 bp, Homo sapiens
ggagtctcgctctgtcgctaggctggagtgcagtggcatgatctcagctcactgcaactttgcctcccaggctcaagtgattctcctgcctcagcctcccgcatagcagggactacaggcgtgcgccaccacacccagctaatttttgtatttttagtagagacggggtttcaccatgttggccaggctggtctcaaactcctgacctcaggtgatctgcccacctcggcctcccaaagtgctgggattacaggagtgcaccaccgtacctggcctttccccttgcttttagtggacatatagctaacaatttttactccttagcttctgatggactgaggagaattgtgaaaaaaagtttatcatgccctggtttggcacccattaggacatcgagtgtcccttttctgttcttcgctggttgggggcagcatgaaatgcattgttttatagcagcctagagaaaggactctagctacctgctttttggggactggtactggagaaaaatctgagagcaaaagtgcttggctaaattcccttttttttcttttagtttttgaaatcatgaatcctgtttatagtcctggatcttctggggttccctatgcaaatgccaaaggaattggttatccagctggttttcccatgggctatgcagcagcagctcctgcctattctcctaacatgtatcctggagcgaatcctaccttccaaacaggtatgtgctgggtggtaaaatgctttgtacgtacagctgggagagaaaggtgaaggggtggattttgagaggggtgggtatagaattaggacttggttgagtcgatttctcaagttcattaagttagcctgttgataagtgcaacaaaagcttaattcttactgcactgaagctttatatactgtgtttctcatgtcctcccacaaggcaaatctgtaatcactaggttgttaactctgccagagcatctgttcatgaaatagtatcacctactagaaattgaagaatttcttgccatgccaacaggtggaatttccatgttaatgtttttagagataatttttggttagactactttagcactctgataatattttttaaaaaagtattattttccatgtaatgtatagatgaatatttttagattttggaaatcactgttaatattaaaagtggaattggtttgggtctgaatcttgaggagattggttatttagtgggatttcctgctaggagcctgcactctctggtgttggttccttttggacttttttcacccacacggggctttgcctttctgccgcagcagtggtggtgcacactctgatctgaggctgtggtttggccttaatcctgggactgctggggcaactttatccctcaacagtagcttcacacagttaactttgacagaggaggagacaacagcagtgtcctttccccagattcttcctgttttgttaatcataaaattctgcctttatattctgtccttacatccatctcttcgtttccatttccacttccactatgaccctatatgaccacccttgttcagaccgtagttcacaccctgagaaaaacgttcttgacttggtcttcctgctcccaagctttctttccccgggttagtgttcttcccatttaaaccagagcgatgctcccagatgaatttttctcagtggtttcccatgactgtgagacacagttatgcctagagtctcgactttcagtccctagctgtttgccatattggcccattttttccctttagagtggttttccttttgtgttttgccttgaaagaaccatccatctcgt

SEQ ID NO: 457742 - DNA, 1681 bp, Homo sapiens
ttctgagggaaagccaggcgtggtggctcacacctataatcccagcactttgggaggccgaggcgggtggatcaactgaaatcaggagttcaagaccagcctggctaacgtgatgaaaccccgtctctactaaaaatagaaaaattagccaggtgtggtgacacacacctgtaatcccagctcttcggaaggctgaggcaggagaatcgcttgaacctgggaggcagaggttgcagtgagccaagatcatgccattgcactccagcctgggcgatgaaagtgaaactctgtctcaaaagacgacaacgataaaaaaaacaaagttctgcgggaagaagacaactagagacatgctgttggccacacatagtgctcttggggctgcttaagtctgtggagttctggggaagaaggtaagagcgatggctttgcaggagctctagtgattgtcgctacttcagttgatgacatgagattgttctttatttttcttcagctggttttcccatgggctatgcagcagcagctcctgcctattctcctaacatgtatcctggagcgaatcctaccttccaaacaggtatgtgctgggtggtaaaatgctttgtacgtacagctgggagagaaaggtgaaggggtggattttgagaggggtgggtatagaattaggacttggttgagtcgatttctcaagttcattaagttagcctgttgataagtgcaacaaaagcttaattcttactgcactgaagctttatatactgtgtttctcatgtcctcccacaaggcaaatctgtaatcactaggttgttaactctgccagagcatctgttcatgaaatagtatcacctactagaaattgaagaatttcttgccatgccaacaggtggaatttccatgttaatgtttttagagataatttttggttagactactttagcactctgataatattttttaaaaaagtattattttccatgtaatgtatagatgaatatttttagattttggaaatcactgttaatattaaaagtggaattggtttgggtctgaatcttgaggagattggttatttagtgggatttcctgctaggagcctgcactctctggtgttggttccttttggacttttttcacccacacggggctttgcctttctgccgcagcagtggtggtgcacactctgatctgaggctgtggtttggccttaatcctgggactgctggggcaactttatccctcaacagtagcttcacacagttaactttgacagaggaggagacaacagcagtgtcctttccccagattcttcctgttttgttaatcataaaattctgcctttatattctgtccttacatccatctcttcgtttccatttccacttccactatgaccctatatgaccacccttgttcagaccgtagttcacaccctgagaaaaacgttcttgacttggtcttcctgctcccaagctttctttccccgggttagtgttcttcccatttaaaccagagcgatgctcccagatgaatttttctcagtggtttcccatgactgtgagacacagttatgcctagagtctcgactttcagtccctagctgtttgccatattggcccattttttccctttagagtggttttccttttgtgttttgccttgaaagaaccatccatctcgt

SEQ ID NO: 457743 - DNA, 1226 bp, Homo sapiens
ggagtctcgctctgtcgctaggctggagtgcagtggcatgatctcagctcactgcaactttgcctcccaggctcaagtgattctcctgcctcagcctcccgcatagcagggactacaggcgtgcgccaccacacccagctaatttttgtatttttagtagagacggggtttcaccatgttggccaggctggtctcaaactcctgacctcaggtgatctgcccacctcggcctcccaaagtgctgggattacaggagtgcaccaccgtacctggcctttccccttgcttttagtggacatatagctaacaatttttactccttagcttctgatggactgaggagaattgtgaaaaaaagtttatcatgccctggtttggcacccattaggacatcgagtgtcccttttctgttcttcgctggttgggggcagcatgaaatgcattgttttatagcagcctagagaaaggactctagctacctgctttttggggactggtactggagaaaaatctgagagcaaaagtgcttggctaaattcccttttttttcttttagtttttgaaatcatgaatcctgtttatagtcctggatcttctggggttccctatgcaaatgccaaaggaattggttatccagctggttttcccatgggctatgcagcagcagctcctgcctattctcctaacatgtatcctggagcgaatcctaccttccaaacaggtatgtgctgggtggtaaaatgctttgtacgtacagctgggagagaaaggtgaaggggtggattttgagaggggtgggtatagaattaggacttggttgagtcgatttctcaagttcattaagttagcctgttgataagtgcaacaaaagcttaattcttactgcactgaagctttatatactgtgtttctcatgtcctcccacaaggcaaatctgtaatcactaggttgttaactctgccagagcatctgttcatgaaatagtatcacctactagaaattgaagaatttcttgccatgccaacaggtggaatttccatgttaatgtttttagagataatttttggttagactactttagcactctgataatattttttaaaaaagtattattttccatgtaatgtatagatgaatatttttagattttggaaatcactgttaatattaaaagtggaattggtttgggtctgaattggaggttatacatgggggcctctagagtc

SEQ ID NO: 457744 - DNA, 521 bp, Homo sapiens
agcgcgggctgcggagaggcgggccgggccaagcggagccgagcgagcgggagcgcggcgtccgggaggcggcggagacgcggggctcggagggtcagcctcttatcgtagcaggtctcctcggcacgccccccttgtttcgccccacggccaagcccgccgcgggccggcgtgcgctggtcactgaggcccaggtcgccgccgcggcgcgagacgaggtttcaccgtgttagccaggatggtcccaatctcctgacctcgtgatccgcccgcactttgggaggccaagactggcggatcacctgaggtcggaagttcgagaccaacctgaccaacgtggagaaaccccgtctctactaaaaatacaaaattagctgggtgtggtggcacatgcctgtaatcccagctactcaggaggctgagacaggagaatcgcttgaacctgggagtcagaagttgcggtgagctgagatcgcgccattgcactccagcctgggcaacaaaagtgaaaactctgtctc

SEQ ID NO: 457745 - DNA, 5399 bp, Homo sapiens
agcgcgggctgcggagaggcgggccgggccaagcggagccgagcgagcgggagcgcggcgtccgggaggcggcggagacgcggggctcggagggtcagcctcttatcgtagcaggtctcctcggcacgccccccttgtttcgccccacggccaagcccgccgcgggccggcgtgcgctggtcactgaggcccaggtcgccgccgcggcgcgtttttgaaatcatgaatcctgtttatagtcctggatcttctggggttccctatgcaaatgccaaaggaattggttatccagctggttttcccatgggctatgcagcagcagctcctgcctattctcctaacatgtatcctggagcgaatcctaccttccaaacaggttacactcctggcacaccttacaaagtgtcctgttcccccaccagcggggctgtgccaccgtactcctcctccccgaacccctaccagactgccgtgtaccctgtgcgaagtgcctacccccagcagagcccgtatgcacagcaaggcacgtactacacacagccgctgtatgcagcacctcctcacgtcatccaccacaccacggtggtgcagcccaacggcatgcctgcaacggtgtaccctgctcccatcccccctcctagaggcaacggggtcaccatgggcatggtggctgggaccaccatggccatgtcagcaggtaccctgctgactgctcactccccaactcctgtcgccccccacccggtcactgtgcccacgtaccgggccccaggaacgcccacttacagctatgtgccccctcagtggtgatcacctgcaaatgtttgaggacggagctgtgcagtcacattattggggattccacagctggtgctgcaggccttgcgcctccaaccaggactttcttcttaatgctctcgacacttagctaaacacgactatatcccggcccagcaggccccagcgccgttagtctccagctgactctgtgggttggtcttaaagcaaattctgttttgtggactgcctggcaattttttagctaactgtaatgataaaaagggagtattaatctattctgaatcatatctagttgaatgcatgtttaaaaaaacaaacacaaaaagcttgctcaatctacctgcagtgactgatgcaaaaccatcatatgcaaaatccaaaggaatggaaacgtattttacaacttgtatcactaatgcactgttgtaatgtatgcaaagtcttacagttataagtgttaaagtgaatttcttcatagagcatctgaaatatcttagatgattcttcaaccttttggggttgatgtgggttgccagttagggatgtggacattttagttttcagcgacctgtttctttggcactgactgtcctgggagggagttgcgaggtttgggagagagtagggaagccacagctgcttgggtgcagctggttcatggacatccctttgagtttaggcttggtggagtcagtggaacagggacatgcttaaagctcatcatgaaagattatggtagtgtggccagtgaaatttggggcgaggggggtggtttatgtgtcagcaaagcagtttctctgctatctaaattttcattacagttctcttagagagatgatgtttttatatgtctttattggaaaagtcctatgtaaaactaaattattttcctgggatggaagaaatgtgaaagagaaacagccatgcttgcaggaggtattgtcctctgctttatttagcttagaaaatcattcctttttttttttttttcctggagaaatgtttgaatcagctgaaaacaggtaggcattgctgtttttccccaacaaagaagggcaaaggtttcagctgtatgttatgaagaaagtggtatatttaagaatgagttaaaagggaacaaaactttatttaaaattcctccaatttcttgtagaaaggcagggccgtggatatgtctggaaatgtagaaacctgtagctgcttctgggatcacccacctgatggtggtgacttgtctgctgaggccggctggaggggacgcttagagatggggcgagggggaggccagtgtctgttgtctgcgagcctctcctgccatctcttttgcagctgagggcacttggcacaaagcaagcacagacagcagagagggccaggcagtgctggagtgcgtttgctggcagggtttattgtgggagaggaatttgagtttaggatctgaatcttgtacataagaaatgaaaaggcttccctccaccccgcccccaaaatatgcccgtcctgtatccatgagagtgcatgtcggttctcagtgagggtcagagtgggggtgggggatgtaaggcctgggtccctttcagcggcctctagggcaggagcgtgcgtcttcttcccagtgcagtggtggtttgagtgctgtgggctctggtggggagggggctctgctcctcttcatttgctggtagctgggtcagggcactggcgcccagtgaggatgcccactagcattctgccccagttggttggtggggggacacctgaccactgagcctttggtaaccttattttttatagtaagtacttcttataattttctttttcacatcttattttataagaagtttaggaatatttttgcatggatcattgtaaacagcagattctttattcctgatgtctattaacatagaatgtttactgataagtactttaaattgcttcatgagcacttaatccatcttagtgtctatgtgtgggggcagacatttaccgcaggcacacagtttgtgcccctttcttcaagtctctgttggtaattccatctgtttagtggatggttggcaggattagtaggttctaacggttccaggggttcagctgaccaagtagcagagaagtcttttttcccaattgagtgctaatagattaggataaaatactcacaatgttagtgtatgcttttaaaaagccccacacaacaaaatggaaacatacatgtacaactcctgtgagggctggagtcttggggttcaggaggaggttagaagttacaggcatctcttcaggcttgcttggtacttggcacacacaggatggtgttttaaagagtgggctgcaccccccacacgccatttacatcagcttcataaacacttttcttcctccctgtaacttaaccttttttcccttttatgaagttgagaggctttatgaaataagtttgcattgcacatccgtgcagaaatctttctgactttgaaatttttaggacgtcagctgtcagatacgaaaggtagatatcaggtaagaatctggacttaggaaatagtcacaaaactgtcataggttgtaattttatcaacattcgcttctagtaaaattaaagtcaattaagaaatagaacttgggtcaaaattctgttacaaagcttcataatttgtcccgaagcatatggtggagcattctgagaaatttgctttttgtgtgtttgacattcctaatttgggagtccttcagctgaattactattcttttagaagttgagacagcaggtaagcaaaggacctagttcatgtaaacatggacatcatgatggctatttaaaaaatatttgttctacaccttctcccctgaggcttggggagtgtgttcagccgctgcagtttctctgctcatggaggtcttgtttggatctgtgctggcggctgagcatttagtgtgagccagtgacccatgaacttgccgctctgtgagggccagagtcagggccagtcatggtaatgggcctgaaggcacttccagaaccttttatgtctctcgtgagccatctgttaagaacgttcttcttggtgtggtttgtaggcctacctgtcgctattctgggaaaccttcttgagtgctatgcaaatgtgttcacaggcaatgggggtggtcctgagccttggggtgggcacctggtcagtgagtgtcttgcccttccccagctgggcatacagtaccttgctctttctggtggcatcatctggctgtgatgaatgaggtctaggaaataatttgcatgtgtcttgggggacacaacagtaacgagaggaaatacattattacagcaacttgcgacgtactaatacctgtcagtgttggcccccgtaaggtatgtaaggcacctgtgagtgccagtgagtgctggtgaaaggccaacatgtactagttatgtaagtattggtgtctgctttaaaaaaggagacccagacttcacctgtcctttttaaacatttgagaacagtgttactctgagcagttgggccaccttcaccttatccgacagctgactgttggatgtgtccattgtcgccagtttggctgttgcccggacaggacaggacctccattgggcgcagcagcaggtggcaggggtgtggcttgaggtgggtggcagcgtctggtcctcctctctggtgctttctgagagggtctctaaagcagagtgtggttggcctgggggaaggcagagcacgtatttctcccctctagtacctctgcatttgtgagtgttccctctggctttctgaagggcagcagactcttgagtatactgcagaggacatgctttatcagtaggtcctgagggctccaggggctcaactgaccaagtaacacagaagttggggtatgtggcctatttgggtcggaaactgcatgtttcagaaagtttgtctctttttcctactcattatttgaagaagagagagcctgtggggatagccttatcttggtccacaggactgaagtgaagtcacttgggaaggggagacagaggatgagcggcgtctgtgtagggacccccccccgggcctgcagaagggtggtgtgctcccaggactggcatgacaggtgtctcctcctcaccacaggctgtgcccatgagtccctgtgcagaccagtgggcaaggcagctgggccagatctcaggccagccgtttgtgctcctagcagggttgctgtgctggccacacggagaggccctagagagcctcatggattgtaactaaagaagaaacggttcctttttgtttttttaaaaatgatttttaaataccgttttttacaccgttctctcggtactttttttaagctaagtcagcattgtcttccagtgttaaaggcatccctcacctctgcattgaacttacgtatccatgccaaggaatggaatttccatcctgagccagttcagttaggtgtcaattgatactattttaattttttatgcaatctgatgagatgagctcagatttaaaaatctcaaaagcacgtttattgtaacaagaattgttatgtattaatactgcagttttcaataaagattgacttgtgttgca

SEQ ID NO: 457746 - DNA, 5690 bp, Homo sapiens
ggagtctcgctctgtcgctaggctggagtgcagtggcatgatctcagctcactgcaactttgcctcccaggctcaagtgattctcctgcctcagcctcccgcatagcagggactacaggcgtgcgccaccacacccagctaatttttgtatttttagtagagacggggtttcaccatgttggccaggctggtctcaaactcctgacctcaggtgatctgcccacctcggcctcccaaagtgctgggattacaggagtgcaccaccgtacctggcctttccccttgcttttagtggacatatagctaacaatttttactccttagcttctgatggactgaggagaattgtgaaaaaaagtttatcatgccctggtttggcacccattaggacatcgagtgtcccttttctgttcttcgctggttgggggcagcatgaaatgcattgttttatagcagcctagagaaaggactctagctacctgctttttggggactggtactggagaaaaatctgagagcaaaagtgcttggctaaattcccttttttttcttttagtttttgaaatcatgaatcctgtttatagtcctggatcttctggggttccctatgcaaatgccaaaggaattggttatccagctggttttcccatgggctatgcagcagcagctcctgcctattctcctaacatgtatcctggagcgaatcctaccttccaaacaggttacactcctggcacaccttacaaagtgtcctgttcccccaccagcggggctgtgccaccgtactcctcctccccgaacccctaccagactgccgtgtaccctgtgcgaagtgcctacccccagcagagcccgtatgcacagcaaggcacgtactacacacagccgctgtatgcagcacctcctcacgtcatccaccacaccacggtggtgcagcccaacggcatgcctgcaacggtgtaccctgctcccatcccccctcctagaggcaacggggtcaccatgggcatggtggctgggaccaccatggccatgtcagcaggtaccctgctgactgctcactccccaactcctgtcgccccccacccggtcactgtgcccacgtaccgggccccaggaacgcccacttacagctatgtgccccctcagtggtgatcacctgcaaatgtttgaggacggagctgtgcagtcacattattggggattccacagctggtgctgcaggccttgcgcctccaaccaggactttcttcttaatgctctcgacacttagctaaacacgactatatcccggcccagcaggccccagcgccgttagtctccagctgactctgtgggttggtcttaaagcaaattctgttttgtggactgcctggcaattttttagctaactgtaatgataaaaagggagtattaatctattctgaatcatatctagttgaatgcatgtttaaaaaaacaaacacaaaaagcttgctcaatctacctgcagtgactgatgcaaaaccatcatatgcaaaatccaaaggaatggaaacgtattttacaacttgtatcactaatgcactgttgtaatgtatgcaaagtcttacagttataagtgttaaagtgaatttcttcatagagcatctgaaatatcttagatgattcttcaaccttttggggttgatgtgggttgccagttagggatgtggacattttagttttcagcgacctgtttctttggcactgactgtcctgggagggagttgcgaggtttgggagagagtagggaagccacagctgcttgggtgcagctggttcatggacatccctttgagtttaggcttggtggagtcagtggaacagggacatgcttaaagctcatcatgaaagattatggtagtgtggccagtgaaatttggggcgaggggggtggtttatgtgtcagcaaagcagtttctctgctatctaaattttcattacagttctcttagagagatgatgtttttatatgtctttattggaaaagtcctatgtaaaactaaattattttcctgggatggaagaaatgtgaaagagaaacagccatgcttgcaggaggtattgtcctctgctttatttagcttagaaaatcattcctttttttttttttttcctggagaaatgtttgaatcagctgaaaacaggtaggcattgctgtttttccccaacaaagaagggcaaaggtttcagctgtatgttatgaagaaagtggtatatttaagaatgagttaaaagggaacaaaactttatttaaaattcctccaatttcttgtagaaaggcagggccgtggatatgtctggaaatgtagaaacctgtagctgcttctgggatcacccacctgatggtggtgacttgtctgctgaggccggctggaggggacgcttagagatggggcgagggggaggccagtgtctgttgtctgcgagcctctcctgccatctcttttgcagctgagggcacttggcacaaagcaagcacagacagcagagagggccaggcagtgctggagtgcgtttgctggcagggtttattgtgggagaggaatttgagtttaggatctgaatcttgtacataagaaatgaaaaggcttccctccaccccgcccccaaaatatgcccgtcctgtatccatgagagtgcatgtcggttctcagtgagggtcagagtgggggtgggggatgtaaggcctgggtccctttcagcggcctctagggcaggagcgtgcgtcttcttcccagtgcagtggtggtttgagtgctgtgggctctggtggggagggggctctgctcctcttcatttgctggtagctgggtcagggcactggcgcccagtgaggatgcccactagcattctgccccagttggttggtggggggacacctgaccactgagcctttggtaaccttattttttatagtaagtacttcttataattttctttttcacatcttattttataagaagtttaggaatatttttgcatggatcattgtaaacagcagattctttattcctgatgtctattaacatagaatgtttactgataagtactttaaattgcttcatgagcacttaatccatcttagtgtctatgtgtgggggcagacatttaccgcaggcacacagtttgtgcccctttcttcaagtctctgttggtaattccatctgtttagtggatggttggcaggattagtaggttctaacggttccaggggttcagctgaccaagtagcagagaagtcttttttcccaattgagtgctaatagattaggataaaatactcacaatgttagtgtatgcttttaaaaagccccacacaacgaggaggttagaagttacaggcatctcttcaggcttgcttggtacttggcacacacaggatggtgttttaaagagtgggctgcaccccccacacgccatttacatcagcttcataaacacttttcttcctccctgtaacttaaccttttttcccttttatgaagttgagaggctttatgaaataagtttgcattgcacatccgtgcagaaatctttctgactttgaaatttttaggacgtcagctgtcagatacgaaaggtagatatcaggtaagaatctggacttaggaaatagtcacaaaactgtcataggttgtaattttatcaacattcgcttctagtaaaattaaagtcaattaagaaatagaacttgggtcaaaattctgttacaaagcttcataatttgtcccgaagcatatggtggagcattctgagaaatttgctttttgtgtgtttgacattcctaatttgggagtccttcagctgaattactattcttttagaagttgagacagcaggtaagcaaaggacctagttcatgtaaacatggacatcatgatggctatttaaaaaatatttgttctacaccttctcccctgaggcttggggagtgtgttcagccgctgcagtttctctgctcatggaggtcttgtttggatctgtgctggcggctgagcatttagtgtgagccagtgacccatgaacttgccgctctgtgagggccagagtcagggccagtcatggtaatgggcctgaaggcacttccagaaccttttatgtctctcgtgagccatctgttaagaacgttcttcttggtgtggtttgtaggcctacctgtcgctattctgggaaaccttcttgagtgctatgcaaatgtgttcacaggcaatgggggtggtcctgagccttggggtgggcacctggtcagtgagtgtcttgcccttccccagctgggcatacagtaccttgctctttctggtggcatcatctggctgtgatgaatgaggtctaggaaataatttgcatgtgtcttgggggacacaacagtaacgagaggaaatacattattacagcaacttgcgacgtactaatacctgtcagtgttggcccccgtaaggtatgtaaggcacctgtgagtgccagtgagtgctggtgaaaggccaacatgtactagttatgtaagtattggtgtctgctttaaaaaaggagacccagacttcacctgtcctttttaaacatttgagaacagtgttactctgagcagttgggccaccttcaccttatccgacagctgactgttggatgtgtccattgtcgccagtttggctgttgcccggacaggacaggacctccattgggcgcagcagcaggtggcaggggtgtggcttgaggtgggtggcagcgtctggtcctcctctctggtgctttctgagagggtctctaaagcagagtgtggttggcctgggggaaggcagagcacgtatttctcccctctagtacctctgcatttgtgagtgttccctctggctttctgaagggcagcagactcttgagtatactgcagaggacatgctttatcagtaggtcctgagggctccaggggctcaactgaccaagtaacacagaagttggggtatgtggcctatttgggtcggaaactgcatgtttcagaaagtttgtctctttttcctactcattatttgaagaagagagagcctgtggggatagccttatcttggtccacaggactgaagtgaagtcacttgggaaggggagacagaggatgagcggcgtctgtgtagggacccccccccgggcctgcagaagggtggtgtgctcccaggactggcatgacaggtgtctcctcctcaccacaggctgtgcccatgagtccctgtgcagaccagtgggcaaggcagctgggccagatctcaggccagccgtttgtgctcctagcagggttgctgtgctggccacacggagaggccctagagagcctcatggattgtaactaaagaagaaacggttcctttttgtttttttaaaaatgatttttaaataccgttttttacaccgttctctcggtactttttttaagctaagtcagcattgtcttccagtgttaaaggcatccctcacctctgcattgaacttacgtatccatgccaaggaatggaatttccatcctgagccagttcagttaggtgtcaattgatactattttaattttttatgcaatctgatgagatgagctcagatttaaaaatctcaaaagcacgtttattgtaacaagaattgttatgtattaatactgcagttttcaataaagattgacttgtgttgca

SEQ ID NO: 457747 - DNA, 5689 bp, Homo sapiens
ggagtctcgctctgtcgctaggctggagtgcagtggcatgatctcagctcactgcaactttgcctcccaggctcaagtgattctcctgcctcagcctcccgcatagcagggactacaggcgtgcgccaccacacccagctaatttttgtatttttagtagagacggggtttcaccatgttggccaggctggtctcaaactcctgacctcaggtgatctgcccacctcggcctcccaaagtgctgggattacaggagtgcaccaccgtacctggcctttccccttgcttttagtggacatatagctaacaatttttactccttagcttctgatggactgaggagaattgtgaaaaaaagtttatcatgccctggtttggcacccattaggacatcgagtgtcccttttctgttcttcgctggttgggggcagcatgaaatgcattgttttatagcagcctagagaaaggactctagctacctgctttttggggactggtactggagaaaaatctgagagcaaaagtgcttggctaaattcccttttttttcttttagtttttgaaatcatgaatcctgtttatagtcctggatcttctggggttccctatgcaaatgccaaaggaattggttatccagctggttttcccatgggctatgcagcagcagctcctgcctattctcctaacatgtatcctggagcgaatcctaccttccaaacaggttacactcctggcacaccttacaaagtgtcctgttcccccaccagcggggctgtgccaccgtactcctcctccccgaacccctaccagactgccgtgtaccctgtgcgaagtgcctacccccagcagagcccgtatgcacagcaaggcacgtactacacacagccgctgtatgcagcacctcctcacgtcatccaccacaccacggtggtgcagcccaacggcatgcctgcaacggtgtaccctgctcccatcccccctcctagaggcaacggggtcaccatgggcatggtggctgggaccaccatggccatgtcagcaggtaccctgctgactgctcactccccaactcctgtcgccccccacccggtcactgtgcccacgtaccgggccccaggaacgcccacttacagctatgtgccccctcagtggtgatcacctgcaaatgtttgaggacggagctgtgcagtcacattattggggattccacagctggtgctgcaggccttgcgcctccaaccaggactttcttcttaatgctctcgacacttagctaaacacgactatatcccggcccagcaggccccagcgccgttagtctccagctgactctgtgggttggtcttaaagcaaattctgttttgtggactgcctggcaattttttagctaactgtaatgataaaaagggagtattaatctattctgaatcatatctagttgaatgcatgtttaaaaaaacaaacacaaaaagcttgctcaatctacctgcagtgactgatgcaaaaccatcatatgcaaaatccaaaggaatggaaacgtattttacaacttgtatcactaatgcactgttgtaatgtatgcaaagtcttacagttataagtgttaaagtgaatttcttcatagagcatctgaaatatcttagatgattcttcaaccttttggggttgatgtgggttgccagttagggatgtggacattttagttttcagcgacctgtttctttggcactgactgtcctgggagggagttgcgaggtttgggagagagtagggaagccacagctgcttgggtgcagctggttcatggacatccctttgagtttaggcttggtggagtcagtggaacagggacatgcttaaagctcatcatgaaagattatggtagtgtggccagtgaaatttggggcgaggggggtggtttatgtgtcagcaaagcagtttctctgctatctaaattttcattacagttctcttagagagatgatgtttttatatgtctttattggaaaagtcctatgtaaaactaaattattttcctgggatggaagaaatgtgaaagagaaacagccatgcttgcaggaggtattgtcctctgctttatttagcttagaaaatcattcctttttttttttttttcctggagaaatgtttgaatcagctgaaaacaggtaggcattgctgtttttccccaacaaagaagggcaaaggtttcagctgtatgttatgaagaaagtggtatatttaagaatgagttaaaagggaacaaaactttatttaaaattcctccaatttcttgtagaaaggcagggccgtggatatgtctggaaatgtagaaacctgtagctgcttctgggatcacccacctgatggtggtgacttgtctgctgaggccggctggaggggacgcttagagatggggcgagggggaggccagtgtctgttgtctgcgagcctctcctgccatctcttttgcagctgagggcacttggcacaaagcaagcacagacagcagagagggccaggcagtgctggagtgcgtttgctggcagggtttattgtgggagaggaatttgagtttaggatctgaatcttgtacataagaaatgaaaaggcttccctccaccccgcccccaaaatatgcccgtcctgtatccatgagagtgcatgtcggttctcagtgagggtcagagtgggggtgggggatgtaaggcctgggtccctttcagcggcctctagggcaggagcgtgcgtcttcttcccagtgcagtggtggtttgagtgctgtgggctctggtggggagggggctctgctcctcttcatttgctggtagctgggtcagggcactggcgcccagtgaggatgcccactagcattctgccccagttggttggtggggggacacctgaccactgagcctttggtaaccttattttttatagtaagtacttcttataattttctttttcacatcttattttataagaagtttaggaatatttttgcatggatcattgtaaacagcagattctttattcctgatgtctattaacatagaatgtttactgataagtactttaaattgcttcatgagcacttaatccatcttagtgtctatgtgtgggggcagacatttaccgcaggcacacagtttgtgcccctttcttcaagtctctgttggtaattccatctgtttagtggatggttggcaggattagtaggttctaacggttccaggggttcagctgaccaagtagcagagaagtcttttttcccaattgagtgctaatagattaggataaaatactcacaatgttagtgtatgcttttaaaaagccccacacaacaaaatggaaacatacatgtacaactcctgtgagggctggagtcttggggttcaggaggaggttagaagttacaggcatctcttcaggcttgcttggtacttggcacacacaggatggtgttttaaagagtgggctgcaccccccacacgccatttacatcagcttcataaacacttttcttcctccctgtaacttaaccttttttcccttttatgaagttgagaggctttatgaaataagtttgcattgcacatccgtgcagaaatctttctgactttgaaatttttaggacgtcagctgtcagatacgaaaggtagatatcaggtaagaatctggacttaggaaatagtcacaaaactgtcataggttgtaattttatcaacattcgcttctagtaaaattaaagtcaattaagaaatagaacttgggtcaaaattctgttacaaagcttcataatttgtcccgaagcatatggtggagcattctgagaaatttgctttttgtgtgtttgacattcctaatttgggagtccttcagctgaattactattcttttagaagttgagacagcaggtaagcaaaggacctagttcatgtaaacatggacatcatgatggctatttatgcagtttctctgctcatggaggtcttgtttggatctgtgctggcggctgagcatttagtgtgagccagtgacccatgaacttgccgctctgtgagggccagagtcagggccagtcatggtaatgggcctgaaggcacttccagaaccttttatgtctctcgtgagccatctgttaagaacgttcttcttggtgtggtttgtaggcctacctgtcgctattctgggaaaccttcttgagtgctatgcaaatgtgttcacaggcaatgggggtggtcctgagccttggggtgggcacctggtcagtgagtgtcttgcccttccccagctgggcatacagtaccttgctctttctggtggcatcatctggctgtgatgaatgaggtctaggaaataatttgcatgtgtcttgggggacacaacagtaacgagaggaaatacattattacagcaacttgcgacgtactaatacctgtcagtgttggcccccgtaaggtatgtaaggcacctgtgagtgccagtgagtgctggtgaaaggccaacatgtactagttatgtaagtattggtgtctgctttaaaaaaggagacccagacttcacctgtcctttttaaacatttgagaacagtgttactctgagcagttgggccaccttcaccttatccgacagctgactgttggatgtgtccattgtcgccagtttggctgttgcccggacaggacaggacctccattgggcgcagcagcaggtggcaggggtgtggcttgaggtgggtggcagcgtctggtcctcctctctggtgctttctgagagggtctctaaagcagagtgtggttggcctgggggaaggcagagcacgtatttctcccctctagtacctctgcatttgtgagtgttccctctggctttctgaagggcagcagactcttgagtatactgcagaggacatgctttatcagtaggtcctgagggctccaggggctcaactgaccaagtaacacagaagttggggtatgtggcctatttgggtcggaaactgcatgtttcagaaagtttgtctctttttcctactcattatttgaagaagagagagcctgtggggatagccttatcttggtccacaggactgaagtgaagtcacttgggaaggggagacagaggatgagcggcgtctgtgtagggacccccccccgggcctgcagaagggtggtgtgctcccaggactggcatgacaggtgtctcctcctcaccacaggctgtgcccatgagtccctgtgcagaccagtgggcaaggcagctgggccagatctcaggccagccgtttgtgctcctagcagggttgctgtgctggccacacggagaggccctagagagcctcatggattgtaactaaagaagaaacggttcctttttgtttttttaaaaatgatttttaaataccgttttttacaccgttctctcggtactttttttaagctaagtcagcattgtcttccagtgttaaaggcatccctcacctctgcattgaacttacgtatccatgccaaggaatggaatttccatcctgagccagttcagttaggtgtcaattgatactattttaattttttatgcaatctgatgagatgagctcagatttaaaaatctcaaaagcacgtttattgtaacaagaattgttatgtattaatactgcagttttcaataaagattgacttgtgttgca

SEQ ID NO: 457748 - DNA, 5876 bp, Homo sapiens
ggagtctcgctctgtcgctaggctggagtgcagtggcatgatctcagctcactgcaactttgcctcccaggctcaagtgattctcctgcctcagcctcccgcatagcagggactacaggcgtgcgccaccacacccagctaatttttgtatttttagtagagacggggtttcaccatgttggccaggctggtctcaaactcctgacctcaggtgatctgcccacctcggcctcccaaagtgctgggattacaggagtgcaccaccgtacctggcctttccccttgcttttagtggacatatagctaacaatttttactccttagcttctgatggactgaggagaattgtgaaaaaaagtttatcatgccctggtttggcacccattaggacatcgagtgtcccttttctgttcttcgctggttgggggcagcatgaaatgcattgttttatagcagcctagagaaaggactctagctacctgctttttggggactggtactggagaaaaatctgagagcaaaagtgcttggctaaattcccttttttttcttttagtttttgaaatcatgaatcctgtttatagtcctggatcttctggggttccctatgcaaatgccaaaggaattggttatccagctggttttcccatgggctatgcagcagcagctcctgcctattctcctaacatgtatcctggagcgaatcctaccttccaaacaggttacactcctggcacaccttacaaagtgtcctgttcccccaccagcggggctgtgccaccgtactcctcctccccgaacccctaccagactgccgtgtaccctgtgcgaagtgcctacccccagcagagcccgtatgcacagcaaggcacgtactacacacagccgctgtatgcagcacctcctcacgtcatccaccacaccacggtggtgcagcccaacggcatgcctgcaacggtgtaccctgctcccatcccccctcctagaggcaacggggtcaccatgggcatggtggctgggaccaccatggccatgtcagcaggtaccctgctgactgctcactccccaactcctgtcgccccccacccggtcactgtgcccacgtaccgggccccaggaacgcccacttacagctatgtgccccctcagtggtgatcacctgcaaatgtttgaggacggagctgtgcagtcacattattggggattccacagctggtgctgcaggccttgcgcctccaaccaggactttcttcttaatgctctcgacacttagctaaacacgactatatcccggcccagcaggccccagcgccgttagtctccagctgactctgtgggttggtcttaaagcaaattctgttttgtggactgcctggcaattttttagctaactgtaatgataaaaagggagtattaatctattctgaatcatatctagttgaatgcatgtttaaaaaaacaaacacaaaaagcttgctcaatctacctgcagtgactgatgcaaaaccatcatatgcaaaatccaaaggaatggaaacgtattttacaacttgtatcactaatgcactgttgtaatgtatgcaaagtcttacagttataagtgttaaagtgaatttcttcatagagcatctgaaatatcttagatgattcttcaaccttttggggttgatgtgggttgccagttagggatgtggacattttagttttcagcgacctgtttctttggcactgactgtcctgggagggagttgcgaggtttgggagagagtagggaagccacagctgcttgggtgcagctggttcatggacatccctttgagtttaggcttggtggagtcagtggaacagggacatgcttaaagctcatcatgaaagattatggtagtgtggccagtgaaatttggggcgaggggggtggtttatgtgtcagcaaagcagtttctctgctatctaaattttcattacagttctcttagagagatgatgtttttatatgtctttattggaaaagtcctatgtaaaactaaattattttcctgggatggaagaaatgtgaaagagaaacagccatgcttgcaggaggtattgtcctctgctttatttagcttagaaaatcattcctttttttttttttttcctggagaaatgtttgaatcagctgaaaacaggtaggcattgctgtttttccccaacaaagaagggcaaaggtttcagctgtatgttatgaagaaagtggtatatttaagaatgagttaaaagggaacaaaactttatttaaaattcctccaatttcttgtagaaaggcagggccgtggatatgtctggaaatgtagaaacctgtagctgcttctgggatcacccacctgatggtggtgacttgtctgctgaggccggctggaggggacgcttagagatggggcgagggggaggccagtgtctgttgtctgcgagcctctcctgccatctcttttgcagctgagggcacttggcacaaagcaagcacagacagcagagagggccaggcagtgctggagtgcgtttgctggcagggtttattgtgggagaggaatttgagtttaggatctgaatcttgtacataagaaatgaaaaggcttccctccaccccgcccccaaaatatgcccgtcctgtatccatgagagtgcatgtcggttctcagtgagggtcagagtgggggtgggggatgtaaggcctgggtccctttcagcggcctctagggcaggagcgtgcgtcttcttcccagtgcagtggtggtttgagtgctgtgggctctggtggggagggggctctgctcctcttcatttgctggtagctgggtcagggcactggcgcccagtgaggatgcccactagcattctgccccagttggttggtggggggacacctgaccactgagcctttggtaaccttattttttatagtaagtacttcttataattttctttttcacatcttattttataagaagtttaggaatatttttgcatggatcattgtaaacagcagattctttattcctgatgtctattaacatagaatgtttactgataagtactttaaattgcttcatgagcacttaatccatcttagtgtctatgtgtgggggcagacatttaccgcaggcacacagtttgtgcccctttcttcaagtctctgttggtaattccatctgtttagtggatggttggcaggattagtaggttctaacggttccaggggttcagctgaccaagtagcagagaagtcttttttcccaattgagtgctaatagattaggataaaatactcacaatgttagtgtatgcttttaaaaagccccacacaacaaaatggaaacatacatgtacaactcctgtgagggctggagtcttggggttcaggaggaggttagaagttacaggcatctcttcaggcttgcttggtacttggcacacacaggatggtgttttaaagagtgggctgcaccccccacacgccatttacatcagcttcataaacacttttcttcctccctgtaacttaaccttttttcccttttatgaagttgagaggctttatgaaataagtttgcattgcacatccgtgcagaaatctttctgactttgaaatttttaggacgtcagctgtcagatacgaaaggtagatatcaggtaagaatctggacttaggaaatagtcacaaaactgtcataggttgtaattttatcaacattcgcttctagtaaaattaaagtcaattaagaaatagaacttgggtcaaaattctgttacaaagcttcataatttgtcccgaagcatatggtggagcattctgagaaatttgctttttgtgtgtttgacattcctaatttgggagtccttcagctgaattactattcttttagaagttgagacagcaggtaagcaaaggacctagttcatgtaaacatggacatcatgatggctatttaaaaaatatttgttctacaccttctcccctgaggcttggggagtgtgttcagccgctgcagtttctctgctcatggaggtcttgtttggatctgtgctggcggctgagcatttagtgtgagccagtgacccatgaacttgccgctctgtgagggccagagtcagggccagtcatggtaatgggcctgaaggcacttccagaaccttttatgtctctcgtgagccatctgttaagaacgttcttcttggtgtggtttgtaggcctacctgtcgctattctgggaaaccttcttgagtgctatgcaaatgtgttcacaggcaatgggggtggtcctgagccttggggtgggcacctggtcagtgagtgtcttgcccttccccagctgggcatacagtaccttgctctttctggtggcatcatctggctgtgatgaatgaggtctaggaaataatttgcatgtgtcttgggggacacaacagtaacgagaggaaatacattattacagcaacttgcgacgtactaatacctgtcagtgttggcccccgtaaggtatgtaaggcacctgtgagtgccagtgagtgctggtgaaaggccaacatgtactagttatgtaagtattggtgtctgctttaaaaaaggagacccagacttcacctgtcctttttaaacatttgagaacagtgttactctgagcagttgggccaccttcaccttatccgacagctgactgttggatgtgtccattgtcgccagtttggctgttgcccggacaggacaggacctccattgggcgcagcagcaggtggcaggggtgtggcttgaggtgggtggcagcgtctggtcctcctctctggtgctttctgagagggtctctaaagcagagtgtggttggcctgggggaaggcagagcacgtatttctcccctctagtacctctgcatttgtgagtgttccctctggctttctgaagggcagcagactcttgagtatactgcagaggacatgctttatcagtaggtcctgagggctccaggggctcaactgaccaagtaacacagaagttggggtatgtggcctatttgggtcggaaactgcatgtttcagaaagtttgtctctttttcctactcattatttgaagaagagagagcctgtggggatagccttatcttggtccacaggactgaagtgaagtcacttgggaaggggagacagaggatgagcggcgtctgtgtagggacccccccccgggcctgcagaagggtggtgtgctcccaggactggcatgacaggtgtctcctcctcaccacaggctgtgcccatgagtccctgtgcagaccagtgggcaaggcagctgggccagatctcaggccagccgtttgtgctcctagcagggttgctgtgctggccacacggagaggccctagagagcctcatggattgtaactaaagaagaaacggttcctttttgtttttttaaaaatgatttttaaataccgttttttacaccgttctctcggtactttttttaagctaagtcagcattgtcttccagtgttaaaggcatccctcacctctgcattgaacttacgtatccatgccaaggaatggaatttccatcctgagccagttcagttaggtgtcaattgatactattttaattttttatgcaatctgatgagatgagctcagatttaaaaatctcaaaagcacgtttattgtacagatgtttgtctcatacgcgttcataagatgctggtgcaaaaaaaaaaaaaaaagggggcctaagtaccgggggccgttggcccgtttggaaggcctagggcgttaaaagaagggggtaacgcggggaacgcccgggttgggcctctgggtgaccccaaaccgaaaagttgacgtgcggtctgatacc

SEQ ID NO: 457749 - DNA, 1201 bp, Homo sapiens
agacccccttaccccacagctctgaccgtaaatgcttcaatgtacagctttctgtcgggctactcggggatatatctggagggtccggagcccgtgggattcctgttttggggtttacgtcggctggtaagtgtggagatgggtttcccggcgtgaagatgtgtccattgtcgccagtttggctgttgcccggacaggacaggacctccattgggcgcagcagcaggtggcaggggtgtggcttgaggtgggtggcagcgtctggtcctcctctctggtgctttctgagagggtctctaaagcagagtgtggttggcctgggggaaggcagagcacgtatttctcccctctagtacctctgcatttgtgagtgttccctctggctttctgaagggcagcagactcttgagtatactgcagaggacatgctttatcagtaggtcctgagggctccaggggctcaactgaccaagtaacacagaagttggggtatgtggcctatttgggtcggaaactgcatgtttcagaaagtttgtctctttttcctactcattatttgaagaagagagagcctgtggggatagccttatcttggtccacaggactgaagtgaagtcacttgggaaggggagacagaggatgagcggcgtctgtgtagggacccccccccgggcctgcagaagggtggtgtgctcccaggactggcatgacaggtgtctcctcctcaccacaggctgtgcccatgagtccctgtgcagaccagtgggcaaggcagctgggccagatctcaggccagccgtttgtgctcctagcagggttgctgtgctggccacacggagaggccctagagagcctcatggattgtaactaaagaagaaacggttcctttttgtttttttaaaaatgatttttaaataccgttttttacaccgttctctcggtactttttttaagctaagtcagcattgtcttccagtgttaaaggcatccctcacctctgcattgaacttacgtatccatgccaaggaatggaatttccatcctgagccagttcagttaggtgtcaattgatactattttaattttttatgcaatctgatgagatgagctcagatttaaaaatctcaaaagcacgtttattgtaacaagaattgttatgtattaatactgcagttttcaataaagattgacttgtgttgca

SEQ ID NO: 457750 - DNA, 887 bp, Homo sapiens
tagaatgaagattaaataaagatatctcttttaattaaaagaatagttataccagcatcctggaataaaatggggatggttcttagcattgactagagttctcagctttctggcagccaaagcagaaaaagacctgatgaattcatagttatcattgatgacgtatcttcttgtatttgcttccagggaatcatgcttgttggtgatggatacagaggaaaaacttcaccccatacacccaatgaaaagtttgaaggtgcaactgtcctgaaagcactcaaatctggttatgaaggtcgagtcccactgaagagcgctcgtctgttttatgacatcagcgaaaaggctcgaaggattgtagaatcttattttatgctgaactcaactctgtatttttcctatacacacatggtctgccgaacagccctgtctggtcagcaggatagaagaaatgacctcagtcatcccatccatgctgacaactgtttgttggatccagaggccaacgaatgctggaaggagcctcctgcttacacatttcgagactataggtatagctagaacctgcttcaaaacaaagcttttacctaacagttttcaagcagtgaaaactggaaaggtgctctgttttgcttgacgtcgtgttcatatctccaaggcagaaattctcaaataatcttctgaagtagctgccataaccaataagtggcattatcatctcacttttatcttaaaaattgtgcacagtttgcatcccatttcacaaaatgtccattttgttttaatatgaaaagtaaattttatgttcttttaaaaaaattcctgttctccctggaacatattccttgtggtatatgtatttcagtcagaatacaagggcatggagt

SEQ ID NO: 457751 - DNA, 2579 bp, Homo sapiens
gtgtgccaaagcctatcttctatgccatccagatgatgaggatgtcctagacaatgtggattactatgagagtctgctggatgatagcattgacccggcatccattgaggccagagaggatttaacaatgtttgtgaaacgtcataagctggagtctgagctgataaaatcagctgcagaaggtctggggttttcatacactgaaccgaattattggatcagatatggaggacgacaggatgagaatcgggtcccttcaggagtgaacgtagagggagcagaagttcatggattctcaatgggaaaaaagctatcacccaagatagatcgagacctaagagaaggtggtcctctactctatgagaacatcacattcgtctacaactcggagcagctgaacgggactcagcgggttctcctggataacgtcctgtcggaagaacagtgccgggagctccacagcgtggccagtggaatcatgcttgttggtgatggatacagaggaaaaacttcaccccatacacccaatgaaaagtttgaaggtgcaactgtcctgaaagcactcaaatctggttatgaaggtcgagtcccactgaagagcgctcgtctgttttatgacatcagcgaaaaggctcgaaggattgtagaatcttattttatgctgaactcaactctgtatttttcctatacacacatggtctgccgaacagccctgtctggtcagcaggatagaagaaatgacctcagtcatcccatccatgctgacaactgtttgttggatccagaggccaacgaatgctggaaggagcctcctgcttacacatttcgagactatagtgctctcctatatatgaatgatgactttgaaggaggagaattcatattcacagagatggatgctaagactgtgactgcctctataaaaccaaaatgtgggcgcatgatcagcttctcatctggaggagagaaccctcatggggtgaaggcagtcaccaagggaaagaggtgtgctgtggctctgtggttcaccttggacccactttatagagaattggagcgaatacaggctgatgaagtgattgcaattctggatcaagaacagcaagggaagcatgaactgaatatcaaccctaaagatgagctataaaaatgagaaagaatgttctatcaaatatttatttaaattgttaatcttatgagaacctttttatttttgtacagagccatggtataaattaacaggttaatgtcagtcatcagatcttccttctcttcctaaggatgcttgtgttgcctcaatctatcaatctatctttcttgttttgggttgttttctctctctctctctctctctctcttcttagagacatggtctaaccatgttgtctaggatatagggcagtggctattcacagatgtgatgatagcacactggagcctcaaactcttaggctcaggcgatccttcaagcctcccggggagctgggaccacaggcacgtgccaccacacccagctctctttcttggtttttcatcatttcatgtatctatcaaagcccagttcacctcctcccccaaacacacacacacacacacacacacacacacacacaattaagttgctgcaaatcaaagcttagagagaatagcttcttggtggtgaaactacaactctcacgtgtgctccagttctaaaattaacctgtgcctggtctctgaagccctttcttgctctgtgcctttcagccacatccttaggtgctaacggccatgagctccgactctccaaagtgagctccactttgggtctgaggagcccctggcagagtccacgctgcctcaggtatcatgggcgtaatgatcacccaggctccgggagatctcatggatgattactgtatgagacagaggggacttcagtctttccagggccttggtggaatttttggctctggtgttttcgccagacaataaacttacactggaagctttgattcaccctccacagtactccagaaaggactgtcctataagttgtacactttaaaaggtcatgtagaggttgtagtagaatggcttttcaccctggtgactttggaagaaactcttgaatactgcctgcatccgggcaccatggccaggttgcctaggagtggggtccactgatgaaaagaggtgttttgtacttacataagaaaaataaatttctgattgattttaaccgtcatctgcttatattttgggggcccctcctcattgctgctatccagcacacagatttgtgcttgtgtctgatttgtttaataaagggaggcttattttaatatctggcatttatttttgttctcccaaatgtttgctttatcttcacagaatggttttgtaattacataggagcttttgggaccactttaggggcaacattgggacatgactagtgttgctggtgcagtggcctcaggaaaggtggggacactgctcttgaagaacagagatggagaccaaactgggcattgatccagagaatgcttggttccaggtcccacttctaagaaagacactacaaaggcatagttcat

SEQ ID NO: 457752 - DNA, 1642 bp, Homo sapiens
gtgtgccaaagcctatcttctatgccatccagatgatgaggatgtcctagacaatgtggattactatgagagtctgctggatgatagcattgacccggcatccattgaggccagagaggatttaacaatgtttgtgaaacgtcataagctggagtctgagctgataaaatcagctgcagaaggtctggggttttcatacactgaaccgaattattggatcagatatggaggacgacaggatgagaatcgggtcccttcaggagtgaacgtagagggagcagaagttcatggattctcaatgggaaaaaagctatcacccaagatagatcgagacctaagagaaggtggtcctctactctatgagaacatcacattcgtctacaactcggagcagctgaacgggactcagcgggttctcctggataacgtcctgtcggaagaacagtgccgggagctccacagcgtggccagtggaatcatgcttgttggtgatggatacagaggaaaaacttcaccccatacacccaatgaaaagtttgaaggtgcaactgtcctgaaagcactcaaatctggttatgaaggtcgagtcccactgaagagcgctcgtctgttttatgacatcagcgaaaaggctcgaaggattgtagaatcttattttatgctgaactcaactctgtatttttcctatacacacatggtctgccgaacagccctgtctggtcagcaggatagaagaaatgacctcagtcatcccatccatgctgacaactgtttgttggatccagaggccaacgaatgctggaaggagcctcctgcttacacatttcgagactatagtgctctcctatatatgaatgatgactttgaaggaggagaattcatattcacagagatggatgctaagactgtgactgcctctataaaaccaaaatgtgggcgcatgatcagcttctcatctggaggagagaaccctcatgggtgaaactacaactctcacgtgtgctccagttctaaaattaacctgtgcctggtctctgaagccctttcttgctctgtgcctttcagccacatccttaggtgctaacggccatgagctccgactctccaaagtgagctccactttgggtctgaggagcccctggcagagtccacgctgcctcaggtatcatgggcgtaatgatcacccaggctccgggagatctcatggatgattactgtatgagacagaggggacttcagtctttccagggccttggtggaatttttggctctggtgttttcgccagacaataaacttacactggaagctttgattcaccctccacagtactccagaaaggactgtcctataagttgtacactttaaaaggtcatgtagaggttgtagtagaatggcttttcaccctggtgactttggaagaaactcttgaatactgcctgcatccgggcaccatggccaggttgcctaggagtggggtccactgatgaaaagaggtgttttgtacttacataagaaaaataaatttctgattgattttaaccgtcatctgcttatattttgggggcccctcctcattgctgctatccagcacacagatttgtgcttgtgtctgatttgtttaataaagggaggcttatttta

SEQ ID NO: 457753 - DNA, 1555 bp, Homo sapiens
gtgtgccaaagcctatcttctatgccatccagatgatgaggatgtcctagacaatgtggattactatgagagtctgctggatgatagcattgacccggcatccattgaggccagagaggatttaacaatgtttgtgaaacgtcataagctggagtctgagctgataaaatcagctgcagaaggtctggggttttcatacactgaaccgaattattggatcagatatggaggacgacaggatgagaatcgggtcccttcaggagtgaacgtagagggagcagaagttcatggattctcaatgggaaaaaagctatcacccaagatagatcgagacctaagagaaggtggtcctctactctatgagaacatcacattcgtctacaactcggagcagctgaacgggactcagcgggttctcctggataacgtcctgtcggaagaacagtgccgggagctccacagcgtggccagtggaatcatgcttgttggtgatggatacagaggaaaaacttcaccccatacacccaatgaaaagtttgaaggtgcaactgtcctgaaagcactcaaatctggttatgaaggtcgagtcccactgaagagcgctcgtctgttttatgacatcagcgaaaaggctcgaaggattgtagaatcttattttatgctgaactcaactctgtatttttcctatacacacatggtctgccgaacagccctgtctggtcagcaggatagaagaaatgacctcagtcatcccatccatgctgacaactgtttgttggatccagaggccaacgaatgctggaaggagcctcctgcttacacatttcgagactatagtgctctcctatatatgaatgatgactttgaaggaggagaattcatattcacagagatggatgctaagactgtgactgcctctataaaaccaaaatgtgggcgcatgatcagcttctcatctggaggagagaaccctcatggggtgaaggcagtcaccaagggaaagaggtgtgctgtggctctgtggttcaccttggacccactttatagagaattggtgagtttctcacccgcccagaaagccaattaggcttgcttcatgaactgctttatctgagaagtcctttaaattgcttcgtctgaggaaaagaagagggtaaaggcagttcttaatcagatatgttctagtaagtgaagatgtttgtagaaatagctgtgtcaatgatatttgatagtcactaatctgtcttgagcttattaacaaattgtaaggctgggcgtggtggctcactcctataaccccagaactttgggaggccgaggtgggcagatcacttgaggtcgggagttcgagaccagcctgatcaacatggcgaaaccccgtctctactaaaattacaaaaattagccaggcatggtggcatatgcctgtaatcccagctactggggaggctgaggcaggagaatcacttgaatccaggaggtggaggttgctgtaacccgagatcgcaccactgcactccaacctgggcaacagagtgagactctgtcttgaaaa

SEQ ID NO: 457754 - DNA, 2323 bp, Homo sapiens
gtgtgccaaagcctatcttctatgccatccagatgatgaggatgtcctagacaatgtggattactatgagagtctgctggatgatagcattgacccggcatccattgaggccagagaggatttaacaatgtttgtgaaacgtcataagctggagtctgagctgataaaatcagctgcagaaggtctggggttttcatacactgaaccgaattattggatcagatatggaggacgacaggatgagaatcgggtcccttcaggagtgaacgtagagggagcagaagttcatggattctcaatgggaaaaaagctatcacccaagatagatcgagacctaagagaaggtggtcctctactctatgagaacatcacattcgtctacaactcggagcagctgaacgggactcagcgggttctcctggataacgtcctgtcggaagaacagtgccgggagctccacagcgtggccagtggaatcatgcttgttggtgatggatacagaggaaaaacttcaccccatacacccaatgaaaagtttgaaggtgcaactgtcctgaaagcactcaaatctggttatgaaggtcgagtcccactgaagagcgctcgtctgttttatgacatcagcgaaaaggctcgaaggattgtagaatcttattttatgctgaactcaactctgtatttttcctatacacacatggtctgccgaacagccctgtctggtcagcaggatagaagaaatgacctcagtcatcccatccatgctgacaactgtttgttggatccagaggccaacgaatgctggaaggagcctcctgcttacacatttcgagactatagtgctctcctatatatgaatgatgactttgaaggaggagaattcatattcacagagatggatgctaagactgtgactgcctctataaaaccaaaatgtgggcgcatgatcagcttctcatctggaggagagaaccctcatggggtgaaggcagtcaccaagggaaagaggtgtgctgtggctctgtggttcaccttggacccactttatagagaattggagcgaatacaggctgatgaagtgattgcaattctggatcaagaacagcaagggaagcatgaactgaatatcaaccctaaagatgagctataaaaatgagaaagaatgttctatcaaatatttatttaaattgttaatcttatgagaacctttttatttttgtacagagccatggtataaattaacaggttaatgtcagtcatcagatcttccttctcttcctaaggatgcttgtgttgcctcaatctatcaatctatctttcttgttttgggttgttttctctctctctctctctctctctcttcttagagacatggtctaaccatgttgtctaggatatagggcagtggctattcacagatgtgatgatagcacactggagcctcaaactcttaggctcaggcgatccttcaagcctcccggggagctgggaccacaggcacgtgccaccacacccagctctctttcttggtttttcatcatttcatgtatctatcaaagcccagttcacctcctcccccaaacacacacacacacacacacacacacacacacacaattaagttgctgcaaatcaaagcttagagagaatagcttcttggtggtgaaactacaactctcacgtgtgctccagttctaaaattaacctgtgcctggtctctgaagccctttcttgctctgtgcctttcagccacatccttaggtgctaacggccatgagctccgactctccaaagtgagctccactttgggtctgaggagcccctggcagagtccacgctgcctcaggtatcatgggcgtaatgatcacccaggctccgggagatctcatggatgattactgtatgagacagaggggacttcagtctttccagggccttggtggaatttttggctctggtgttttcgccagacaataaacttacactggaagctttgattcaccctccacagtactccagaaaggactgtcctataagttgtacactttaaaaggtcatgtagaggttgtagtagaatggcttttcaccctggtgactttggaagaaactcttgaatactgcctgcatccgggcaccatggccaggttgcctaggagtggggtccactgatgaaaagaggtgttttgtacttacataagaaaaataaatttctgattgattttaaccgtcatctgcttatattttgggggcccctcctcattgctgctatccagcacacagatttgtgcttgtgtctgatttgtttaataaagggaggcttatttta

SEQ ID NO: 457755 - DNA, 2269 bp, Homo sapiens
gtgtgccaaagcctatcttctatgccatccagatgatgaggatgtcctagacaatgtggattactatgagagtctgctggatgatagcattgacccggcatccattgaggccagagaggatttaacaatgtttgtgaaacgtcataagctggagtctgagctgataaaatcagctgcagaaggtctggggttttcatacactgaaccgaattattggatcagatatggaggacgacaggatgagaatcgggtcccttcaggagtgaacgtagagggagcagaagttcatggattctcaatgggaaaaaagctatcacccaagatagatcgagacctaagagaaggtggtcctctactctatgagaacatcacattcgtctacaactcggagcagctgaacgggactcagcgggttctcctggataacgtcctgtcggaagaacagtgccgggagctccacagcgtggccagtggaatcatgcttgttggtgatggatacagaggaaaaacttcaccccatacacccaatgaaaagtttgaaggtgcaactgtcctgaaagcactcaaatctggttatgaaggtcgagtcccactgaagagcgctcgtctgttttatgacatcagcgaaaaggctcgaaggattgtagaatcttattttatgctgaactcaactctgtatttttcctatacacacatggtctgccgaacagccctgtctggtcagcaggatagaagaaatgacctcagtcatcccatccatgctgacaactgtttgttggatccagaggccaacgaatgctggaaggagcctcctgcttacacatttcgagactatagtgctctcctatatatgaatgatgactttgaaggaggagaattcatattcacagagatggatgctaagactgtgactgcctctataaaaccaaaatgtgggcgcatgatcagcttctcatctggaggagagaaccctcatggggtgaaggcagtcaccaagggaaagaggtgtgctgtggctctgtggttcaccttggacccactttatagagaattggagcgaatacaggctgatgaagtgattgcaattctggatcaagaacagcaagggaagcatgaactgaatatcaaccctaaagatgagctataaaaatgagtatttttgtacagagccatggtataaattaacaggttaatgtcagtcatcagatcttccttctcttcctaaggatgcttgtgttgcctcaatctatcaatctatctttcttgttttgggttgttttctctctctctctctctctctctcttcttagagacatggtctaaccatgttgtctaggatatagggcagtggctattcacagatgtgatgatagcacactggagcctcaaactcttaggctcaggcgatccttcaagcctcccggggagctgggaccacaggcacgtgccaccacacccagctctctttcttggtttttcatcatttcatgtatctatcaaagcccagttcacctcctcccccaaacacacacacacacacacacacacacacacacacaattaagttgctgcaaatcaaagcttagagagaatagcttcttggtggtgaaactacaactctcacgtgtgctccagttctaaaattaacctgtgcctggtctctgaagccctttcttgctctgtgcctttcagccacatccttaggtgctaacggccatgagctccgactctccaaagtgagctccactttgggtctgaggagcccctggcagagtccacgctgcctcaggtatcatgggcgtaatgatcacccaggctccgggagatctcatggatgattactgtatgagacagaggggacttcagtctttccagggccttggtggaatttttggctctggtgttttcgccagacaataaacttacactggaagctttgattcaccctccacagtactccagaaaggactgtcctataagttgtacactttaaaaggtcatgtagaggttgtagtagaatggcttttcaccctggtgactttggaagaaactcttgaatactgcctgcatccgggcaccatggccaggttgcctaggagtggggtccactgatgaaaagaggtgttttgtacttacataagaaaaataaatttctgattgattttaaccgtcatctgcttatattttgggggcccctcctcattgctgctatccagcacacagatttgtgcttgtgtctgatttgtttaataaagggaggcttatttta

SEQ ID NO: 457756 - DNA, 146 bp, Homo sapiens
gggcaggttgttccttgcatgctaagccaggccatgtgaagataatgaagtcccgcctcgggctaccggacaccgtttgtaccatcaggccatcctgtccaagtctcctggggtctttgcctgcttgtttaaacactgaaggccaa

SEQ ID NO: 457757 - DNA, 608 bp, Homo sapiens
ccattttcccccaggaaaccagttagaccatgatttcgattttaaaacgactccccataagggaatttggccctcaagcccaagaattcggcacaaggcagcttgttcatccaagccactggctgaggtgttaggaagaggaagagggtggtagaggaggtaagacagtagggaaagacaagggcccatgctcttagtggggaaaactcttggagccgtttactttgagctttgaacactgaaaccattgttggcagggttcagtcactgacagcacaagtttcactgaattgatccaagagtttagtgatttcaaaagccttggtctcaggagaagattaaactttcatattgggcagtggttcactttaaaacacacacatacacacacaaaacaattttttaagaaatcctaataagtaacatacccaaaatgctctgtcttgagtcatgagaaccatcagttcttgatattgtctagacttgcatctagagctacgttgtaaaattcttttaggcatgtgttagatttctgtgtaaactttgtttaaatgtaaacttcatactacattgtcagtttttgtcttaataaaactatagatttataa

SEQ ID NO: 457758 - DNA, 1031 bp, Homo sapiens
  misc_feature (105)..(105): n is a, c, g, or t
  misc_feature (109)..(109): n is a, c, g, or t
  misc_feature (119)..(119): n is a, c, g, or t
  misc_feature (163)..(163): n is a, c, g, or t
  misc_feature (237)..(237): n is a, c, g, or t
  misc_feature (270)..(270): n is a, c, g, or t
gagatggagtctcgctccatcgcccaggctggatcgcagtggctggatctcggctcactgcaagctccgcctcccaagttcaagcaattcttgtctcagcctccngagnagctgggacnacaggcacctgccaccacgctcggctaatttttgcatttttagnagagacagggtttcaccttgttggtaagactggtctcgaacccctgacctcaggtgatccacccgcctcggccncccaaagtgctgggatgacaggcgtgagcgacngcccctggcccatatgttctaatattctaggttacaacgctctacgctgcaatctctccaccgttacagtttaaaaactataagtccctaccaccctcgcctactgtgcgtgcgcggcgcgcggcgcttcgggccttgtagtcttggacagacccccgaggcccatggtgccgtgcggcgggtcgttgcgcctgcgcggtgcgagcggcgggcagcgcagactgcgaggctcttttgttcggctgaggggagggccgttggccggggcctgcggtacgccgcttcagtgagggacgccactgcggccacccggcttgctgccttcctgggcgccactcccccaggcgacccgacgcgacgcgccagtagcgcagcaccgattcctctcgggctcttgggcgctgctctgagcagcgtcaccctttacaccagaaagctggcgggcactatggggaaaaaacaaaacaagaagaaagtggaggaggtgctagaagaggaggaagaggaatatgtggtggaaaaagttctcgaccgtcgagtggtaaagggcaaagtggagtacctcctaaagtggaagggattctcagatgaggacaacacatgggagccagaagagaacctggattgccccgacctcattgctgagtttctgcagtcacagaaaacagcacatgagacagataaatcagagggaggcaagcgcaaagctgattctgattctgaagataagggagaggaatctacttcaccgggtcctcaag

SEQ ID NO: 457759 - DNA, 281 bp, Homo sapiens
taaaattggggcagaacaaatatgtgaagagagagaaagaagaatgaggcagactttaaaacacacacatacacacacaaaacaattttttaagaaatcctaataagtaacatacccaaaatgctctgtcttgagtcatgagaaccatcagttcttgatattgtctagacttgcatctagagctacgttgtaaaattcttttaggcatgtgttagatttctgtgtaaactttgtttaaatgtaaacttcatactacatgggggatacctctagaggcgacc

SEQ ID NO: 457760 - DNA, 2030 bp, Homo sapiens
agtgacctgaggatcccggtgaagtagattcctctcgggctcttgggcgctgctctgagcagcgtcaccctttacaccagaaagctggcgggcactatggggaaaaaacaaaacaagaagaaagtggaggaggtgctagaagaggaggaagaggaatatgtggtggaaaaagttctcgaccgtcgagtggtaaagggcaaagtggagtacctcctaaagtggaagggattctcagatgaggacaacacatgggagccagaagagaacctggattgccccgacctcattgctgagtttctgcagtcacagaaaacagcacatgagacagataaatcagagggaggcaagcgcaaagctgattctgattctgaagataagggagaggagagcaaaccaaagaagaagaaagaagagtcagaaaagccacgaggctttgctcgaggtttggagccggagcggattattggagctacagactccagtggagagctcatgttcctgatgaaatggaaaaactctgatgaggctgacctggtccctgccaaggaagccaatgtcaagtgcccacaggttgtcatatccttctatgaggaaaggctgacgtggcattcctacccctcggaggatgatgacaaaaaagatgacaagaactaacgctcctgagtaccagcccctgtcacatctgactgtgggtttcaagtgggaagggaaggagttctacttgtcttgacaccatagaggtggcttgagaagatgtcctttgaagagccagtatagtttctgtgccctgcagcagcccaagtgctttaaagccgtttcaagctgtatagtttgcacacccatcccagtggaggggaaaggggataagtgtttcaaggcaaccttttctgcactttgctgcgaaaagcaaagggccttctatgaaggacaaaacttgcagaattgggtgtgtgggagagcaaaaaaatactgtagatcttcaaagagcatctccacaacccacagccttcttcccaatagtgttaactctgcatttttacagcgtagcatgtgtgtagtttttggctattactggtgtattatttgggggagggagggatggggaggggagaaagggagatgggtagcatcattttgattaacatttggggcctgataggggaaatggtgaagcaatggaaaagaacagacaactaatgatttgcttctatgtccagaatattttacctttaaaaaaatgtcattggcaccataaataaggactgtgagagactgtttaaaagctgtgaaagtctgaaacctataagccaaggtgttccctgcctaaacttattgctgttcccacaaaggactaagcctgttcataagttaccaaagttgccattttggagatggaaattgacgaggagggaaggtcttttattggagagtatacagtacaagcagatcattctgccttagaggtgctaattcccgaaattagaagaccctttcttttccagtaacgaagttataaatatcagcttgttcatccaagccactggctgaggtgttaggaagaggaagagggtggtagaggaggtaagacagtagggaaagacaagggcccatgctcttagtggggaaaactcttggagccgtttactttgagctttgaacactgaaaccattgttggcagggttcagtcactgacagcacaagtttcactgaattgatccaagagtttagtgatttcaaaagccttggtctcaggagaagattaaactttcatattgggcagtggttcactttaaaacacacacatacacacacaaaacaattttttaagaaatcctaataagtaacatacccaaaatgctctgtcttgagtcatgagaaccatcagttcttgatattgtctagacttgcatctagagctacgttgtaaaattcttttaggcatgtgttagatttctgtgtaaactttgtttaaatgtaaacttcatactacattgtcagtttttgtcttaataaaactatagatttataa

SEQ ID NO: 457761 - DNA, 2507 bp, Homo sapiens
  misc_feature (105)..(105): n is a, c, g, or t
  misc_feature (109)..(109): n is a, c, g, or t
  misc_feature (119)..(119): n is a, c, g, or t
  misc_feature (163)..(163): n is a, c, g, or t
  misc_feature (237)..(237): n is a, c, g, or t
  misc_feature (270)..(270): n is a, c, g, or t
gagatggagtctcgctccatcgcccaggctggatcgcagtggctggatctcggctcactgcaagctccgcctcccaagttcaagcaattcttgtctcagcctccngagnagctgggacnacaggcacctgccaccacgctcggctaatttttgcatttttagnagagacagggtttcaccttgttggtaagactggtctcgaacccctgacctcaggtgatccacccgcctcggccncccaaagtgctgggatgacaggcgtgagcgacngcccctggcccatatgttctaatattctaggttacaacgctctacgctgcaatctctccaccgttacagtttaaaaactataagtccctaccaccctcgcctactgtgcgtgcgcggcgcgcggcgcttcgggccttgtagtcttggacagacccccgaggcccatggtgccgtgcggcgggtcgttgcgcctgcgcggtgcgagcggcgggcagcgcagactgcgaggctcttttgttcggctgaggggagggccgttggccggggcctgcggtacgccgcttcagtgagggacgccactgcggccacccggcttgctgccttcctgggcgccactcccccaggcgacccgacgcgacgcgccagtagcgcagcaccgattcctctcgggctcttgggcgctgctctgagcagcgtcaccctttacaccagaaagctggcgggcactatggggaaaaaacaaaacaagaagaaagtggaggaggtgctagaagaggaggaagaggaatatgtggtggaaaaagttctcgaccgtcgagtggtaaagggcaaagtggagtacctcctaaagtggaagggattctcagatgaggacaacacatgggagccagaagagaacctggattgccccgacctcattgctgagtttctgcagtcacagaaaacagcacatgagacagataaatcagagggaggcaagcgcaaagctgattctgattctgaagataagggagaggagagcaaaccaaagaagaagaaagaagagtcagaaaagccacgaggctttgctcgaggtttggagccggagcggattattggagctacagactccagtggagagctcatgttcctgatgaaatggaaaaactctgatgaggctgacctggtccctgccaaggaagccaatgtcaagtgcccacaggttgtcatatccttctatgaggaaaggctgacgtggcattcctacccctcggaggatgatgacaaaaaagatgacaagaactaacgctcctgagtaccagcccctgtcacatctgactgtgggtttcaagtgggaagggaaggagttctacttgtcttgacaccatagaggtggcttgagaagatgtcctttgaagagccagtatagtttctgtgccctgcagcagcccaagtgctttaaagccgtttcaagctgtatagtttgcacacccatcccagtggaggggaaaggggataagtgtttcaaggcaaccttttctgcactttgctgcgaaaagcaaagggccttctatgaaggacaaaacttgcagaattgggtgtgtgggagagcaaaaaaatactgtagatcttcaaagagcatctccacaacccacagccttcttcccaatagtgttaactctgcatttttacagcgtagcatgtgtgtagtttttggctattactggtgtattatttgggggagggagggatggggaggggagaaagggagatgggtagcatcattttgattaacatttggggcctgataggggaaatggtgaagcaatggaaaagaacagacaactaatgatttgcttctatgtccagaatattttacctttaaaaaaatgtcattggcaccataaataaggactgtgagagactgtttaaaagctgtgaaagtctgaaacctataagccaaggtgttccctgcctaaacttattgctgttcccacaaaggactaagcctgttcataagttaccaaagttgccattttggagatggaaattgacgaggagggaaggtcttttattggagagtatacagtacaagcagatcattctgccttagaggtgctaattcccgaaattagaagaccctttcttttccagtaacgaagttataaatatcagcttgttcatccaagccactggctgaggtgttaggaagaggaagagggtggtagaggaggtaagacagtagggaaagacaagggcccatgctcttagtggggaaaactcttggagccgtttactttgagctttgaacactgaaaccattgttggcagggttcagtcactgacagcacaagtttcactgaattgatccaagagtttagtgatttcaaaagccttggtctcaggagaagattaaactttcatattgggcagtggttcacaccccctaccccacaaacattttaagaatctatagttaatacccaatgcctgcttggtctgaacccgttgattggttactggttaagccgtggtat

SEQ ID NO: 457762 - DNA, 2417 bp, Homo sapiens
  misc_feature (105)..(105): n is a, c, g, or t
  misc_feature (109)..(109): n is a, c, g, or t
  misc_feature (119)..(119): n is a, c, g, or t
  misc_feature (163)..(163): n is a, c, g, or t
  misc_feature (237)..(237): n is a, c, g, or t
  misc_feature (270)..(270): n is a, c, g, or t
gagatggagtctcgctccatcgcccaggctggatcgcagtggctggatctcggctcactgcaagctccgcctcccaagttcaagcaattcttgtctcagcctccngagnagctgggacnacaggcacctgccaccacgctcggctaatttttgcatttttagnagagacagggtttcaccttgttggtaagactggtctcgaacccctgacctcaggtgatccacccgcctcggccncccaaagtgctgggatgacaggcgtgagcgacngcccctggcccatatgttctaatattctaggttacaacgctctacgctgcaatctctccaccgttacagtttaaaaactataagtccctaccaccctcgcctactgtgcgtgcgcggcgcgcggcgcttcgggccttgtagtcttggacagacccccgaggcccatggtgccgtgcggcgggtcgttgcgcctgcgcggtgcgagcggcgggcagcgcagactgcgaggctcttttgttcggctgaggggagggccgttggccggggcctgcggtacgccgcttcagtgagggacgccactgcggccacccggcttgctgccttcctgggcgccactcccccaggcgacccgacgcgacgcgccagtagcgcagcaccgattcctctcgggctcttgggcgctgctctgagcagcgtcaccctttacaccagaaagctggcgggcactatggggaaaaaacaaaacaagaagaaagtggaggaggtgctagaagaggaggaagaggaatatgtggtggaaaaagttctcgaccgtcgagtggtaaagggcaaagtggagtacctcctaaagtggaagggattctcagatgaggacaacacatgggagccagaagagaacctggattgccccgacctcattgctgagtttctgcagtcacagaaaacagcacatgagacagataaatcagagggaggcaagcgcaaagctgattctgattctgaagataagggagaggagagcaaaccaaagaagaagaaagaagagtcagaaaagccacgaggctttgctcgaggtttggagccggagcggattattggagctacagactccagtggagagctcatgttcctgatgaaatggaaaaactctgatgaggctgacctggtccctgccaaggaagccaatgtcaagtgcccacaggttgtcatatccttctatgaggaaaggctgacgtggcattcctacccctcggaggatgatgacaaaaaagatgacaagaactaacgctcctgagtaccagcccctgtcacatctgactgtgggtttcaagtgggaagggaaggagttctacttgtcttgacaccatagaggtggcttgagaagatgtcctttgaagagccagtatagtttctgtgccctgcagcagcccaagtgctttaaagccgtttcaagctgtatagtttgcacacccatcccagtggaggggaaaggggataagtgtttcaaggcaaccttttctgcactttgctgcgaaaagcaaagggccttctatgaaggacaaaacttgcagaattgggtgtgtgggagagcaaaaaaatactgtagatcttcaaagagcatctccacaacccacagccttcttcccaatagtgttaactctgcatttttacagcgtagcatgtgtgtagtttttggctattactggtgtattatttgggggagggagggatggggaggggagaaagggagatgggtagcatcattttgattaacatttggggcctgataggggaaatggtgaagcaatggaaaagaacagacaactaatgatttgcttctatgtccagaatattttacctttaaaaaaatgtcattggcaccataaataaggactgtgagagactgtttaaaagctgtgaaagtctgaaacctataagccaaggtgttccctgcctaaacttattgctgttcccacaaaggactaagcctgttcataagttaccaaagttgccattttggagatggaaattgacgaggagggaaggtcttttattggagagtatacagtacaagcagatcattctgccttagaggtgctaattcccgaaattagaagaccctttcttttccagtaacgaagttataaatatcagcttgttcatccaagccactggctgaggtgttaggaagaggaagagggtggtagaggaggtaagacagtagggaaagacaagggcccatgctcttagtggggaaaactcttggagccgtttactttgagctttgaacactgaaaccattgttggcagggttcagtcactgacagcacaagtttcactgaattgatccaagagtttagtgatttcaaaagccttggtctcccactcccgtaccagaatcaagcttatcgaaccgtcgactcgac

SEQ ID NO: 457763 - DNA, 2652 bp, Homo sapiens
  misc_feature (105)..(105): n is a, c, g, or t
  misc_feature (109)..(109): n is a, c, g, or t
  misc_feature (119)..(119): n is a, c, g, or t
  misc_feature (163)..(163): n is a, c, g, or t
  misc_feature (237)..(237): n is a, c, g, or t
  misc_feature (270)..(270): n is a, c, g, or t
gagatggagtctcgctccatcgcccaggctggatcgcagtggctggatctcggctcactgcaagctccgcctcccaagttcaagcaattcttgtctcagcctccngagnagctgggacnacaggcacctgccaccacgctcggctaatttttgcatttttagnagagacagggtttcaccttgttggtaagactggtctcgaacccctgacctcaggtgatccacccgcctcggccncccaaagtgctgggatgacaggcgtgagcgacngcccctggcccatatgttctaatattctaggttacaacgctctacgctgcaatctctccaccgttacagtttaaaaactataagtccctaccaccctcgcctactgtgcgtgcgcggcgcgcggcgcttcgggccttgtagtcttggacagacccccgaggcccatggtgccgtgcggcgggtcgttgcgcctgcgcggtgcgagcggcgggcagcgcagactgcgaggctcttttgttcggctgaggggagggccgttggccggggcctgcggtacgccgcttcagtgagggacgccactgcggccacccggcttgctgccttcctgggcgccactcccccaggcgacccgacgcgacgcgccagtagcgcagcaccgattcctctcgggctcttgggcgctgctctgagcagcgtcaccctttacaccagaaagctggcgggcactatggggaaaaaacaaaacaagaagaaagtggaggaggtgctagaagaggaggaagaggaatatgtggtggaaaaagttctcgaccgtcgagtggtaaagggcaaagtggagtacctcctaaagtggaagggattctcagatgaggacaacacatgggagccagaagagaacctggattgccccgacctcattgctgagtttctgcagtcacagaaaacagcacatgagacagataaatcagagggaggcaagcgcaaagctgattctgattctgaagataagggagaggagagcaaaccaaagaagaagaaagaagagtcagaaaagccacgaggctttgctcgaggtttggagccggagcggattattggagctacagactccagtggagagctcatgttcctgatgaaatggaaaaactctgatgaggctgacctggtccctgccaaggaagccaatgtcaagtgcccacaggttgtcatatccttctatgaggaaaggctgacgtggcattcctacccctcggaggatgatgacaaaaaagatgacaagaactaacgctcctgagtaccagcccctgtcacatctgactgtgggtttcaagtgggaagggaaggagttctacttgtcttgacaccatagaggtggcttgagaagatgtcctttgaagagccagtatagtttctgtgccctgcagcagcccaagtgctttaaagccgtttcaagctgtatagtttgcacacccatcccagtggaggggaaaggggataagtgtttcaaggcaaccttttctgcactttgctgcgaaaagcaaagggccttctatgaaggacaaaacttgcagaattgggtgtgtgggagagcaaaaaaatactgtagatcttcaaagagcatctccacaacccacagccttcttcccaatagtgttaactctgcatttttacagcgtagcatgtgtgtagtttttggctattactggtgtattatttgggggagggagggatggggaggggagaaagggagatgggtagcatcattttgattaacatttggggcctgataggggaaatggtgaagcaatggaaaagaacagacaactaatgatttgcttctatgtccagaatattttacctttaaaaaaatgtcattggcaccataaataaggactgtgagagactgtttaaaagctgtgaaagtctgaaacctataagccaaggtgttccctgcctaaacttattgctgttcccacaaaggactaagcctgttcataagttaccaaagttgccattttggagatggaaattgacgaggagggaaggtcttttattggagagtatacagtacaagcagatcattctgccttagaggtgctaattcccgaaattagaagaccctttcttttccagtaacgaagttataaatatcagcttgttcatccaagccactggctgaggtgttaggaagaggaagagggtggtagaggaggtaagacagtagggaaagacaagggcccatgctcttagtggggaaaactcttggagccgtttactttgagctttgaacactgaaaccattgttggcagggttcagtcactgacagcacaagtttcactgaattgatccaagagtttagtgatttcaaaagccttggtctcaggagaagattaaactttcatattgggcagtggttcactttaaaacacacacatacacacacaaaacaattttttaagaaatcctaataagtaacatacccaaaatgctctgtcttgagtcatgagaaccatcagttcttgatattgtctagacttgcatctagagctacgttgtaaaattcttttaggcatgtgttagatttctgtgtaaactttgtttaaatgtaaacttcatactacattgtcagtttttgtcttaataaaactatagatttataa

SEQ ID NO: 457764 - DNA, 3165 bp, Homo sapiens
  misc_feature (105)..(105): n is a, c, g, or t
  misc_feature (109)..(109): n is a, c, g, or t
  misc_feature (119)..(119): n is a, c, g, or t
  misc_feature (163)..(163): n is a, c, g, or t
  misc_feature (237)..(237): n is a, c, g, or t
  misc_feature (270)..(270): n is a, c, g, or t
gagatggagtctcgctccatcgcccaggctggatcgcagtggctggatctcggctcactgcaagctccgcctcccaagttcaagcaattcttgtctcagcctccngagnagctgggacnacaggcacctgccaccacgctcggctaatttttgcatttttagnagagacagggtttcaccttgttggtaagactggtctcgaacccctgacctcaggtgatccacccgcctcggccncccaaagtgctgggatgacaggcgtgagcgacngcccctggcccatatgttctaatattctaggttacaacgctctacgctgcaatctctccaccgttacagtttaaaaactataagtccctaccaccctcgcctactgtgcgtgcgcggcgcgcggcgcttcgggccttgtagtcttggacagacccccgaggcccatggtgccgtgcggcgggtcgttgcgcctgcgcggtgcgagcggcgggcagcgcagactgcgaggctcttttgttcggctgaggggagggccgttggccggggcctgcggtacgccgcttcagtgagggacgccactgcggccacccggcttgctgccttcctgggcgccactcccccaggcgacccgacgcgacgcgccagtagcgcagcaccgattcctctcgggctcttgggcgctgctctgaggtgaggagcccgctggaggcgggagagctgggggagggggcgcggcggcggcggcggcgggagccctgcgtgagggaacgcgctttcgaggcggaggttaggagcggggagcgcgcccgggtccagcgtcctgcttctccgcttcccgcgctgagctcttcgcctgtcgctgaggcgtcggtgccagctgcgtgaaggatggagagggcggggcgcgaatcctgagccagagactgagtgcttgggggtgggccgagcacttgggggccgctcttcggggcccgggtggtctggaacaatgttgcttggctgggcggctgcgggatagggcggaaggggacaggcttgaggcttggataggcgtgaggaggcgcatacgaccgcacaacccgaggtttgtaactgtattcggaagacgccgggtccggctgggactgccagaggaacctggctttgcaggactacggaggagtaacgtcgagtgaattggaagagggcccagggccgcacaagcagcgtcaccctttacaccagaaagctggcgggcactatggggaaaaaacaaaacaagaagaaagtggaggaggtgctagaagaggaggaagaggaatatgtggtggaaaaagttctcgaccgtcgagtggtaaagggcaaagtggagtacctcctaaagtggaagggattctcagatgaggacaacacatgggagccagaagagaacctggattgccccgacctcattgctgagtttctgcagtcacagaaaacagcacatgagacagataaatcagagggaggcaagcgcaaagctgattctgattctgaagataagggagaggagagcaaaccaaagaagaagaaagaagagtcagaaaagccacgaggctttgctcgaggtttggagccggagcggattattggagctacagactccagtggagagctcatgttcctgatgaaatggaaaaactctgatgaggctgacctggtccctgccaaggaagccaatgtcaagtgcccacaggttgtcatatccttctatgaggaaaggctgacgtggcattcctacccctcggaggatgatgacaaaaaagatgacaagaactaacgctcctgagtaccagcccctgtcacatctgactgtgggtttcaagtgggaagggaaggagttctacttgtcttgacaccatagaggtggcttgagaagatgtcctttgaagagccagtatagtttctgtgccctgcagcagcccaagtgctttaaagccgtttcaagctgtatagtttgcacacccatcccagtggaggggaaaggggataagtgtttcaaggcaaccttttctgcactttgctgcgaaaagcaaagggccttctatgaaggacaaaacttgcagaattgggtgtgtgggagagcaaaaaaatactgtagatcttcaaagagcatctccacaacccacagccttcttcccaatagtgttaactctgcatttttacagcgtagcatgtgtgtagtttttggctattactggtgtattatttgggggagggagggatggggaggggagaaagggagatgggtagcatcattttgattaacatttggggcctgataggggaaatggtgaagcaatggaaaagaacagacaactaatgatttgcttctatgtccagaatattttacctttaaaaaaatgtcattggcaccataaataaggactgtgagagactgtttaaaagctgtgaaagtctgaaacctataagccaaggtgttccctgcctaaacttattgctgttcccacaaaggactaagcctgttcataagttaccaaagttgccattttggagatggaaattgacgaggagggaaggtcttttattggagagtatacagtacaagcagatcattctgccttagaggtgctaattcccgaaattagaagaccctttcttttccagtaacgaagttataaatatcagcttgttcatccaagccactggctgaggtgttaggaagaggaagagggtggtagaggaggtaagacagtagggaaagacaagggcccatgctcttagtggggaaaactcttggagccgtttactttgagctttgaacactgaaaccattgttggcagggttcagtcactgacagcacaagtttcactgaattgatccaagagtttagtgatttcaaaagccttggtctcaggagaagattaaactttcatattgggcagtggttcactttaaaacacacacatacacacacaaaacaattttttaagaaatcctaataagtaacatacccaaaatgctctgtcttgagtcatgagaaccatcagttcttgatattgtctagacttgcatctagagctacgttgtaaaattcttttaggcatgtgttagatttctgtgtaaactttgtttaaatgtaaacttcatactacattgtcagtttttgtcttaataaaactatagatttataa

SEQ ID NO: 457765 - DNA, 2764 bp, Homo sapiens
  misc_feature (105)..(105): n is a, c, g, or t
  misc_feature (109)..(109): n is a, c, g, or t
  misc_feature (119)..(119): n is a, c, g, or t
  misc_feature (163)..(163): n is a, c, g, or t
  misc_feature (237)..(237): n is a, c, g, or t
  misc_feature (270)..(270): n is a, c, g, or t
gagatggagtctcgctccatcgcccaggctggatcgcagtggctggatctcggctcactgcaagctccgcctcccaagttcaagcaattcttgtctcagcctccngagnagctgggacnacaggcacctgccaccacgctcggctaatttttgcatttttagnagagacagggtttcaccttgttggtaagactggtctcgaacccctgacctcaggtgatccacccgcctcggccncccaaagtgctgggatgacaggcgtgagcgacngcccctggcccatatgttctaatattctaggttacaacgctctacgctgcaatctctccaccgttacagtttaaaaactataagtccctaccaccctcgcctactgtgcgtgcgcggcgcgcggcgcttcgggccttgtagtcttggacagacccccgaggcccatggtgccgtgcggcgggtcgttgcgcctgcgcggtgcgagcggcgggcagcgcagactgcgaggctcttttgttcggctgaggggagggccgttggccggggcctgcggtacgccgcttcagtgagggacgccactgcggccacccggcttgctgccttcctgggcgccactcccccaggcgacccgacgcgacgcgccagtagcgcagcaccgattcctctcgggctcttgggcgctgctctgagcagcgtcaccctttacaccagaaagctggcgggcactatggggaaaaaacaaaacaagaagaaagtggaggaggtgctagaagaggaggaagaggaatatgtggtggaaaaagttctcgaccgtcgagtggtaaagggcaaagtggagtacctcctaaagtggaagggattctcagatgaggacaacacatgggagccagaagagaacctggattgccccgacctcattgctgagtttctgcagtcacagaaaacagcacatgagacagataaatcagagggaggcaagcgcaaagctgattctgattctgaagataagggagaggagagcaaaccaaagaagaagaaagaagagtcagaaaagccacgaggctttgctcgaggtttggagccggagcggattattggagctacagactccagtggagagctcatgttcctgatgaaatggaaaaactctgatgaggctgacctggtccctgccaaggaagccaatgtcaagtgcccacaggttgtcatatccttctatgaggaaaggctgacgtggcattcctacccctcggaggatgatgacaaaaaagatgacaagaactaacgctcctgagtaccagcccctgtcacatctgactgtgggtttcaagtgggaagggaaggagttctacttgtcttgacaccatagaggtggcttgagaagatgtcctttgaagagccagtatagtttctgtgccctgcagcagcccaagtgctttaaagccgtttcaagctgtatagtttgcacacccatcccagtggaggggaaaggggataagtgtttcaaggcaaccttttctgcactttgctgcgaaaagcaaagggccttctatgaaggacaaaacttgcagaattgggtgtgtgggagagcaaaaaaatactgtagatcttcaaagagcatctccacaacccacagccttcttcccaatagtgttaactctgcatttttacagcgtagcatgtgtgtagtttttggctattactggtgtattatttgggggagggagggatggggaggggagaaagggagatgggtagcatcattttgattaacatttggggcctgataggggaaatggtgaagcaatggaaaagaacagacaactaatgatttgcttctatgtccagaatattttacctttaaaaaaatgtcattggcaccataaataaggactgtgagagactgtttaaaagctgtgaaagtctgaaacctataagccaaggtgttccctgcctaaacttattgctgttcccacaaaggactaagcctgttcataagttaccaaagttgccattttggagatggaaattgacgaggagggaaggtcttttattggagagtatacagtacaagcagatcattctgccttagaggtgctaattcccgaaattagaagaccctttcttttccagtaacgaagttataaatatcagcttgttcatccaagccactggctgaggtgttaggaagaggaagagggtggtagaggaggtaagacagtagggaaagacaagggcccatgctcttagtggggaaaactcttggagccgtttactttgagctttgaacactgaaaccattgttggcagggttcagtcactgacagcacaagtttcactgaattgatccaagagtttagtgatttcaaaagccttggtctcaggagaagattaaactttcatattgggcagtggttcactttaaaacacacacatacacacacaaaacaattttttaagaaatcctaataagtaacatacccaaaatgctctgtcttgagtcatgagaaccatcagttcttgatattgtctagacttgcatctagagctacgttgtaaaattcttttaggcatgtgttagatttctgtgtaaactttgtttaaatgtaaacttcatactacattgtcagtttttgtcttaataaaactatagatttataaaaaaaacacaaaaaaagaaaaagacaaaaagacggacgagagaaaacaacacggggaagagccgctaacgggaaggggccagccagagaaaaggggggggggggccaaaatg

SEQ ID NO: 457766 - DNA, 2254 bp, Homo sapiens
aatcagcagttttaagttctccaggttatattttaacattgtgttcatatgcaaaacaaaggttgtgaatcagcacgaatgctggcaagccctggaaggtttgtgatcacggactttcacgagaccccaaggcaaggagagacagaagcccaggacaacagcatgggcgccgctttttagtcgggcgccgctttttggtcaggcgccacctggactacatttcccatatccaattgccgggctcctgcaggattggccagaacaacgcggaagtgattacgggtcgcccagcaacgggcggagtcctggcccgaaactggatgcgcacgccccttccctgcggcggggaggctgacaaggctccgctctatctctagcgcctcggagcgctctccggctttgctgtctagcccggcggcagcgcgatctcttaggcactttcaccgccttcctctccaggccctgcccctttgacgccggccgtcgcgatattgcggagactggatttcagcttcgtggtcggcggagcggcccctggagggcgcagtgcgcaggcgtgagcggtcgggccccgacgcgcgcgggtctcgtttggagcgggagtgagttcctgagcgagtggacccggcagcgggcgataggggggccaggtgcctccacagtcagccatggcagcgctgcgctacgcggggctggacgacacggacagtgaggacgagctgcctccgggctgggaggagagaaccaccaaggacggctgggtttactacgccaatcacaccgaggagaagactcagtgggaacatccaaaaactggaaaaagaaaacgagtggcaggagatttgccatacggatgggaacaagaaactgatgagaacggacaagtgttttttgttgaccatataaataaaagaaccacctacttggacccaagactggcgtttactgtggatgataatccgaccaagccaaccacccggcaaagatacgacggcagcaccactgccatggaaattctccagggccgggatttcactggcaaagtggttgtggtcactggagctaattcaggaatagggttcgaaaccgccaagtcttttgccctccatggtgcacatgtgatcttggcctgcaggaacatggcaagggcgagtgaagcagtgtcacgcattttagaagaatggcaacagggagctgccaccaccgtgtactgtgctgctgtcccagaactggagggtctgggagggatgtacttcaacaactgctgccgctgcatgccctcaccagaagctcagagcgaagagacggcccggaccctgtgggcgctcagcgagaggctgatccaagaacggcttggcagccagtccggctaagtggagctcagagcggatgggcacacacacccgccctgtgtgtgtcccctcacgcaagtgccagggctgggccccttccaaatgtccctccaacacagatccgcaagagtaaaggaaataagagcagtcacaacagagtgaaaaatcttaagtaccaatgggaagcagggaattcctggggtaaagtatcacttttctggggctgggctaggcataggtctctttgctttctggtggtggcctgtttgaaagtaaaaacctgcttggtgtgtaggttccgtatctccctggagaagcaccagcaattctctttcttttactgttatagaatagcctgaggtcccctcgtcccatccagctaccaccacggccaccactgcagccgggggctggccttctcctacttagggaagaaaaagcaagtgttcactgctccttgctgcattgatccaggagataattgtttcattcatcctgaccaagactgagccagcttagcaactgctggggagacaaatctcagaaccttgtcccagccagtgaggatgacagtgacacccagagggagtagaatacgcagaactaccaggtggcaaagtacttgtcatagactcctttgctaatgctatacaaaaaattctttagagattataacaaatttttcaaatcattccttagataccttgaaaggcaggaagggaagcgtatatacttaagaatacacaggatattttggggggcagagaataaaacgttagttaatccctttgtctgtcaatcacagtctcagttctcttgctttcacattgtacttaaacctcctgctgtgcctcgcatcctacgcttaataaaagaacatgcttgaatatcatcacctgaag

SEQ ID NO: 457767 - DNA, 1808 bp, Homo sapiens
aatcagcagttttaagttctccaggttatattttaacattgtgttcatatgcaaaacaaaggttgtgaatcagcacgaatgctggcaagccctggaaggtttgtgatcacggactttcacgagaccccaaggcaaggagagacagaagcccaggacaacagcatgggcgccgctttttagtcgggcgccgctttttggtcaggcgccacctggactacatttcccatatccaattgccgggctcctgcaggattggccagaacaacgcggaagtgattacgggtcgcccagcaacgggcggagtcctggcccgaaactggatgcgcacgccccttccctgcggcggggaggctgacaaggctccgctctatctctagcgcctcggagcgctctccggctttgctgtctagcccggcggcagcgcgatctcttaggcactttcaccgccttcctctccaggccctgcccctttgacgccggccgtcgcgatattgcggagactggatttcagcttcgtggtcggcggagcggcccctggagggcgcagtgcgcaggcgtgagcggtcgggccccgacgcgcgcgggtctcgtttggagcgggagtgagttcctgagcgagtggacccggcagcgggcgataggggggccaggtgcctccacagtcagccatggcagcgctgcgctacgcggggctggacgacacggacagtgaggacgagctgcctccgggctgggaggagagaaccaccaaggacggctgggtttactacgccaatcacaccgaggagaagactcagtgggaacatccaaaaactggaaaaagaaaacgagtggcaggagatttgccatacggatgggaacaagaaactgatgagaacggacaagtgttttttgttgaccatataaataaaagaaccacctacttggacccaagactggcgtttactgtggatgataatccgaccaagccaaccacccggcaaagatacgacggcagcaccactgccatggaaattctccagggccgggatttcactggcaaagtggttgtggtcactggagctaattcaggaatagggttcgaaaccgccaagtcttttgccctccatggtgcacatgtgatcttggcctgcaggaacatggcaagggcgagtgaagcagtgtcacgcattttagaagaatggcataaagccaaggtagaaacaatgaccctggacctcgctctgctccgtagcgtgcagcattttgctgaagcattcaaggccaagaatgtgcctcttcatgtgcttgtgtgcaacgcagcaacttttgctctaccctggagtctcaccaaagatggcctggagaccacctttcaagtgaatcatctggggcacttctaccttgtccagctcctccaggatgttttgtgccgctcagctcctgcccgtgtcattgtggtctcctcagagtcccatcgatttacagatattaacgactccttgggaaaactggacttcagtcgcctctctccaacaaaaaacgactattgggcgatgctggcttataacaggtccaagctctgcaacatcctcttctccaacgagctgcaccgtcgcctctccccacgcggggtcacgtcgaacgcagtgcatcctggaaatatgatgtactccaacattcatcgcagctggtgggtgtacacactgctgtttaccttggcgaggcctttcaccaagtccatggtttcagactgcctggtagaaggaggtcacttctgattgtcagtgactttgagctgagtgctgaaataaaatgataaacaagtc

SEQ ID NO: 457768 - DNA, 1301 bp, Homo sapiens
aatcagcagttttaagttctccaggttatattttaacattgtgttcatatgcaaaacaaaggttgtgaatcagcacgaatgctggcaagccctggaaggtttgtgatcacggactttcacgagaccccaaggcaaggagagacagaagcccaggacaacagcatgggcgccgctttttagtcgggcgccgctttttggtcaggcgccacctggactacatttcccatatccaattgccgggctcctgcaggattggccagaacaacgcggaagtgattacgggtcgcccagcaacgggcggagtcctggcccgaaactggatgcgcacgccccttccctgcggcggggaggctgacaaggctccgctctatctctagcgcctcggagcgctctccggctttgctgtctagcccggcggcagcgcgatctcttaggcactttcaccgccttcctctccaggccctgcccctttgacgccggccgtcgcgatattgcggagactggatttcagcttcgtggtcggcggagcggcccctggagggcgcagtgcgcaggcgtgagcggtcgggccccgacgcgcgcgggtctcgtttggagcgggagtgagttcctgagcgagtggacccggcagcgggcgataggggggccaggtgcctccacagtcagccatggcagcgctgcgctacgcggggctggacgacacggacagtgaggacgagctgcctccgggctgggaggagagaaccaccaaggacggctgggtttactacgccaatcacaccgaggagaagactcagtgggaacatccaaaaactggaaaaagaaaacgagtggcaggagatttgccatacggatgggaacaagaaactgatgagaacggacaagtgttttttgttgaccatataaataaaagaaccacctacttggacccaagactggcgtttactgtggatgataatccgaccaagccaaccacccggcaaagatacgacggcagcaccactgccatggaaattctccagggccgggatttcactggcaaagtggttgtggtcactggagctaattcaggaatagggttcgaaaccgccaagtcttttgccctccatggtgcacatgtgatcttggcctgcaggaacatggcaagggcgagtgaagcagtgtcacgcattttagaagaatggaaaacaaaataccaccctccgccagaaaagtgcagaataaaaattttccactagcaaaagaaggaaaaaataaaagatcttgaatagtctcatcaattacatcttcttttgtgggta

SEQ ID NO: 457769 - DNA, 1233 bp, Homo sapiens
  misc_feature (1021)..(1022): n is a, c, g, or t
gagtttgggatggcaggggagcagttcagctcgtgagaatcggttcgaaaccgccaagtcttttgccctccatggtgcacatgtgatcttggcctgcaggaacatggcaagggcgagtgaagcagtgtcacgcattttagaagaatggatgaaagactgagtcttagggaacaaacagccgagagatgaaatgccacagggatgtctaggttcaaacagcaacagagagagaaggagaaattcctgcagatcatcagggagcgatgcgtaactgaactttggaatggatacagtgctactctcagctgaaagcacaaatcacttccatcacgtatatgagattcctcttgcagcactgcagaggggtgataagcaagagttgatcgatgacagaacacccacccaatttcttgactcattcttcaacgggcagggtctatacatgtggtatggctgcaatgtttgttgataacccctacattcacaaaacgggcgcatgggaacttgtttgctgccttctgccatgtgaggacacagcaagaaagcacatacaggaagtagagatggagccctcattagacgccagatctgctggtgccatgatcttggacttcccagcctctagaactatgtgggaattgaggtgtagagctgttgaagaacttgcccagggttgcagagctctttcacaggggcagagcatgggctgaacaccagacctgtctcacactaaagcatgtaagaagtgcctttgcctcctgccatgattctgaggcctcctcagccatgtggaactagctgtgtaatattccacaacccagaggagcagcttgaagccagctaaactgtcattggttggacacagtgatcctcgggtctcttgtgttttcacatgtcttgggaacagaagtgctggcagctttggtttcaggccatctttccaaggaacgttgtctagcaaagaaacttgcaaggtacagatagtgtctccctcaggagcagaggacaggatgctttcttnnaggtataataaagacagtgcctccttccaggacaacggtttggcagatttgcttgataaaggttggggtttgtaagcttggggctcctcagccatgactgaaacgtactatgagcacggcatctaccgggctgttccacatcctccctgtgggactaggggccagggcaatgggaatcagtgcagaaataaagctcatgctgtttgctctg

SEQ ID NO: 457770 - DNA, 1187 bp, Homo sapiens
gtaccccaagctggtttgggtttataccagtttgaaccgagggaccttcagctgaggaacatgtgctctgtgtgctggaagctcctggaggccccagggttatctctgctcacttagcaacagggagctgccaccaccgtgtactgtgctgctgtcccagaactggagggtctgggagggatgtacttcaacaactgctgccgctgcatgccctcaccagaagctcagagcgaagagacggcccggaccctgtgggcgctcagcgagaggctgatccaagaacggcttggcagccagtccggctaagtggagctcagagcggatgggcacacacacccgccctgtgtgtgtcccctcacgcaagtgccagggctgggccccttccaaatgtccctccaacacagatccgcaagagtaaaggaaataagagcagtcacaacagagtgaaaaatcttaagtaccaatgggaagcagggaattcctggggtaaagtatcacttttctggggctgggctaggcataggtctctttgctttctggtggtggcctgtttgaaagtaaaaacctgcttggtgtgtaggttccgtatctccctggagaagcaccagcaattctctttcttttactgttatagaatagcctgaggtcccctcgtcccatccagctaccaccacggccaccactgcagccgggggctggccttctcctacttagggaagaaaaagcaagtgttcactgctccttgctgcattgatccaggagataattgtttcattcatcctgaccaagactgagccagcttagcaactgctggggagacaaatctcagaaccttgtcccagccagtgaggatgacagtgacacccagagggagtagaatacgcagaactaccaggtggcaaagtacttgtcatagactcctttgctaatgctatacaaaaaattctttagagattataacaaatttttcaaatcattccttagataccttgaaaggcaggaagggaagcgtatatacttaagaatacacaggatattttggggggcagagaataaaacgttagttaatccctttgtctgtcaatcacagtctcagttctcttgctttcacattgtacttaaacctcctgctgtgcctcgcatcctacgcttaataaaagaacatgcttgaatatcatcacctgaag

SEQ ID NO: 457771 - DNA, 602 bp, Homo sapiens
ccttctacgtccttctacgtctcatcactgccttctacgtctcatcactgccttctacgtccttctacgtctcatcactgccttctacgtctcatcactgcagccgggggctggccttctcctacttagggaagaaaaagcaagtgttcactgctccttgctgcattgatccaggagataattgtttcattcatcctgaccaagactgagccagcttagcaactgctggggagacaaatctcagaaccttgtcccagccagtgaggatgacagtgacacccagagggagtagaatacgcagaactaccaggtggcaaagtacttgtcatagactcctttgctaatgctatacaaaaaattctttagagattataacaaatttttcaaatcattccttagataccttgaaaggcaggaagggaagcgtatatacttaagaatacacaggatattttggggggcagagaataaaacgttagttaatccctttgtctgtcaatcacagtctcagttctcttgctttcacattgtacttaaacctcctgctgtgcctcgcatcctacgcttaataaaagaacatgcttgaatatcatcacctgaag

SEQ ID NO: 457772 - DNA, 2794 bp, Homo sapiens
aatcagcagttttaagttctccaggttatattttaacattgtgttcatatgcaaaacaaaggttgtgaatcagcacgaatgctggcaagccctggaaggtttgtgatcacggactttcacgagaccccaaggcaaggagagacagaagcccaggacaacagcatgggcgccgctttttagtcgggcgccgctttttggtcaggcgccacctggactacatttcccatatccaattgccgggctcctgcaggattggccagaacaacgcggaagtgattacgggtcgcccagcaacgggcggagtcctggcccgaaactggatgcgcacgccccttccctgcggcggggaggctgacaaggctccgctctatctctagcgcctcggagcgctctccggctttgctgtctagcccggcggcagcgcgatctcttaggcactttcaccgccttcctctccaggccctgcccctttgacgccggccgtcgcgatattgcggagactggatttcagcttcgtggtcggcggagcggcccctggagggcgcagtgcgcaggcgtgagcggtcgggccccgacgcgcgcgggtctcgtttggagcgggagtgagttcctgagcgagtggacccggcagcgggcgataggggggccaggtgcctccacagtcagccatggcagcgctgcgctacgcggggctggacgacacggacagtgaggacgagctgcctccgggctgggaggagagaaccaccaaggacggctgggtttactacgccaatcacaccgaggagaagactcagtgggaacatccaaaaactggaaaaagaaaacgagtggcaggagatttgccatacggatgggaacaagaaactgatgagaacggacaagtgttttttgttgaccatataaataaaagaaccacctacttggacccaagactggcgtttactgtggatgataatccgaccaagccaaccacccggcaaagatacgacggcagcaccactgccatggaaattctccagggccgggatttcactggcaaagtggttgtggtcactggagctaattcaggaatagggttcgaaaccgccaagtcttttgccctccatggtgcacatgtgatcttggcctgcaggaacatggcaagggcgagtgaagcagtgtcacgcattttagaagaatggcataaagccaaggtagaaacaatgaccctggacctcgctctgctccgtagcgtgcagcattttgctgaagcattcaaggccaagaatgtgcctcttcatgtgcttgtgtgcaacgcagcaacttttgctctaccctggagtctcaccaaagatggcctggagaccacctttcaagtgaatcatctggggcacttctaccttgtccagctcctccaggatgttttgtgccgctcagctcctgcccgtgtcattgtggtctcctcagagtcccatcgatttacagatattaacgactccttgggaaaactggacttcagtcgcctctctccaacaaaaaacgactattgggcgatgctggcttataacaggtccaagctctgcaacatcctcttctccaacgagctgcaccgtcgcctctccccacgcggggtcacgtcgaacgcagtgcatcctggaaatatgatgtactccaacattcatcgcagctggtgggtgtacacactgctgtttaccttggcgaggcctttcaccaagtccatgcaacagggagctgccaccaccgtgtactgtgctgctgtcccagaactggagggtctgggagggatgtacttcaacaactgctgccgctgcatgccctcaccagaagctcagagcgaagagacggcccggaccctgtgggcgctcagcgagaggctgatccaagaacggcttggcagccagtccggctaagtggagctcagagcggatgggcacacacacccgccctgtgtgtgtcccctcacgcaagtgccagggctgggccccttccaaatgtccctccaacacagatccgcaagagtaaaggaaataagagcagtcacaacagagtgaaaaatcttaagtaccaatgggaagcagggaattcctggggtaaagtatcacttttctggggctgggctaggcataggtctctttgctttctggtggtggcctgtttgaaagtaaaaacctgcttggtgtgtaggttccgtatctccctggagaagcaccagcaattctctttcttttactgttatagaatagcctgaggtcccctcgtcccatccagctaccaccacggccaccactgcagccgggggctggccttctcctacttagggaagaaaaagcaagtgttcactgctccttgctgcattgatccaggagataattgtttcattcatcctgaccaagactgagccagcttagcaactgctggggagacaaatctcagaaccttgtcccagccagtgaggatgacagtgacacccagagggagtagaatacgcagaactaccaggtggcaaagtacttgtcatagactcctttgctaatgctatacaaaaaattctttagagattataacaaatttttcaaatcattccttagataccttgaaaggcaggaagggaagcgtatatacttaagaatacacaggatattttggggggcagagaataaaacgttagttaatccctttgtctgtcaatcacagtctcagttctcttgctttcacattgtacttaaacctcctgctgtgcctcgcatcctacgcttaataaaagaacatgcttgaatatcatcacctgaag

SEQ ID NO: 457773 - DNA, 2147 bp, Homo sapiens
aatcagcagttttaagttctccaggttatattttaacattgtgttcatatgcaaaacaaaggttgtgaatcagcacgaatgctggcaagccctggaaggtttgtgatcacggactttcacgagaccccaaggcaaggagagacagaagcccaggacaacagcatgggcgccgctttttagtcgggcgccgctttttggtcaggcgccacctggactacatttcccatatccaattgccgggctcctgcaggattggccagaacaacgcggaagtgattacgggtcgcccagcaacgggcggagtcctggcccgaaactggatgcgcacgccccttccctgcggcggggaggctgacaaggctccgctctatctctagcgcctcggagcgctctccggctttgctgtctagcccggcggcagcgcgatctcttaggcactttcaccgccttcctctccaggccctgcccctttgacgccggccgtcgcgatattgcggagactggatttcagcttcgtggtcggcggagcggcccctggagggcgcagtgcgcaggcgtgagcggtcgggccccgacgcgcgcgggtctcgtttggagcgggagtgagttcctgagcgagtggacccggcagcgggcgataggggggccaggtgcctccacagtcagccatggcagcgctgcgctacgcggggctggacgacacggacagtgaggacgagctgcctccgggctgggaggagagaaccaccaaggacggctgggtttactacgccaatcacaccgaggagaagactcagtgggaacatccaaaaactggaaaaagaaaacgagtggcaggagatttgccatacggatgggaacaagaaactgatgagaacggacaagtgttttttgttgaccatataaataaaagaaccacctacttggacccaagactggcgtttactgtggatgataatccgaccaagccaaccacccggcaaagatacgacggcagcaccactgccatggaaattctccagggccgggatttcactggcaaagtggttgtggtcactggagctaattcaggaatagcaacagggagctgccaccaccgtgtactgtgctgctgtcccagaactggagggtctgggagggatgtacttcaacaactgctgccgctgcatgccctcaccagaagctcagagcgaagagacggcccggaccctgtgggcgctcagcgagaggctgatccaagaacggcttggcagccagtccggctaagtggagctcagagcggatgggcacacacacccgccctgtgtgtgtcccctcacgcaagtgccagggctgggccccttccaaatgtccctccaacacagatccgcaagagtaaaggaaataagagcagtcacaacagagtgaaaaatcttaagtaccaatgggaagcagggaattcctggggtaaagtatcacttttctggggctgggctaggcataggtctctttgctttctggtggtggcctgtttgaaagtaaaaacctgcttggtgtgtaggttccgtatctccctggagaagcaccagcaattctctttcttttactgttatagaatagcctgaggtcccctcgtcccatccagctaccaccacggccaccactgcagccgggggctggccttctcctacttagggaagaaaaagcaagtgttcactgctccttgctgcattgatccaggagataattgtttcattcatcctgaccaagactgagccagcttagcaactgctggggagacaaatctcagaaccttgtcccagccagtgaggatgacagtgacacccagagggagtagaatacgcagaactaccaggtggcaaagtacttgtcatagactcctttgctaatgctatacaaaaaattctttagagattataacaaatttttcaaatcattccttagataccttgaaaggcaggaagggaagcgtatatacttaagaatacacaggatattttggggggcagagaataaaacgttagttaatccctttgtctgtcaatcacagtctcagttctcttgctttcacattgtacttaaacctcctgctgtgcctcgcatcctacgcttaataaaagaacatgcttgaatatcatcacctgaag

SEQ ID NO: 457774 - DNA, 1448 bp, Homo sapiens
aatcagcagttttaagttctccaggttatattttaacattgtgttcatatgcaaaacaaaggttgtgaatcagcacgaatgctggcaagccctggaaggtttgtgatcacggactttcacgagaccccaaggcaaggagagacagaagcccaggacaacagcatgggcgccgctttttagtcgggcgccgctttttggtcaggcgccacctggactacatttcccatatccaattgccgggctcctgcaggattggccagaacaacgcggaagtgattacgggtcgcccagcaacgggcggagtcctggcccgaaactggatgcgcacgccccttccctgcggcggggaggctgacaaggctccgctctatctctagcgcctcggagcgctctccggctttgctgtctagcccggcggcagcgcgatctcttaggcactttcaccgccttcctctccaggccctgcccctttgacgccggccgtcgcgatattgcggagactggatttcagcttcgtggtcggcggagcggcccctggagggcgcagtgcgcaggcgtgagcggtcgggccccgacgcgcgcgggtctcgtttggagcgggagtgagttcctgagcgagtggacccggcagcgggcgataggggggccaggtgcctccacagtcagccatggcagcgctgcgctacgcggggctggacgacacggacagtgaggacgagctgcctccgggctgggaggagagaaccaccaaggacggctgggtttactacgccaatcacaccgaggagaagactcagtgggaacatccaaaaactggaaaaagaaaacgagtggcaggagatttgccatacggatgggaacaagaaactgatgagaacggacaagtgttttttgttgaccatataaataaaagaaccacctacttggacccaagactggcgtttactgtggatgataatccgaccaagccaaccacccggcaaagatacgacggcagcaccactgccatggaaattctccagggccgggatttcactggcaaagtggttgtggtcactggagctaattcaggaatagggttcgaaaccgccaagtcttttgccctccatggtgcacatgtgatcttggcctgcaggaacatggcaagggcgagtgaagcagtgtcacgcattttagaagaatggaactaacatcagaatcatctgaatcatccagaatctgtgtattctcggacaaaatcggattcatcaaatgaatcttcagccaacaactgttcgagaatgatgtctccctcacatgcaggaatgctacattttcttggatttgacatttcagtgatggagaactatatattttgtcaatgggcaatccactactaagaacagaagggtatcatagatgatacctcccgttccaagtcgattgcctaagtgtgtgaccaccacacc

SEQ ID NO: 457775 - DNA, 2725 bp, Homo sapiens
aatcagcagttttaagttctccaggttatattttaacattgtgttcatatgcaaaacaaaggttgtgaatcagcacgaatgctggcaagccctggaaggtttgtgatcacggactttcacgagaccccaaggcaaggagagacagaagcccaggacaacagcatgggcgccgctttttagtcgggcgccgctttttggtcaggcgccacctggactacatttcccatatccaattgccgggctcctgcaggattggccagaacaacgcggaagtgattacgggtcgcccagcaacgggcggagtcctggcccgaaactggatgcgcacgccccttccctgcggcggggaggctgacaaggctccgctctatctctagcgcctcggagcgctctccggctttgctgtctagcccggcggcagcgcgatctcttaggcactttcaccgccttcctctccaggccctgcccctttgacgccggccgtcgcgatattgcggagactggatttcagcttcgtggtcggcggagcggcccctggagggcgcagtgcgcaggcgtgagcggtcgggccccgacgcgcgcgggtctcgtttggagcgggagtgagttcctgagcgagtggacccggcagcgggcgataggggggccaggtgcctccacagtcagccatggcagcgctgcgctacgcggggctggacgacacggacagtgaggacgagctgcctccgggctgggaggagagaaccaccaaggacggctgggtttactacgccaatcacaccgaggagaagactcagtgggaacatccaaaaactggaaaaagaaaacgagtggcaggagatttgccatacggatgggaacaagaaactgatgagaacggacaagtgttttttgttgaccatataaataaaagaaccacctacttggacccaagactggcgtttactgtggatgataatccgaccaagccaaccacccggcaaagatacgacggcagcaccactgccatggaaattctccagggccgggatttcactggcaaagtggttgtggtcactggagctaattcaggaatagggttcgaaaccgccaagtcttttgccctccatggtgcacatgtgatcttggcctgcaggaacatggcaagggcgagtgaagcagtgtcacgcattttagaagaatggcataaagccaaggtagaaacaatgaccctggacctcgctctgctccgtagcgtgcagcattttgctgaagcattcaaggccaagaatgtgcctcttcatgtgcttgtgtgcaacgcagcaacttttgctctaccctggagtctcaccaaagatggcctggagaccacctttcaagtgaatcatctggggcacttctaccttgtccagctcctccaggatgttttgtgccgctcagctcctgcccgtgtcattgtggtctcctcagagtcccatcgatttacagatattaacgactccttgggaaaactggacttcagtcgcctctctccaacaaaaaacgactattgggcgatgctggcttataacaggtccaagctctgcaacatcctcttctccaacgagctgcaccgtcgcctctccccacgcggggtcacgtcgaacgcagtgcatcctggaaatatgatgtactccaacattcatcgcagctggtgggtgtacacactgctgtttaccttggcgaggcctttcaccaagtccatgttcaacaactgctgccgctgcatgccctcaccagaagctcagagcgaagagacggcccggaccctgtgggcgctcagcgagaggctgatccaagaacggcttggcagccagtccggctaagtggagctcagagcggatgggcacacacacccgccctgtgtgtgtcccctcacgcaagtgccagggctgggccccttccaaatgtccctccaacacagatccgcaagagtaaaggaaataagagcagtcacaacagagtgaaaaatcttaagtaccaatgggaagcagggaattcctggggtaaagtatcacttttctggggctgggctaggcataggtctctttgctttctggtggtggcctgtttgaaagtaaaaacctgcttggtgtgtaggttccgtatctccctggagaagcaccagcaattctctttcttttactgttatagaatagcctgaggtcccctcgtcccatccagctaccaccacggccaccactgcagccgggggctggccttctcctacttagggaagaaaaagcaagtgttcactgctccttgctgcattgatccaggagataattgtttcattcatcctgaccaagactgagccagcttagcaactgctggggagacaaatctcagaaccttgtcccagccagtgaggatgacagtgacacccagagggagtagaatacgcagaactaccaggtggcaaagtacttgtcatagactcctttgctaatgctatacaaaaaattctttagagattataacaaatttttcaaatcattccttagataccttgaaaggcaggaagggaagcgtatatacttaagaatacacaggatattttggggggcagagaataaaacgttagttaatccctttgtctgtcaatcacagtctcagttctcttgctttcacattgtacttaaacctcctgctgtgcctcgcatcctacgcttaataaaagaacatgcttgaatatcatcacctgaag

SEQ ID NO: 457776 - DNA, 1312 bp, Homo sapiens
aatcagcagttttaagttctccaggttatattttaacattgtgttcatatgcaaaacaaaggttgtgaatcagcacgaatgctggcaagccctggaaggtttgtgatcacggactttcacgagaccccaaggcaaggagagacagaagcccaggacaacagcatgggcgccgctttttagtcgggcgccgctttttggtcaggcgccacctggactacatttcccatatccaattgccgggctcctgcaggattggccagaacaacgcggaagtgattacgggtcgcccagcaacgggcggagtcctggcccgaaactggatgcgcacgccccttccctgcggcggggaggctgacaaggctccgctctatctctagcgcctcggagcgctctccggctttgctgtctagcccggcggcagcgcgatctcttaggcactttcaccgccttcctctccaggccctgcccctttgacgccggccgtcgcgatattgcggagactggatttcagcttcgtggtcggcggagcggcccctggagggcgcagtgcgcaggcgtgagcggtcgggccccgacgcgcgcgggtctcgtttggagcgggagtgagttcctgagcgagtggacccggcagcgggcgataggggggccaggtgcctccacagtcagccatggcagcgctgcgctacgcggggctggacgacacggacagtgaggacgagctgcctccgggctgggaggagagaaccaccaaggacggctgggtttactacgccaagtaagggggccgcagtggggccgcggacgcacctgggaccctgcacagcccacggacgccacctgcgcggggaggacgcgcactccagcgcagcgcgtgcggtgcaaagtgaaagtaactgttaaggagcttcagggaaaagggtccagggttcccagtaggggccggcccccttggtgggcctcgggtccagcgggggtcacctggtggcttcccggcgcgccctctgctgttcaggatgcagcactgcgcggcgcggcgagggcaaagcggcctcatccccgccaaaaaataaagatgttttaaaaagcgcaaaaaaaaaaaacaacattctggaaagctttcctccagaaacactcgggggagcaatcctcttatgtgtaaccgggcaccgggtctaccagctttaaaggagcttgccccccccgtggcgaggaatgggccggaaacaaatcaagtggccccaaagggggggaacaatgtacccggacgaagcacgggatgtcaccaagcaagaagtggggacacgtatcgtta

SEQ ID NO: 457777 - DNA, 1665 bp, Homo sapiens
  misc_feature (27)..(27): n is a, c, g, or t
aaggccatcttattatgctacaccatntcgaacacccctctgcgtttaaaaacagtgtcggccggaatcggatgctgagagagctgagctggagttgccggggccccgggaccgggcgttccgggggcggtccccagcagccgcgcattccagagccagcagcgcgtcctggccgctcctgcgctctcccgcctcccggggctcggaggagccggggcacgttccaggagctgcctagggctgaggttccaggcctgggggtcgcttccagctgccagatcccgtgcagtcctggggaccctgagaagcaccgagccatccctgacccaggaactttccgcagactcgccgccatctgggagtgaagcaacatggatgcagtcagccaagtccccatggaagtcgtgcttcccaagcacatcctggatatctgggttattgtcctcatcatcctggccaccattgtcatcatgacctcgttgttgctgtgcccagccactgcagtaatcatctatcgcatgcggactcatccgatccttagtggggctgtttgagagcctcccaagagggccgggtgagggatgaggacaggcatcctatccccagcctcttcctgtcttcagaaaagcagcaggagggactttggggcatggacctgagttctggttttgattctgccacgagccagctgtgtgaatttggtcaagggacctaactctctgagttccaggttccttatctttcaaatggggatggtgatccctgccctttctacctcatagggatgtgagaaccacctgacttagtggatgtgaaagctgtttgtgatcagtaaagctaccacagatataagggtgttatgctgaatcctgagaagctttcaagaaccagagaacctgattgctgatgatggccttaaaggtggtgagggagatactgggggcagagcagactttgccagtgcccctcaggtcaaaccaagccaagagcaccctgtccccattccaaggggccagcagcactttggcccaaagtattttctttaaggtgccattccttcatgttttctcagtttggagggtgatgggtagagctttccagaaccttctccattccagaatctctgcccctgtgtaatctgaaggaaggctgtgccatctttgggcactgccaagggagttggggtgatgggcttctttctgcactggagtctcacatctgttagctttgacactcaagcaatgttggaaaatgcagggtgactgagttccctgcccagctttcgggatctctggcccccatccccttgtgtgtgtccctctgcccagctcctgctgtaattagctccacgtgtacccccttcactccctcccaccagctctgcagccagcctatggcaattatattttaagaggtgttcccaggacttttgggacctactaaaacaatgatggttattttagatgtgatgatttatatttatgtagagatatttctggaccactcaagctcttcgataccaaaatcaggagcatcttgggatttattaaattatgtaagaagatagcacagatatcgggatattattgtgtgaaaatgctgcttttactttgatgtgatctcattgatgtacacaaccaagttccaataaagtgctagaatgtg

SEQ ID NO: 457778 - DNA, 1934 bp, Homo sapiens
cacactggtcctctaaaccaatcctcacaacaggactgggagacaggtgttacctttcccactttacagagaatgaaacagagtggcaaagcctccgaaggaccctacacttcggacatcgcaaagcaggatctgagtcccggctcctctgtccaaacctacttgctaggctttctttcccatgtctactctatagctggaaaggtcgtggaggacacattttaggccaaccctctcggtttacaatccagagaggggagaccctcagaagccaagcgacatgtccacggctacgcggcgagtgtgtggcaacgtggaaggggagcccgagacgccctggtctctcccttctctcgcaggttcctttctccccgaacgcagcccgcaggggacgctggaggaggagctgagctggagttgccggggccccgggaccgggcgttccgggggcggtccccagcagccgcgcattccagagccagcagcgcgtcctggccgctcctgcgctctcccgcctcccggggctcggaggagccggggcacgttccaggagctgcctagggctgaggttccaggcctgggggtcgcttccagctgccagatcccgtgcagtcctggggaccctgagaagcaccgagccatccctgacccaggaactttccgcagactcgccgccatctgggagtgaagcaacatggatgcagtcagccaagtccccatggaagtcgtgcttcccaagcacatcctggatatctgggttattgtcctcatcatcctggccaccattgtcatcatgacctcgttgttgctgtgcccagccactgcagtaatcatctatcgcatgcggactcatccgatccttagtggggctgtttgagagcctcccaagagggccgggtgagggatgaggacaggcatcctatccccagcctcttcctgtcttcagccacgagccagctgtgtgaatttggtcaagggacctaactctctgagttccaggttccttatctttcaaatggggatggtgatccctgccctttctacctcatagggatgtgagaaccacctgacttagtggatgtgaaagctgtttgtgatcagtaaagctaccacagatataagggtgttatgctgaatcctgagaagctttcaagaaccagagaacctgattgctgatgatggccttaaaggtggtgagggagatactgggggcagagcagactttgccagtgcccctcaggtcaaaccaagccaagagcaccctgtccccattccaaggggccagcagcactttggcccaaagtattttctttaaggtgccattccttcatgttttctcagtttggagggtgatgggtagagctttccagaaccttctccattccagaatctctgcccctgtgtaatctgaaggaaggctgtgccatctttgggcactgccaagggagttggggtgatgggcttctttctgcactggagtctcacatctgttagctttgacactcaagcaatgttggaaaatgcagggtgactgagttccctgcccagctttcgggatctctggcccccatccccttgtgtgtgtccctctgcccagctcctgctgtaattagctccacgtgtacccccttcactccctcccaccagctctgcagccagcctatggcaattatattttaagaggtgttcccaggacttttgggacctactaaaacaatgatggttattttagatgtgatgatttatatttatgtagagatatttctggaccactcaagctcttcgataccaaaatcaggagcatcttgggatttattaaattatgtaagaagatagcacagatatcgggatattattgtgtgaaaatgctgcttttactttgatgtgatctcattgatgtacacaaccaagttccaataaagtgctagaatgtg

SEQ ID NO: 457779 - DNA, 1988 bp, Homo sapiens
cacactggtcctctaaaccaatcctcacaacaggactgggagacaggtgttacctttcccactttacagagaatgaaacagagtggcaaagcctccgaaggaccctacacttcggacatcgcaaagcaggatctgagtcccggctcctctgtccaaacctacttgctaggctttctttcccatgtctactctatagctggaaaggtcgtggaggacacattttaggccaaccctctcggtttacaatccagagaggggagaccctcagaagccaagcgacatgtccacggctacgcggcgagtgtgtggcaacgtggaaggggagcccgagacgccctggtctctcccttctctcgcaggttcctttctccccgaacgcagcccgcaggggacgctggaggaggagctgagctggagttgccggggccccgggaccgggcgttccgggggcggtccccagcagccgcgcattccagagccagcagcgcgtcctggccgctcctgcgctctcccgcctcccggggctcggaggagccggggcacgttccaggagctgcctagggctgaggttccaggcctgggggtcgcttccagctgccagatcccgtgcagtcctggggaccctgagaagcaccgagccatccctgacccaggaactttccgcagactcgccgccatctgggagtgaagcaacatggatgcagtcagccaagtccccatggaagtcgtgcttcccaagcacatcctggatatctgggttattgtcctcatcatcctggccaccattgtcatcatgacctcgttgttgctgtgcccagccactgcagtaatcatctatcgcatgcggactcatccgatccttagtggggctgtttgagagcctcccaagagggccgggtgagggatgaggacaggcatcctatccccagcctcttcctgtcttcagaaaagcagcaggagggactttggggcatggacctgagttctggttttgattctgccacgagccagctgtgtgaatttggtcaagggacctaactctctgagttccaggttccttatctttcaaatggggatggtgatccctgccctttctacctcatagggatgtgagaaccacctgacttagtggatgtgaaagctgtttgtgatcagtaaagctaccacagatataagggtgttatgctgaatcctgagaagctttcaagaaccagagaacctgattgctgatgatggccttaaaggtggtgagggagatactgggggcagagcagactttgccagtgcccctcaggtcaaaccaagccaagagcaccctgtccccattccaaggggccagcagcactttggcccaaagtattttctttaaggtgccattccttcatgttttctcagtttggagggtgatgggtagagctttccagaaccttctccattccagaatctctgcccctgtgtaatctgaaggaaggctgtgccatctttgggcactgccaagggagttggggtgatgggcttctttctgcactggagtctcacatctgttagctttgacactcaagcaatgttggaaaatgcagggtgactgagttccctgcccagctttcgggatctctggcccccatccccttgtgtgtgtccctctgcccagctcctgctgtaattagctccacgtgtacccccttcactccctcccaccagctctgcagccagcctatggcaattatattttaagaggtgttcccaggacttttgggacctactaaaacaatgatggttattttagatgtgatgatttatatttatgtagagatatttctggaccactcaagctcttcgataccaaaatcaggagcatcttgggatttattaaattatgtaagaagatagcacagatatcgggatattattgtgtgaaaatgctgcttttactttgatgtgatctcattgatgtacacaaccaagttccaataaagtgctagaatgtg

SEQ ID NO: 457780 - DNA, 2319 bp, Homo sapiens
cacactggtcctctaaaccaatcctcacaacaggactgggagacaggtgttacctttcccactttacagagaatgaaacagagtggcaaagcctccgaaggaccctacacttcggacatcgcaaagcaggatctgagtcccggctcctctgtccaaacctacttgctaggctttctttcccatgtctactctatagctggaaaggtcgtggaggacacattttaggccaaccctctcggtttacaatccagagaggggagaccctcagaagccaagcgacatgtccacggctacgcggcgagtgtgtggcaacgtggaaggggagcccgagacgccctggtctctcccttctctcgcaggttcctttctccccgaacgcagcccgcaggggacgctggaggaggagctgagctggagttgccggggccccgggaccgggcgttccgggggcggtccccagcagccgcgcattccagagccagcagcgcgtcctggccgctcctgcgctctcccgcctcccggggctcggaggagccggggcacgttccaggagctgcctagggctgaggttccaggcctgggggtcgcttccagctgccagatcccgtgcagtcctggggaccctgagaagcaccgagccatccctgacccaggaactttccgcagactcgccgccatctgggagtgaagcaacatggatgcagtcagccaagtccccatggaagtcgtgcttcccaagcacatcctggatatctgggttattgtcctcatcatcctggccaccattgtcatcatgacctcgttgttgctgtgcccagccactgcagtaatcatctatcgcatgcggactcatccgatccttagtggggctgtttgagagcctcccaagagggccgggtgagggatgaggacaggcatcctatccccagcctcttcctgtcttcagaaaagcagcaggagggactttggggcatggacctgagttctggttttgattctgccacgagccagctgtgtgaatttggtcaagggacctaactctctgagttccaggttccttatctttcaaatggggatggtgatccctgccctttctacctcatagggatgtgagaaccacctgacttagtggatgtgaaagctgtttgtgatcagtaaagctaccacagatataagggtgttatgctgaatcctgagaagctttcaagaaccagagaacctgattgctgatgatggccttaaaggtggtgagggagatactgggggcagagcagactttgccagtgcccctcaggtcaaaccaagccaagagcaccctgtccccattccaaggggccagcagcactttggcccaaagtattttctttaaggtgccattccttcatgttttctcagtttggagggtgatgggtagagctttccagaaccttctccattccagaatctctgcccctgtgtaatctgaaggaaggctgtgccatctttgggcactgccaagggagttggggtgatgggcttctttctgcactggagtctcacatctgttagctttgacactcaagcaatgttggaaaatgcagggtgactgagttccctgcccagctttcgggatctctggcccccatccccttgtgtgtgtccctctgcccagctcctgctgtaattagctccacgtgtacccccttcactccctcccaccagctctgcagccagcctatggcaattatattttaagaggtgttcccaggacttttgggacctactaaaacaatgatggttattttagatgtgatgatttatatttatgtagagatatttctggaccactcaagctcttcgataccaaaatcaggagcatcttgggatttattaaattatgtaagaagatagcacagatatcgggatattattgtgtgaaaatgctgcttttactttgatgtgatctcattgatgtacacaaccaagttccaataaagtgctagaatgtgaaaaaaaaaaaacacagatacacgcagaaacgaacgaagcatacacacacgtacacaaaccaacgacagaaggaggggcccgcctcggcaataaaaacatcccccgagagaggggccgccggaattcaagcggttcccccacattttgtggaacaacgcgaggcgcccccaatacagcgagcgtccgcgatgtaacagcacgaatcgacgtcggcgccgataaaaaacaacggggagtaagaagacacaacaaggacagcagggacgacagtcggaacagaaacacaaaaatttacgcgcggcgaaagacattggggcacagacacctgag

SEQ ID NO: 457781 - DNA, 6377 bp, Homo sapiens
  misc_feature (56)..(56): n is a, c, g, or t
  misc_feature (136)..(136): n is a, c, g, or t
aaaaataactcatattgtctctgaggttcttttccagtgaagtgtttagtattgcngctatttggagtacaaagttggagcttttaaagaacctgggagttcaaaagtataaggagaaataaatgaaaagcagaantattttgaggcaataagtatagactcaaatctatattatgacccacttgtagcaccacttggaattctaccaataagagatttatttgggcaaactataatggttgttggaaattgcaaatcttagtgtgaattattttagtccagttggtttctttctttctcttacctgaaatgaactatactgaggcaataggagctttgtatagtaatttaggagtgtaaaacaacttagggaaaaggattattaagcaggatgattgggatgacatcatgtgaaatttaggaattggaggcattgggaattgagagggtgctaacaaaggaaaacagcttattttagaatttgtctggaggatgtagaattgaagaagttttggtatttcttctgcagcggccccagtgcccttgaccaggaacatctcttggagtcagtagttttcatgaggctgacctaggaacttggccaacatatgcaacattgttctatttaaaatattccttgaattaaattcgatagtatcaatttaaaacataaagttttcactcaactcctttagaagttagattttagcttgtacttgtctttacctcttctgctgattatcagttgacaacactgagattactttcattttcctgtaagtcattatgaatttttctggtcaaccatgagttatcagtggaagcaataagtaggaagtactgtaaaagaattacaataaaataagagaaaccacttggagagcaagagggcttgtggacttgggggagcggttgtgagaaatgtctcagaacttaatttacaaataacattggtagattgacatgttgtctttcctataaagtaactttacctctgtcttaatagtaaactactatgaaagtgaattcgtgttcctcttgatttgtgaactgatgaaaattacaaaatgtggagttttttccccagataaagtaaatggtggaatattcaggtttatttgatacctagaaaatacctgaaattttccgtggtaataggcacattttgaaactgttttttttttctctgacaattgaatatattttatatatagttgattttgattattgaagactaaggaaaatttaagtttgaatgttagaaaatgaattttgcaaatttgaagtaattttattctttatgttttgggattgtagttatgttagatattcctcagttggggtaattgtcttgcatcattatctcttatcataatctgtttttcttcacacagtgttatagttttgccgctggactcttccctcccttcccccaccccatcaggatgatatgagacttgaaagaagacgatgcatacaggaggagagacttcagcatgcaaaccttcatctgttcggcttgcaccgtcattttcattccatgctgctggccttcagatggctggacagatgccccattcacatcagtacagtgaccgtcgccagccaaacataagtgaccaacaggtttctgccttatcatattctgaccagattcagcaacctctaactaaccagaggcggatgccccaaaccttccgtgacccagcaactgctcccctgagaaaactttctgttgacttgatcaaaacatacaagcatattaatgaggtttactatgcaaaaaagaagcgaagacaccaacagggccagggagacgattctagtcataagaaggaacggaaggtttacaatgatggttatgatgatgataactatgattatattgtaaaaaacggagaaaagtggatggatcgttacgaaattgactccttgataggcaaaggttcctttggacaggttgtaaaggcatatgatcgtgtggagcaagaatgggttgccattaaaataataaagaacaagaaggcttttctgaatcaagcacagatagaagtgcgacttcttgagctcatgaacaaacatgacactgaaatgaaatactacatagtgcatttgaaacgccactttatgtttcgaaaccatctctgtttagtttttgaaatgctgtcctacaacctctatgacttgctgagaaacaccaatttccgaggggtctctttgaacctaacacgaaagtttgcgcaacagatgtgcactgcactgcttttccttgcgactccagaacttagtatcattcactgtgatctaaaacctgaaaatatccttctttgtaaccccaaacgcagtgcaatcaagatagttgactttggcagttcttgtcagttggggcagaggatataccagtatattcagagtcgcttttatcggtctccagaggtgctactgggaatgccttatgaccttgccattgatatgtggtccctcgggtgtattttggttgaaatgcacactggagaacctctgttcagtggtgccaatgaggtagatcagatgaataaaatagtggaagttctgggtattccacctgctcatattcttgaccaagcaccaaaagcaagaaagttctttgagaagttgccagatggcacttggaacttaaagaagaccaaagatggaaaacgggagtacaaaccaccaggaacccgtaaacttcataacattcttggagtggaaacaggaggacctggtgggcgacgtgctggggagtcaggtcatacggtcgctgactacttgaagttcaaagacctcattttaaggatgcttgattatgaccccaaaactcgaattcaaccttattatgctctgcagcacagtttcttcaagaaaacagctgatgaaggtacaaatacaagtaatagtgtatctacaagccccgccatggagcagtctcagtcttcgggcaccacctccagtacatcgtcaagctcaggtggctcatcggggacaagcaacagtgggagagcccggtcggatccgacgcaccagcatcggcacagtggtgggcacttcacagctgccgtgcaggccatggactgcgagacacacagtccccaggtgcgtcagcaatttcctgctcctcttggttggtcaggcactgaagctcctacacaggtcactgttgaaactcatcctgttcaagaaacaacctttcatgtagcccctcaacagaatgcattgcatcatcaccatggtaacagttcccatcaccatcaccaccaccaccaccatcaccaccaccatggacaacaagccttgggtaaccggaccaggccaagggtctacaattctccaacgaatagctcctctacccaagattctatggaggttggccacagtcaccactccatgacatccctgtcttcctcaacgacttcttcctcgacatcttcctcctctactggtaaccaaggcaatcaggcctaccagaatcgcccagtggctgctaataccttggactttggacagaatggagctatggacgttaatttgaccgtctactccaatccccgccaagagactggcatagctggacatccaacataccaattttctgctaatacaggtcctgcacattacatgactgaaggacatctgacaatgaggcaaggggctgatagagaagagtcccccatgacaggagtttgtgtgcaacagagtcctgtagctagctcgtgactacattgaaacttgagtttgtttcttgtgtgtttttatagaagtggtgttttttttccaaaaacaaagtgcaaagctgcttgaatcaggaggagattaacacactgaaccgctacaagagggcaaagctgattttttttttaacttgaaaagattgcaaagggacattgaagtgtttaaaagagccatgtccaaacccatcttcatggatagctcagaggtatcctctttttgctcccccattttaacttgccacatcccagtcacagtggggtttttttgtctttctattcagcaaaagttaatattcagatgttggtcttggtcatttgccaactaattttaaagtaaaaggcactgcacataatttgcataaagggccccatgagggtgtttttttttttctttttgtcccccccatccccctttttttttgttttgttctgttttgttttgggtgggagggtgggaaatttgggtttttaagtcctctaaacacacttgggcacggaaatgcagtactgtaaggaagagggacctccagcttccacaaacaccatcttcagctgtatgaaagggacggttgtggtgaagtttgtcaggcacagtaagcatgctgagtggcggggatcagaactctcctatctgaacctactgaggagcaaagcagcaattacatgggatcctgtggctctcccgttgcagaggccacaggaagataggatggaacgtgactggtctcctaaccaaggtgcactgagaagcaatcaacgggtcggtcgtggccagtcctggggaggtctgagtggtggtctttgggataacctttggccttatggatttggactcgaaattagaagagcctaccatttcagatgcaatcacttttggacatgcttttgcagacagtccttaatgctgaaaacacagagaatgggtaattcaagaggcctttcttttaaaatagacttttgtgacccactaattgtaaggtattgcaaggtcactttgcgtgtgtcataaagttgacttccttattggttgaaggtcacagaagtagtggtttgctttgatggaaatagctacagctgtgtcccttcctgctttttactttttcttttgctttttctcggcacgtggtatctccaccatttcttctgcacaaagatgtcttctgttcatcctgaacatttttaaaaaatgcagaattttatgtgactgcttttttgcctcacaattatgctgtgaattttacaaaaatttattttcttttttgataatttattgtaccaaagctgtttttatagcacatagatgtctgtaaccaataatgtagcagttctgcactttgacacaaggtgtaactagaccatttttaaatgtcagttgaaaattatggctgtactattgcttaaacaaaactggaactgttgttgaatccatagccaatacatttacagcaatctgtgtactgaacatagtagattgacatctaattcaagattacaacatctgttacattctaagtgtgttcaggcttctgaaggtaaagggacactggatccagaagctatggaaccagcagttgattcttgtattcctgattaacctacttgtaaacttgaaagcaagaccttgattgcaccaacaggtccagagtatgagtgcaagcaaagcagaactctcatgcgtgacctgagcagacaggctggtatttaacaggtgcctcgtgttgagattacgctgccttaatgtaacacagtctggcagttgctaaatttgtgttcccattttaaattgaccaattttggggtgtgacacttttgagcggttgaattgggagaatgaagataagtaatttacctgtccaggatcaaaagaagcctagaaaagaagcagtaatctacctctgccgataacctgtttaagatgactcagcagaacaccgcgtttcattctattggtcaattccatgtggctgactaggtcaattttttttctgaacaaaagcaggtttttatatgtaaacagtgagaaaagaaaggctaaacactatgtaaatgtgaatggaaacttggaaatactcgtttttataaactacaaaaactttttgttgtttatcaggaaatccatatttattttgtaattaactgtcaagcctgtggatgatttttttgaacttggtagttcataaaggtttacagtgaataaaaggatatcatcttgagtatagcaatatcaaaaggaattcagtagttactgctgtttaggaatataaggttaagatatcatatgggtcaggtcattttttttttctgtgctggttgccacatcttagcaagcaccaaaaaactaaagcagtttttaaaccgatatttacgtaaagaaaatcataaaatccaatgcttctgcatactgtgttatgttacagtccagttttgtgtgctttactacacagtttggttacaggacttctgtgcattgtaaacataaacagcatggaaaaggttaaatacctgtgttcagattgtaagatctagtccggacttgctgtgtatattgtaacgttaaatgaaaaaagaacccccctttgtattatagtcatgcggtcttatgtatgataaacagttgaataatttgtc

SEQ ID NO: 457782 - DNA, 5937 bp, Homo sapiens
cgcggcccaggtcggcctcagagagcggacaccccgagcggggggtgcgggcgccgccgccgccgcttctgctgctgctgttcctgctgctgctgttggtgccgctgccgccgccggcgagcaggcgggaccggtgtgagtgcgagtgtgtgtgcgagggagcgtgtgcgagggcgattgtgcgcgcgagtgtgcgggtgtgtgcgagtgtctgtctgtctgtgcggggactcgggggcgggcggttcgggctctcctggcggaggagccgccgccgccgcccgggccccggcgcttctcgctgcgcaggttcggagcgcgcgccattttgtgagatttacaaaatcctcctcgggaagaagccgccggcagcagccgccgctcggcgcccggcctcgccgacgccgccctctgcgccgggccggccgtgcggccccgccgcctggaatcggggcccggggactgcggtatttgccggggagggggctgtcgcctccccggccccgggcgccgctggaaccgcgagccgaggagagactgagcaggctgcggcgcggccaggagccggagcgccgggggcggagagaggctgccggggcggcgctggctgcggaggccgcggcgggagcgcggcgcgggagcccgaggctgagactcaccggaggaagcggcgcgagcgccccgccatcgtcccggctgaagtgcagtggcacgatcataggtggtcactacagtctcagattcctgggcttaagcagtcttcccacctcagcctccccagtagctgggattacagtgttatagttttgccgctggactcttccctcccttcccccaccccatcaggatgatatgagacttgaaagaagacgatgcatacaggaggagagacttcagcatgcaaaccttcatctgttcggcttgcaccgtcattttcattccatgctgctggccttcagatggctggacagatgccccattcacatcagtacagtgaccgtcgccagccaaacataagtgaccaacaggtttctgccttatcatattctgaccagattcagcaacctctaactaaccaggtgatgcctgatattgtcatgttacagaggcggatgccccaaaccttccgtgacccagcaactgctcccctgagaaaactttctgttgacttgatcaaaacatacaagcatattaatgaggtttactatgcaaaaaagaagcgaagacaccaacagggccagggagacgattctagtcataagaaggaacggaaggtttacaatgatggttatgatgatgataactatgattatattgtaaaaaacggagaaaagtggatggatcgttacgaaattgactccttgataggcaaaggttcctttggacaggttgtaaaggcatatgatcgtgtggagcaagaatgggttgccattaaaataataaagaacaagaaggcttttctgaatcaagcacagatagaagtgcgacttcttgagctcatgaacaaacatgacactgaaatgaaatactacatagtgcatttgaaacgccactttatgtttcgaaaccatctctgtttagtttttgaaatgctgtcctacaacctctatgacttgctgagaaacaccaatttccgaggggtctctttgaacctaacacgaaagtttgcgcaacagatgtgcactgcactgcttttccttgcgactccagaacttagtatcattcactgtgatctaaaacctgaaaatatccttctttgtaaccccaaacgcagtgcaatcaagatagttgactttggcagttcttgtcagttggggcagaggatataccagtatattcagagtcgcttttatcggtctccagaggtgctactgggaatgccttatgaccttgccattgatatgtggtccctcgggtgtattttggttgaaatgcacactggagaacctctgttcagtggtgccaatgaggtagatcagatgaataaaatagtggaagttctgggtattccacctgctcatattcttgaccaagcaccaaaagcaagaaagttctttgagaagttgccagatggcacttggaacttaaagaagaccaaagatggaaaacgggagtacaaaccaccaggaacccgtaaacttcataacattcttggagtggaaacaggaggacctggtgggcgacgtgctggggagtcaggtcatacggtcgctgactacttgaagttcaaagacctcattttaaggatgcttgattatgaccccaaaactcgaattcaaccttattatgctctgcagcacagtttcttcaagaaaacagctgatgaaggtacaaatacaagtaatagtgtatctacaagccccgccatggagcagtctcagtcttcgggcaccacctccagtacatcgtcaagctcaggtggctcatcggggacaagcaacagtgggagagcccggtcggatccgacgcaccagcatcggcacagtggtgggcacttcacagctgccgtgcaggccatggactgcgagacacacagtccccaggtgagctcgcacgtggttcatttgcttgtgtcacctgccattctcaggtggagcagcactggatgccaggtgcctttagaatgaccgtatcatttaccctagaggttcatgacgttcctgtctaaggaaatgtgcgtcagcaatttcctgctcctcttggttggtcaggcactgaagctcctacacaggtcactgttgaaactcatcctgttcaagaaacaacctttcatgtagcccctcaacagaatgcattgcatcatcaccatggtaacagttcccatcaccatcaccaccaccaccaccatcaccaccaccatggacaacaagccttgggtaaccggaccaggccaagggtctacaattctccaacgaatagctcctctacccaagattctatggaggttggccacagtcaccactccatgacatccctgtcttcctcaacgacttcttcctcgacatcttcctcctctactggtaaccaaggcaatcaggcctaccagaatcgcccagtggctgctaataccttggactttggacagaatggagctatggacgttaatttgaccgtctactccaatccccgccaagagactggcatagctggacatccaacataccaattttctgctaatacaggtcctgcacattacatgactgaaggacatctgacaatgaggcaaggggctgatagagaagagtcccccatgacaggagtttgtgtgcaacagagtcctgtagctagctcgtgactacattgaaacttgagtttgtttcttgtgtgtttttatagaagtggtgttttttttccaaaaacaaagtgcaaagctgcttgaatcaggaggagattaacacactgaaccgctacaagagggcaaagctgattttttttttaacttgaaaagattgcaaagggacattgaagtgtttaaaagagccatgtccaaacccatcttcatggatagctcagaggtatcctctttttgctcccccattttaacttgccacatcccagtcacagtggggtttttttgtctttctattcagcaaaagttaatattcagatgttggtcttggtcatttgccaactaattttaaagtaaaaggcactgcacataatttgcataaagggccccatgagggtgtttttttttttctttttgtcccccccatccccctttttttttgttttgttctgttttgttttgggtgggagggtgggaaatttgggtttttaagtcctctaaacacacttgggcacggaaatgcagtactgtaaggaagagggacctccagcttccacaaacaccatcttcagctgtatgaaagggacggttgtggtgaagtttgtcaggcacagtaagcatgctgagtggcggggatcagaactctcctatctgaacctactgaggagcaaagcagcaattacatgggatcctgtggctctcccgttgcagaggccacaggaagataggatggaacgtgactggtctcctaaccaaggtgcactgagaagcaatcaacgggtcggtcgtggccagtcctggggaggtctgagtggtggtctttgggataacctttggccttatggatttggactcgaaattagaagagcctaccatttcagatgcaatcacttttggacatgcttttgcagacagtccttaatgctgaaaacacagagaatgggtaattcaagaggcctttcttttaaaatagacttttgtgacccactaattgtaaggtattgcaaggtcactttgcgtgtgtcataaagttgacttccttattggttgaaggtcacagaagtagtggtttgctttgatggaaatagctacagctgtgtcccttcctgctttttactttttcttttgctttttctcggcacgtggtatctccaccatttcttctgcacaaagatgtcttctgttcatcctgaacatttttaaaaaatgcagaattttatgtgactgcttttttgcctcacaattatgctgtgaattttacaaaaatttattttcttttttgataatttattgtaccaaagctgtttttatagcacatagatgtctgtaaccaataatgtagcagttctgcactttgacacaaggtgtaactagaccatttttaaatgtcagttgaaaattatggctgtactattgcttaaacaaaactggaactgttgttgaatccatagccaatacatttacagcaatctgtgtactgaacatagtagattgacatctaattcaagattacaacatctgttacattctaagtgtgttcaggcttctgaaggtaaagggacactggatccagaagctatggaaccagcagttgattcttgtattcctgattaacctacttgtaaacttgaaagcaagaccttgattgcaccaacaggtccagagtatgagtgcaagcaaagcagaactctcatgcgtgacctgagcagacaggctggtatttaacaggtgcctcgtgttgagattacgctgccttaatgtaacacagtctggcagttgctaaatttgtgttcccattttaaattgaccaattttggggtgtgacacttttgagcggttgaattgggagaatgaagataagtaatttacctgtccaggatcaaaagaagcctagaaaagaagcagtaatctacctctgccgataacctgtttaagatgactcagcagaacaccgcgtttcattctattggtcaattccatgtggctgactaggtcaattttttttctgaacaaaagcaggtttttatatgtaaacagtgagaaaagaaaggctaaacactatgtaaatgtgaatggaaacttggaaatactcgtttttataaactacaaaaactttttgttgtttatcaggaaatccatatttattttgtaattaactgtcaagcctgtggatgatttttttgaacttggtagttcataaaggtttacagtgaataaaaggatatcatcttgagtatagcaatatcaaaaggaattcagtagttactgctgtttaggaatataaggttaagatatcatatgggtcaggtcattttttttttctgtgctggttgccacatcttagcaagcaccaaaaaactaaagcagtttttaaaccgatatttacgtaaagaaaatcataaaatccaatgcttctgcatactgtgttatgttacagtccagttttgtgtgctttactacacagtttggttacaggacttctgtgcattgtaaacataaacagcatggaaaaggttaaatacctgtgttcagattgtaagatctagtccggacttgctgtgtatattgtaacgttaaatgaaaaaagaacccccctttgtattatagtcatgcggtcttatgtatgataaacagttgaataatttgtc

SEQ ID NO: 457783 - DNA, 876 bp, Homo sapiens
ctctatccttaatctacagtcagattaaccaatccctcaaaatgtttagttctttaagccgtattcgtagtctaatgttgaagttaatcaatggaaccctaattcaggaattagccaattcttttctgttaatatcagatcaatgtttttaatccaatgctgactgcagttttaagcaattgaagtaatactattttgaaatatatttcagatataccagtatattcagagtcgcttttatcggtctccagaggtgctactgggaatgccttatgaccttgccattgatatgtggtccctcgggtgtattttggttgaaatgcacactggagaacctctgttcagtggtgccaatgaggtaaatgatgtattgctttacaaattctgttttcataatttgtttttgtctttcatctgtgacagtgtaatttaaaagttgtttttaggcaaagatgtctacttaatcattcaaatgtgaggtcagtttgaatatacctatttttcatatttgtcagttgtcatgtaagtttagaattatgagataggagtaggatattttaatctactcatgaaggagaacagttagaaagtgttaagtattttggcatacattttacaggttttaaatacaatacagaaagcttaaagatgataaagaatgaaggccatcctgaagagtgatacaaacatcactctaaattttgagattatgatttggagttgaagagtaatgatcagtaggactgatggatactcagtctgaataatgtagagtaaacgagattatagacttgtagggctacagagactgtgtgcagttctgaagtctacaggttttcagtctgtgttctggaagatttttcaaggtcagaggca

SEQ ID NO: 457784 - DNA, 5705 bp, Homo sapiens
cgcggcccaggtcggcctcagagagcggacaccccgagcggggggtgcgggcgccgccgccgccgcttctgctgctgctgttcctgctgctgctgttggtgccgctgccgccgccggcgagcaggcgggaccggtgtgagtgcgagtgtgtgtgcgagggagcgtgtgcgagggcgattgtgcgcgcgagtgtgcgggtgtgtgcgagtgtctgtctgtctgtgcggggactcgggggcgggcggttcgggctctcctggcggaggagccgccgccgccgcccgggccccggcgcttctcgctgcgcaggttcggagcgcgcgccattttgtgagatttacaaaatcctcctcgggaagaagccgccggcagcagccgccgctcggcgcccggcctcgccgacgccgccctctgcgccgggccggccgtgcggccccgccgcctggaatcggggcccggggactgcggtatttgccggggagggggctgtcgcctccccggccccgggcgccgctggaaccgcgagccgaggagagactgagcaggctgcggcgcggccaggagccggagcgccgggggcggagagaggctgccggggcggcgctggctgcggaggccgcggcgggagcgcggcgcgggagcccgaggctgagactcaccggaggaagcggcgcgagcgccccgccatcgtcccgtgttatagttttgccgctggactcttccctcccttcccccaccccatcaggatgatatgagacttgaaagaagacgatgcatacaggaggagagacttcagcatgcaaaccttcatctgttcggcttgcaccgtcattttcattccatgctgctggccttcagatggctggacagatgccccattcacatcagtacagtgaccgtcgccagccaaacataagtgaccaacaggtttctgccttatcatattctgaccagattcagcaacctctaactaaccaggtgatgcctgatattgtcatgttacagaggcggatgccccaaaccttccgtgacccagcaactgctcccctgagaaaactttctgttgacttgatcaaaacatacaagcatattaatgaggtttactatgcaaaaaagaagcgaagacaccaacagggccagggagacgattctagtcataagaaggaacggaaggtttacaatgatggttatgatgatgataactatgattatattgtaaaaaacggagaaaagtggatggatcgttacgaaattgactccttgataggcaaaggttcctttggacaggttgtaaaggcatatgatcgtgtggagcaagaatgggttgccattaaaataataaagaacaagaaggcttttctgaatcaagcacagatagaagtgcgacttcttgagctcatgaacaaacatgacactgaaatgaaatactacatagtgcatttgaaacgccactttatgtttcgaaaccatctctgtttagtttttgaaatgctgtcctacaacctctatgacttgctgagaaacaccaatttccgaggggtctctttgaacctaacacgaaagtttgcgcaacagatgtgcactgcactgcttttccttgcgactccagaacttagtatcattcactgtgatctaaaacctgaaaatatccttctttgtaaccccaaacgcagtgcaatcaagatagttgactttggcagttcttgtcagttggggcagaggatataccagtatattcagagtcgcttttatcggtctccagaggtgctactgggaatgccttatgaccttgccattgatatgtggtccctcgggtgtattttggttgaaatgcacactggagaacctctgttcagtggtgccaatgaggtagatcagatgaataaaatagtggaagttctgggtattccacctgctcatattcttgaccaagcaccaaaagcaagaaagttctttgagaagttgccagatggcacttggaacttaaagaagaccaaagatggaaaacgggagtacaaaccaccaggaacccgtaaacttcataacattcttggagtggaaacaggaggacctggtgggcgacgtgctggggagtcaggtcatacggtcgctgactacttgaagttcaaagacctcattttaaggatgcttgattatgaccccaaaactcgaattcaaccttattatgctctgcagcacagtttcttcaagaaaacagctgatgaaggtacaaatacaagtaatagtgtatctacaagccccgccatggagcagtctcagtcttcgggcaccacctccagtacatcgtcaagctcaggtggctcatcggggacaagcaacagtgggagagcccggtcggatccgacgcaccagcatcggcacagtggtgggcacttcacagctgccgtgcaggccatggactgcgagacacacagtccccaggtgcgtcagcaatttcctgctcctcttggttggtcaggcactgaagctcctacacaggtcactgttgaaactcatcctgttcaagaaacaacctttcatgtagcccctcaacagaatgcattgcatcatcaccatggtaacagttcccatcaccatcaccaccaccaccaccatcaccaccaccatggacaacaagccttgggtaaccggaccaggccaagggtctacaattctccaacgaatagctcctctacccaagattctatggaggttggccacagtcaccactccatgacatccctgtcttcctcaacgacttcttcctcgacatcttcctcctctactggtaaccaaggcaatcaggcctaccagaatcgcccagtggctgctaataccttggactttggacagaatggagctatggacgttaatttgaccgtctactccaatccccgccaagagactggcatagctggacatccaacataccaattttctgctaatacaggtcctgcacattacatgactgaaggacatctgacaatgaggcaaggggctgatagagaagagtcccccatgacaggagtttgtgtgcaacagagtcctgtagctagctcgtgactacattgaaacttgagtttgtttcttgtgtgtttttatagaagtggtgttttttttccaaaaacaaagtgcaaagctgcttgaatcaggaggagattaacacactgaaccgctacaagagggcaaagctgattttttttttaacttgaaaagattgcaaagggacattgaagtgtttaaaagagccatgtccaaacccatcttcatggatagctcagaggtatcctctttttgctcccccattttaacttgccacatcccagtcacagtggggtttttttgtctttctattcagcaaaagttaatattcagatgttggtcttggtcatttgccaactaattttaaagtaaaaggcactgcacataatttgcataaagggccccatgagggtgtttttttttttctttttgtcccccccatccccctttttttttgttttgttctgttttgttttgggtgggagggtgggaaatttgggtttttaagtcctctaaacacacttgggcacggaaatgcagtactgtaaggaagagggacctccagcttccacaaacaccatcttcagctgtatgaaagggacggttgtggtgaagtttgtcaggcacagtaagcatgctgagtggcggggatcagaactctcctatctgaacctactgaggagcaaagcagcaattacatgggatcctgtggctctcccgttgcagaggccacaggaagataggatggaacgtgactggtctcctaaccaaggtgcactgagaagcaatcaacgggtcggtcgtggccagtcctggggaggtctgagtggtggtctttgggataacctttggccttatggatttggactcgaaattagaagagcctaccatttcagatgcaatcacttttggacatgcttttgcagacagtccttaatgctgaaaacacagagaatgggtaattcaagaggcctttcttttaaaatagacttttgtgacccactaattgtaaggtattgcaaggtcactttgcgtgtgtcataaagttgacttccttattggttgaaggtcacagaagtagtggtttgctttgatggaaatagctacagctgtgtcccttcctgctttttactttttcttttgctttttctcggcacgtggtatctccaccatttcttctgcacaaagatgtcttctgttcatcctgaacatttttaaaaaatgcagaattttatgtgactgcttttttgcctcacaattatgctgtgaattttacaaaaatttattttcttttttgataatttattgtaccaaagctgtttttatagcacatagatgtctgtaaccaataatgtagcagttctgcactttgacacaaggtgtaactagaccatttttaaatgtcagttgaaaattatggctgtactattgcttaaacaaaactggaactgttgttgaatccatagccaatacatttacagcaatctgtgtactgaacatagtagattgacatctaattcaagattacaacatctgttacattctaagtgtgttcaggcttctgaaggtaaagggacactggatccagaagctatggaaccagcagttgattcttgtattcctgattaacctacttgtaaacttgaaagcaagaccttgattgcaccaacaggtccagagtatgagtgcaagcaaagcagaactctcatgcgtgacctgagcagacaggctggtatttaacaggtgcctcgtgttgagattacgctgccttaatgtaacacagtctggcagttgctaaatttgtgttcccattttaaattgaccaattttggggtgtgacacttttgagcggttgaattgggagaatgaagataagtaatttacctgtccaggatcaaaagaagcctagaaaagaagcagtaatctacctctgccgataacctgtttaagatgactcagcagaacaccgcgtttcattctattggtcaattccatgtggctgactaggtcaattttttttctgaacaaaagcaggtttttatatgtaaacagtgagaaaagaaaggctaaacactatgtaaatgtgaatggaaacttggaaatactcgtttttataaactacaaaaactttttgttgtttatcaggaaatccatatttattttgtaattaactgtcaagcctgtggatgatttttttgaacttggtagttcataaaggtttacagtgaataaaaggatatcatcttgagtatagcaatatcaaaaggaattcagtagttactgctgtttaggaatataaggttaagatatcatatgggtcaggtcattttttttttctgtgctggttgccacatcttagcaagcaccaaaaaactaaagcagtttttaaaccgatatttacgtaaagaaaatcataaaatccaatgcttctgcatactgtgttatgttacagtccagttttgtgtgctttactacacagtttggttacaggacttctgtgcattgtaaacataaacagcatggaaaaggttaaatacctgtgttcagattgtaagatctagtccggacttgctgtgtatattgtaacgttaaatgaaaaaagaacccccctttgtattatagtcatgcggtcttatgtatgataaacagttgaataatttgtc

SEQ ID NO: 457785 - DNA, 5990 bp, Homo sapiens
cgcggcccaggtcggcctcagagagcggacaccccgagcggggggtgcgggcgccgccgccgccgcttctgctgctgctgttcctgctgctgctgttggtgccgctgccgccgccggcgagcaggcgggaccggtgtgagtgcgagtgtgtgtgcgagggagcgtgtgcgagggcgattgtgcgcgcgagtgtgcgggtgtgtgcgagtgtctgtctgtctgtgcggggactcgggggcgggcggttcgggctctcctggcggaggagccgccgccgccgcccgggccccggcgcttctcgctgcgcaggttcggagcgcgcgccattttgtgagatttacaaaatcctcctcgggaagaagccgccggcagcagccgccgctcggcgcccggcctcgccgacgccgccctctgcgccgggccggccgtgcggccccgccgcctggaatcggggcccggggactgcggtatttgccggggagggggctgtcgcctccccggccccgggcgccgctggaaccgcgagccgaggagagactgagcaggctgcggcgcggccaggagccggagcgccgggggcggagagaggctgccggggcggcgctggctgcggaggccgcggcgggagcgcggcgcgggagcccgaggctgagactcaccggaggaagcggcgcgagcgccccgccatcgtcccggatctcaccctgttgcccaggctggagtgcagtggcatgatcagggctcactgcagccttgacttcctggaatcagtgttatagttttgccgctggactcttccctcccttcccccaccccatcaggatgatatgagacttgaaagaagacgatgcatacaggaggagagacttcagcatgcaaaccttcatctgttcggcttgcaccgtcattttcattccatgctgctggccttcagatggctggacagatgccccattcacatcagtacagtgaccgtcgccagccaaacataagtgaccaacaggtttctgccttatcatattctgaccagattcagcaacctctaactaaccaggtgatgcctgatattgtcatgttacagaggcggatgccccaaaccttccgtgacccagcaactgctcccctgagaaaactttctgttgacttgatcaaaacatacaagcatattaatgaggtttactatgcaaaaaagaagcgaagacaccaacagggccagggagacgattctagtcataagaaggaacggaaggtttacaatgatggttatgatgatgataactatgattatattgtaaaaaacggagaaaagtggatggatcgttacgaaattgactccttgataggcaaaggttcctttggacaggttgtaaaggcatatgatcgtgtggagcaagaatgggttgccattaaaataataaagaacaagaaggcttttctgaatcaagcacagatagaagtgcgacttcttgagctcatgaacaaacatgacactgaaatgaaatactacatagtgcatttgaaacgccactttatgtttcgaaaccatctctgtttagtttttgaaatgctgtcctacaacctctatgacttgctgagaaacaccaatttccgaggggtctctttgaacctaacacgaaagtttgcgcaacagatgtgcactgcactgcttttccttgcgactccagaacttagtatcattcactgtgatctaaaacctgaaaatatccttctttgtaaccccaaacgcagtgcaatcaagatagttgactttggcagttcttgtcagttggggcagaggatataccagtatattcagagtcgcttttatcggtctccagaggtgctactgggaatgccttatgaccttgccattgatatgtggtccctcgggtgtattttggttgaaatgcacactggagaacctctgttcagtggtgccaatgaggtagatcagatgaataaaatagtggaagttctgggtattccacctgctcatattcttgaccaagcaccaaaagcaagaaagttctttgagaagttgccagatggcacttggaacttaaagaagaccaaagatggaaaacgggagtacaaaccaccaggaacccgtaaacttcataacattcttggagtggaaacaggaggacctggtgggcgacgtgctggggagtcaggtcatacggtcgctgactacttgaagttcaaagacctcattttaaggatgcttgattatgaccccaaaactcgaattcaaccttattatgctctgcagcacagtttcttcaagaaaacagctgatgaaggtacaaatacaagtaatagtgtatctacaagccccgccatggagcagtctcagtcttcgggcaccacctccagtacatcgtcaagctcaggtggctcatcggggacaagcaacagtgggagagcccggtcggatccgacgcaccagcatcggcacagtggtgggcacttcacagctgccgtgcaggccatggactgcgagacacacagtccccaggtgcgtcagcaatttcctgctcctcttggttggtcaggcactgaagctcctacacaggtcactgttgaaactcatcctgttcaagaaacaacctttcatgtagcccctcaacagaatgcattgcatcatcaccatggtaacagttcccatcaccatcaccaccaccaccaccatcaccaccaccatggacaacaagccttgggtaaccggaccaggccaagggtctacaattctccaacgaatagctcctctacccaagattctatggaggttggccacagtcaccactccatgacatccctgtcttcctcaacgacttcttcctcgacatcttcctcctctactggtaaccaaggcaatcaggcctaccagaatcgcccagtggctgctaataccttggactttggacagaatggagctatggacgttaatttgaccgtctactccaatccccgccaagagactggcatagctggacatccaacataccaattttctgctaatacaggtcctgcacattacatgactgaaggacatctgacaatgaggcaaggggctgatagagaagagtcccccatgacaggagtttgtgtgcaacagagtcctgtagctagctcgtgactacattgaaacttgagtttgtttcttgtgtgtttttatagaagtggtgttttttttccaaaaacaaagtgcaaagctgcttgaatcaggaggagattaacacactgaaccgctacaagagggcaaagctgattttttttttaacttgaaaagattgcaaagggacattgaagtgtttaaaagagccatgtccaaacccatcttcatggatagctcagaggtatcctctttttgctcccccattttaacttgccacatcccagtcacagtggggtttttttgtctttctattcagcaaaagttaatattcagatgttggtcttggtcatttgccaactaattttaaagtaaaaggcactgcacataatttgcataaagggccccatgagggtgtttttttttttctttttgtcccccccatccccctttttttttgttttgttctgttttgttttgggtgggagggtgggaaatttgggtttttaagtcctctaaacacacttgggcacggaaatgcagtactgtaaggaagagggacctccagcttccacaaacaccatcttcagctgtatgaaagggacggttgtggtgaagtttgtcaggcacagtaagcatgctgagtggcggggatcagaactctcctatctgaacctactgaggagcaaagcagcaattacatgggatcctgtggctctcccgttgcagaggccacaggaagataggatggaacgtgactggtctcctaaccaaggtgcactgagaagcaatcaacgggtcggtcgtggccagtcctggggaggtctgagtggtggtctttgggataacctttggccttatggatttggactcgaaattagaagagcctaccatttcagatgcaatcacttttggacatgcttttgcagacagtccttaatgctgaaaacacagagaatgggtaattcaagaggcctttcttttaaaatagacttttgtgacccactaattgtaaggtattgcaaggtcactttgcgtgtgtcataaagttgacttccttattggttgaaggtcacagaagtagtggtttgctttgatggaaatagctacagctgtgtcccttcctgctttttactttttcttttgctttttctcggcacgtggtatctccaccatttcttctgcacaaagatgtcttctgttcatcctgaacatttttaaaaaatgcagaattttatgtgactgcttttttgcctcacaattatgctgtgaattttacaaaaatttattttcttttttgataatttattgtaccaaagctgtttttatagcacatagatgtctgtaaccaataatgtagcagttctgcactttgacacaaggtgtaactagaccatttttaaatgtcagttgaaaattatggctgtactattgcttaaacaaaactggaactgttgttgaatccatagccaatacatttacagcaatctgtgtactgaacatagtagattgacatctaattcaagattacaacatctgttacattctaagtgtgttcaggcttctgaaggtaaagggacactggatccagaagctatggaaccagcagttgattcttgtattcctgattaacctacttgtaaacttgaaagcaagaccttgattgcaccaacaggtccagagtatgagtgcaagcaaagcagaactctcatgcgtgacctgagcagacaggctggtatttaacaggtgcctcgtgttgagattacgctgccttaatgtaacacagtctggcagttgctaaatttgtgttcccattttaaattgaccaattttggggtgtgacacttttgagcggttgaattgggagaatgaagataagtaatttacctgtccaggatcaaaagaagcctagaaaagaagcagtaatctacctctgccgataacctgtttaagatgactcagcagaacaccgcgtttcattctattggtcaattccatgtggctgactaggtcaattttttttctgaacaaaagcaggtttttatatgtaaacagtgagaaaagaaaggctaaacactatgtaaatgtgaatggaaacttggaaatactcgtttttataaactacaaaaactttttgttgtttatcaggaaatccatatttattttgtaattaactgtcaagcctgtggatgatttttttgaacttggtagttcataaaggtttacagtgaataaaaggatatcatcttgagtatagcaatatcaaaaggaattcagtagttactgctgtttaggaatataaggttaagatatcatatgggtcaggtcattttttttttctgtgctggttgccacatcttagcaagcaccaaaaaactaaagcagtttttaaaccgatatttacgtaaagaaaatcataaaatccaatgcttctgcatactgtgttatgttacagtccagttttgtgtgctttactacacagtttggttacaggacttctgtgcattgtaaacataaacagcatggaaaaggttaaatacctgtgttcagattgtaagatctagtccggacttgctgtgtatattgtaacgttaaatgaaaaaagaacccccctttgtattatagtcatgcggtcttatgtatgataaacagttgaataatttgtcctcagactctttactatgcttttttaaaaattaatttaagaaaaatgtaaacatagtaaaaatcttcctatgcaattaaactggtccaggtctggtaggtatagtatcaaagttgagttaaatgtgtaaaaaggaaactatttgagatacattgacataggcatcagcaatctctgaaagtaaaaattggaggtttaacagatcatttt

SEQ ID NO: 457786 - DNA, 5442 bp, Homo sapiens
cgcggcccaggtcggcctcagagagcggacaccccgagcggggggtgcgggcgccgccgccgccgcttctgctgctgctgttcctgctgctgctgttggtgccgctgccgccgccggcgagcaggcgggaccggtgtgagtgcgagtgtgtgtgcgagggagcgtgtgcgagggcgattgtgcgcgcgagtgtgcgggtgtgtgcgagtgtctgtctgtctgtgcggggactcgggggcgggcggttcgggctctcctggcggaggagccgccgccgccgcccgggccccggcgcttctcgctgcgcaggttcggagcgcgcgccattttgtgagatttacaaaatcctcctcgggaagaagccgccggcagcagccgccgctcggcgcccggcctcgccgacgccgccctctgcgccgggccggccgtgcggccccgccgcctggaatcggggcccggggactgcggtatttgccggggagggggctgtcgcctccccggccccgggcgccgctggaaccgcgagccgaggagagactgagcaggctgcggcgcggccaggagccggagcgccgggggcggagagaggctgccggggcggcgctggctgcggaggccgcggcgggagcgcggcgcgggagcccgaggctgagactcaccggaggaagcggcgcgagcgccccgccatcgtcccggatctcaccctgttgcccaggctggagtgcagtggcatgatcagggctcactgcagccttgacttcctggaatcagtgttatagttttgccgctggactcttccctcccttcccccaccccatcaggatgatatgagacttgaaagaagacgatgcatacaggaggagagacttcagcatgcaaaccttcatctgttcggcttgcaccgtcattttcattccatgctgctggccttcagatggctggacagatgccccattcacatcagtacagtgaccgtcgccagccaaacataagtgaccaacaggtttctgccttatcatattctgaccagattcagcaacctctaactaaccaggtgatgcctgatattgtcatgttacagaggcggatgccccaaaccttccgtgacccagcaactgctcccctgagaaaactttctgttgacttgatcaaaacatacaagcatattaatgaggtttactatgcaaaaaagaagcgaagacaccaacagggccagggagacgattctagtcataagaaggaacggaaggtttacaatgatggttatgatgatgataactatgattatattgtaaaaaacggagaaaagtggatggatcgttacgaaattgactccttgataggcaaaggttcctttggacaggttgtaaaggcatatgatcgtgtggagcaagaatgggttgccattaaaataataaagaacaagaaggcttttctgaatcaagcacagatagaagtgcgacttcttgagctcatgaacaaacatgacactgaaatgaaatactacatagtgcatttgaaacgccactttatgtttcgaaaccatctctgtttagtttttgaaatgctgtcctacaacctctatgacttgctgagaaacaccaatttccgaggggtctctttgaacctaacacgaaagtttgcgcaacagatgtgcactgcactgcttttccttgcgactccagaacttagtatcattcactgtgatctaaaacctgaaaatatccttctttgtaaccccaaacgcagtgcaatcaagatagttgactttggcagttcttgtcagttggggcagaggatataccagtatattcagagtcgcttttatcggtctccagaggtgctactgggaatgccttatgaccttgccattgatatgtggtccctcgggtgtattttggttgaaatgcacactggagaacctctgttcagtggtgccaatgaggtagatcagatgaataaaatagtggaagttctgggtattccacctgctcatattcttgaccaagcaccaaaagcaagaaagttctttgagaagttgccagatggcacttggaacttaaagaagaccaaagatggaaaacgggagtacaaaccaccaggaacccgtaaacttcataacattcttggagtggaaacaggaggacctggtgggcgacgtgctggggagtcaggtcatacggtcgctgactacttgaagttcaaagacctcattttaaggatgcttgattatgaccccaaaactcgaattcaaccttattatgctctgcagcacagtttcttcaagaaaacagctgatgaaggtacaaatacaagtaatagtgtatctacaagccccgccatggagcagtctcagtcttcgggcaccacctccagtacatcgtcaagctcaggtggctcatcggggacaagcaacagtgggagagcccggtcggatccgacgcaccagcatcggcacagtggtgggcacttcacagctgccgtgcaggccatggactgcgagacacacagtccccaggtgcgtcagcaatttcctgctcctcttggttggtcaggcactgaagctcctacacaggtcactgttgaaactcatcctgttcaagaaacaacctttcatgtagcccctcaacagaatgcattgcatcatcaccatggtaacagttcccatcaccatcaccaccaccaccaccatcaccaccaccatggacaacaagccttgggtaaccggaccaggccaagggtctacaattctccaacgaatagctcctctacccaagattctatggaggttggccacagtcaccactccatgacatccctgtcttcctcaacgacttcttcctcgacatcttcctcctctactggtaaccaaggcaatcaggcctaccagaatcgcccagtggctgctaataccttggactttggacagaatggagctatggacgttaatttgaccgtctactccaatccccgccaagagactggcatagctggacatccaacataccaattttctgctaatacaggtcctgcacattacatgactgaaggacatctgacaatgaggcaaggggctgatagagaagagtcccccatgacaggagtttgtgtgcaacagagtcctgtagctagctcgtgactacattgaaacttgagtttgtttcttgtgtgtttttatagaagtggtgttttttttccaaaaacaaagtgcaaagctgcttgaatcaggaggagattaacacactgaaccgctacaagagggcaaagctgattttttttttaacttgaaaagattgcaaagggacattgaagtgtttaaaagagccatgtccaaacccatcttcatggatagctcagaggtatcctctttttgctcccccattttaacttgccacatcccagtcacagtggggtttttttgtctttctattcagcaaaagttaatattcagatgttggtcttggtcatttgccaactaattttaaagtaaaaggcactgcacataatttgcataaagggccccatgagggtgtttttttttttctttttgtcccccccatccccctttttttttgttttgttctgttttgttttgggtgggagggtgggaaatttgggtttttaagtcctctaaacacacttgggcacggaaatgcagtactgtaaggaagagggacctccagcttccacaaacaccatcttcagctgtatgaaagggacggttgtggtgaagtttgtcaggcacagtaagcatgctgagtggcggggatcagaactctcctatctgaacctactgaggagcaaagcagcaattacatgggatcctgtggctctcccgttgcagaggccacaggaagataggatggaacgtgactggtctcctaaccaaggtgcactgagaagcaatcaacgggtcggtcgtggccagtcctggggaggtctgagtggtggtctttgggataacctttggccttatggatttggactcgaaattagaagagcctaccatttcagatgcaatcacttttggacatgcttttgcagacagtccttaatgctgaaaacacagagaatgggtaattcaagaggcctttcttttaaaatagacttttgtgacccactaattgtaaggtattgcaaggtcactttgcgtgtgtcataaagttgacttccttattggttgaaggtcacagaagtagtggtttgctttgatggaaatagctacagctgtgtcccttcctgctttttactttttcttttgctttttctcggcacgtggtatctccaccatttcttctgcacaaagatgtcttctgttcatcctgaacatttttaaaaaatgcagaattttatgtgactgcttttttgcctcacaattatgctgtgaattttacaaaaatttattttcttttttgataatttattgtaccaaagctgtttttatagcacatagatgtctgtaaccaataatgtagcagttctgcactttgacacaaggtgtaactagaccatttttaaatgtcagttgaaaattatggctgtactattgcttaaacaaaactggaactgttgttgaatccatagccaatacatttacagcaatctgtgtactgaacatagtagattgacatctaattcaagattacaacatctgttacattctaagtgtgttcaggcttctgaaggtaaagggacactggatccagaagctatggaaccagcagttgattcttgtattcctgattaacctacttgtaaacttgaaagcaagaccttgattgcaccaacaggtccagagtatgagtgcaagcaaagcagaactctcatgcgtgacctgagcagacaggctggtatttaacaggtgcctcgtgttgagattacgctgccttaatgtaacacagtctggcagttgctaaatttgtgttcccattttaaattgaccaattttggggtgtgacacttttgagcggttgaattgggagaatgaagataagtaatttacctgtccaggatcaaaagaagcctagaaaagaagcagtaatctacctctgccgataacctgtttaagatgactcagcagaacaccgcgtttcattctattggtcaattccatgtggctgactaggtcaattttttttctgaacaaaagcaggtttttatatgtaaacagtgagaaaagaaaggctaaacactatgtaaatgtgaatggaaacttggaaatactcgtttttataaactacaaaaactttttgttgtttatcagggggaaaatccatatttttaaattttttcgggggttgacaaaaacttttaactgttcaagcctgttgcggaaaaattctttggaaaacattttttaacactttttttcggggggaaaaaaagcacctttttttggggggggggggtaaaaaacaggtgttttttcccaacaattttttt

SEQ ID NO: 457787 - DNA, 3013 bp, Homo sapiens
cgatctagaggatcccgtggacattccacgagtcgcactccatgacatccctgtcttcctcaacgacttcttcctcgacatcttcctcctctactggtaaccaaggcaatcaggcctaccagaatcgcccagtggctgctaataccttggactttggacagaatggagctatggacgttaatttgaccgtctactccaatccccgccaagagactggcatagctggacatccaacataccaattttctgctaatacaggtcctgcacattacatgactgaaggacatctgacaatgaggcaaggggctgatagagaagagtcccccatgacaggagtttgtgtgcaacagagtcctgtagctagctcgtgactacattgaaacttgagtttgtttcttgtgtgtttttatagaagtggtgttttttttccaaaaacaaagtgcaaagctgcttgaatcaggaggagattaacacactgaaccgctacaagagggcaaagctgattttttttttaacttgaaaagattgcaaagggacattgaagtgtttaaaagagccatgtccaaacccatcttcatggatagctcagaggtatcctctttttgctcccccattttaacttgccacatcccagtcacagtggggtttttttgtctttctattcagcaaaagttaatattcagatgttggtcttggtcatttgccaactaattttaaagtaaaaggcactgcacataatttgcataaagggccccatgagggtgtttttttttttctttttgtcccccccatccccctttttttttgttttgttctgttttgttttgggtgggagggtgggaaatttgggtttttaagtcctctaaacacacttgggcacggaaatgcagtactgtaaggaagagggacctccagcttccacaaacaccatcttcagctgtatgaaagggacggttgtggtgaagtttgtcaggcacagtaagcatgctgagtggcggggatcagaactctcctatctgaacctactgaggagcaaagcagcaattacatgggatcctgtggctctcccgttgcagaggccacaggaagataggatggaacgtgactggtctcctaaccaaggtgcactgagaagcaatcaacgggtcggtcgtggccagtcctggggaggtctgagtggtggtctttgggataacctttggccttatggatttggactcgaaattagaagagcctaccatttcagatgcaatcacttttggacatgcttttgcagacagtccttaatgctgaaaacacagagaatgggtaattcaagaggcctttcttttaaaatagacttttgtgacccactaattgtaaggtattgcaaggtcactttgcgtgtgtcataaagttgacttccttattggttgaaggtcacagaagtagtggtttgctttgatggaaatagctacagctgtgtcccttcctgctttttactttttcttttgctttttctcggcacgtggtatctccaccatttcttctgcacaaagatgtcttctgttcatcctgaacatttttaaaaaatgcagaattttatgtgactgcttttttgcctcacaattatgctgtgaattttacaaaaatttattttcttttttgataatttattgtaccaaagctgtttttatagcacatagatgtctgtaaccaataatgtagcagttctgcactttgacacaaggtgtaactagaccatttttaaatgtcagttgaaaattatggctgtactattgcttaaacaaaactggaactgttgttgaatccatagccaatacatttacagcaatctgtgtactgaacatagtagattgacatctaattcaagattacaacatctgttacattctaagtgtgttcaggcttctgaaggtaaagggacactggatccagaagctatggaaccagcagttgattcttgtattcctgattaacctacttgtaaacttgaaagcaagaccttgattgcaccaacaggtccagagtatgagtgcaagcaaagcagaactctcatgcgtgacctgagcagacaggctggtatttaacaggtgcctcgtgttgagattacgctgccttaatgtaacacagtctggcagttgctaaatttgtgttcccattttaaattgaccaattttggggtgtgacacttttgagcggttgaattgggagaatgaagataagtaatttacctgtccaggatcaaaagaagcctagaaaagaagcagtaatctacctctgccgataacctgtttaagatgactcagcagaacaccgcgtttcattctattggtcaattccatgtggctgactaggtcaattttttttctgaacaaaagcaggtttttatatgtaaacagtgagaaaagaaaggctaaacactatgtaaatgtgaatggaaacttggaaatactcgtttttataaactacaaaaactttttgttgtttatcaggaaatccatatttattttgtaattaactgtcaagcctgtggatgatttttttgaacttggtagttcataaaggtttacagtgaataaaaggatatcatcttgagtatagcaatatcaaaaggaattcagtagttactgctgtttaggaatataaggttaagatatcatatgggtcaggtcattttttttttctgtgctggttgccacatcttagcaagcaccaaaaaactaaagcagtttttaaaccgatatttacgtaaagaaaatcataaaatccaatgcttctgcatactgtgttatgttacagtccagttttgtgtgctttactacacagtttggttacaggacttctgtgcattgtaaacataaacagcatggaaaaggttaaatacctgtgttcagattgtaagatctagtccggacttgctgtgtatattgtaacgttaaatgaaaaaagaacccccctttgtattatagtcatgcggtcttatgtatgataaacagttgaataatttgtc

SEQ ID NO: 457788 - DNA, 5402 bp, Homo sapiens
cgcggcccaggtcggcctcagagagcggacaccccgagcggggggtgcgggcgccgccgccgccgcttctgctgctgctgttcctgctgctgctgttggtgccgctgccgccgccggcgagcaggcgggaccggtgtgagtgcgagtgtgtgtgcgagggagcgtgtgcgagggcgattgtgcgcgcgagtgtgcgggtgtgtgcgagtgtctgtctgtctgtgcggggactcgggggcgggcggttcgggctctcctggcggaggagccgccgccgccgcccgggccccggcgcttctcgctgcgcaggttcggagcgcgcgccattttgtgagatttacaaaatcctcctcgggaagaagccgccggcagcagccgccgctcggcgcccggcctcgccgacgccgccctctgcgccgggccggccgtgcggccccgccgcctggaatcggggcccggggactgcggtatttgccggggagggggctgtcgcctccccggccccgggcgccgctggaaccgcgagccgaggagagactgagcaggctgcggcgcggccaggagccggagcgccgggggcggagagaggctgccggggcggcgctggctgcggaggccgcggcgggagcgcggcgcgggagcccgaggctgagactcaccggaggaagcggcgcgagcgccccgccatcgtcccggatctcaccctgttgcccaggctggagtgcagtggcatgatcagggctcactgcagccttgacttcctggaatcagtgttatagttttgccgctggactcttccctcccttcccccaccccatcaggatgatatgagacttgaaagaagacgatgcatacaggaggagagacttcagcatgcaaaccttcatctgttcggcttgcaccgtcattttcattccatgctgctggccttcagatggctggacagatgccccattcacatcagtacagtgaccgtcgccagccaaacataagtgaccaacaggtttctgccttatcatattctgaccagattcagcaacctctaactaaccaggtgatgcctgatattgtcatgttacagaggcggatgccccaaaccttccgtgacccagcaactgctcccctgagaaaactttctgttgacttgatcaaaacatacaagcatattaatgaggtttactatgcaaaaaagaagcgaagacaccaacagggccagggagacgattctagtcataagaaggaacggaaggtttacaatgatggttatgatgatgataactatgattatattgtaaaaaacggagaaaagtggatggatcgttacgaaattgactccttgataggcaaaggttcctttggacaggttgtaaaggcatatgatcgtgtggagcaagaatgggttgccattaaaataataaagaacaagaaggcttttctgaatcaagcacagatagaagtgcgacttcttgagctcatgaacaaacatgacactgaaatgaaatactacatagtgcatttgaaacgccactttatgtttcgaaaccatctctgtttagtttttgaaatgctgtcctacaacctctatgacttgctgagaaacaccaatttccgaggggtctctttgaacctaacacgaaagtttgcgcaacagatgtgcactgcactgcttttccttgcgactccagaacttagtatcattcactgtgatctaaaacctgaaaatatccttctttgtaaccccaaacgcagtgcaatcaagatagttgactttggcagttcttgtcagttggggcagaggatataccagtatattcagagtcgcttttatcggtctccagaggtgctactgggaatgccttatgaccttgccattgatatgtggtccctcgggtgtattttggttgaaatgcacactggagaacctctgttcagtggtgccaatgaggtagatcagatgaataaaatagtggaagttctgggtattccacctgctcatattcttgaccaagcaccaaaagcaagaaagttctttgagaagttgccagatggcacttggaacttaaagaagaccaaagatggaaaacgggagtacaaaccaccaggaacccgtaaacttcataacattcttggagtggaaacaggaggacctggtgggcgacgtgctggggagtcaggtcatacggtcgctgactacttgaagttcaaagacctcattttaaggatgcttgattatgaccccaaaactcgaattcaaccttattatgctctgcagcacagtttcttcaagaaaacagctgatgaaggtacaaatacaagtaatagtgtatctacaagccccgccatggagcagtctcagtcttcgggcaccacctccagtacatcgtcaagctcaggtggctcatcggggacaagcaacagtgggagagcccggtcggatccgacgcaccagcatcggcacagtggtgggcacttcacagctgccgtgcaggccatggactgcgagacacacagtccccaggtgcgtcagcaatttcctgctcctcttggttggtcaggcactgaagctcctacacaggtcactgttgaaactcatcctgttcaagaaacaacctttcatgtagcccctcaacagaatgcattgcatcatcaccatggtaacagttcccatcaccatcaccaccaccaccaccatcaccaccaccatggacaacaagccttgggtaaccggaccaggccaagggtctacaattctccaacgaatagctcctctacccaagattctatggaggttggccacagtcaccactccatgacatccctgtcttcctcaacgacttcttcctcgacatcttcctcctctactggtaaccaaggcaatcaggcctaccagaatcgcccagtggctgctaataccttggactttggacagaatggagctatggacgttaatttgaccgtctactccaatccccgccaagagactggcatagctggacatccaacataccaattttctgctaatacaggtcctgcacattacatgactgaaggacatctgacaatgaggcaaggggctgatagagaagagtcccccatgacaggagtttgtgtgcaacagagtcctgtagctagctcgtgactacattgaaacttgagtttgtttcttgtgtgtttttatagaagtggtgttttttttccaaaaacaaagtgcaaagctgcttgaatcaggaggagattaacacactgaaccgctacaagagggcaaagctgattttttttttaacttgaaaagattgcaaagggacattgaagtgtttaaaagagccatgtccaaacccatcttcatggatagctcagaggtatcctctttttgctcccccattttaacttgccacatcccagtcacagtggggtttttttgtctttctattcagcaaaagttaatattcagatgttggtcttggtcatttgccaactaattttaaagtaaaaggcactgcacataatttgcataaagggccccatgagggtgtttttttttttctttttgtcccccccatccccctttttttttgttttgttctgttttgttttgggtgggagggtgggaaatttgggtttttaagtcctctaaacacacttgggcacggaaatgcagtactgtaaggaagagggacctccagcttccacaaacaccatcttcagctgtatgaaagggacggttgtggtgaagtttgtcaggcacagtaagcatgctgagtggcggggatcagaactctcctatctgaacctactgaggagcaaagcagcaattacatgggatcctgtggctctcccgttgcagaggccacaggaagataggatggaacgtgactggtctcctaaccaaggtgcactgagaagcaatcaacgggtcggtcgtggccagtcctggggaggtctgagtggtggtctttgggataacctttggccttatggatttggactcgaaattagaagagcctaccatttcagatgcaatcacttttggacatgcttttgcagacagtccttaatgctgaaaacacagagaatgggtaattcaagaggcctttcttttaaaatagacttttgtgacccactaattgtaaggtattgcaaggtcactttgcgtgtgtcataaagttgacttccttattggttgaaggtcacagaagtagtggtttgctttgatggaaatagctacagctgtgtcccttcctgctttttactttttcttttgctttttctcggcacgtggtatctccaccatttcttctgcacaaagatgtcttctgttcatcctgaacatttttaaaaaatgcagaattttatgtgactgcttttttgcctcacaattatgctgtgaattttacaaaaatttattttcttttttgataatttattgtaccaaagctgtttttatagcacatagatgtctgtaaccaataatgtagcagttctgcactttgacacaaggtgtaactagaccatttttaaatgtcagttgaaaattatggctgtactattgcttaaacaaaactggaactgttgttgaatccatagccaatacatttacagcaatctgtgtactgaacatagtagattgacatctaattcaagattacaacatctgttacattctaagtgtgttcaggcttctgaaggtaaagggacactggatccagaagctatggaaccagcagttgattcttgtattcctgattaacctacttgtaaacttgaaagcaagaccttgattgcaccaacaggtccagagtatgagtgcaagcaaagcagaactctcatgcgtgacctgagcagacaggctggtatttaacaggtgcctcgtgttgagattacgctgccttaatgtaacacagtctggcagttgctaaatttgtgttcccattttaaattgaccaattttggggtgtgacacttttgagcggttgaattgggagaatgaagataagtaatttacctgtccaggatcaaaagaagaaagttcgtttctctcatccgtaagcacagggctgtacacagatcctttattggcatctgcatgagaggcctagaaatcggatgttagaagctaggaatcatggctctgagcgccttgcataaaggagatactcactgatactaaatcaaggcatgtaaacaatactgggtaaatcatacctaccagaataaagagtaacatgcactgcttttctttcatctgtattctttcatgcattacctggttgtttaagattattcgaatgcaattcttaactgcattgtgagctattgtaagtcttcactgtatatatggaaaaagtaaatgggtagtcgtcccacaccaatgtgacattttatgataaatgttttaccagcaa

SEQ ID NO: 457789 - DNA, 1232 bp, Homo sapiens
gatcgagccctaccgtgtatcctatagatcagtagccaatacatttacagcaatctgtgtactgaacatagtagattgacatctaattcaagattacaacatctgttacattctaagtgtgttcaggcttctgaaggtaaagggacactggatccagaagctatggaaccagcagttgattcttgtattcctgattaacctacttgtaaacttgaaagcaagaccttgattgcaccaacaggtccagagtatgagtgcaagcaaagcagaactctcatgcgtgacctgagcagacaggctggtatttaacaggtgcctcgtgttgagattacgctgccttaatgtaacacagtctggcagttgctaaatttgtgttcccattttaaattgaccaattttggggtgtgacacttttgagcggttgaattgggagaatgaagataagtaatttacctgtccaggatcaaaagaagcctagaaaagaagcagtaatctacctctgccgataacctgtttaagatgactcagcagaacaccgcgtttcattctattggtcaattccatgtggctgactaggtcaattttttttctgaacaaaagcaggtttttatatgtaaacagtgagaaaagaaaggctaaacactatgtaaatgtgaatggaaacttggaaatactcgtttttataaactacaaaaactttttgttgtttatcaggaaatccatatttattttgtaattaactgtcaagcctgtggatgatttttttgaacttggtagttcataaaggtttacagtgaataaaaggatatcatcttgagtatagcaatatcaaaaggaattcagtagttactgctgtttaggaatataaggttaagatatcatatgggtcaggtcattttttttttctgtgctggttgccacatcttagcaagcaccaaaaaactaaagcagtttttaaaccgatatttacgtaaagaaaatcataaaatccaatgcttctgcatactgtgttatgttacagtccagttttgtgtgctttactacacagtttggttacaggacttctgtgcattgtaaacataaacagcatggaaaaggttaaatacctgtgttcagattgtaagatctagtccggacttgctgtgtatattgtaacgttaaatgaaaaaagaacccccctttgtattatagtcatgcggtcttatgtatgataaacagttgaataatttgtc

SEQ ID NO: 457790 - DNA, 3947 bp, Homo sapiens
  misc_feature (3712)..(3712): n is a, c, g, or t
cgcggcccaggtcggcctcagagagcggacaccccgagcggggggtgcgggcgccgccgccgccgcttctgctgctgctgttcctgctgctgctgttggtgccgctgccgccgccggcgagcaggcgggaccggtgtgagtgcgagtgtgtgtgcgagggagcgtgtgcgagggcgattgtgcgcgcgagtgtgcgggtgtgtgcgagtgtctgtctgtctgtgcggggactcgggggcgggcggttcgggctctcctggcggaggagccgccgccgccgcccgggccccggcgcttctcgctgcgcaggttcggagcgcgcgccattttgtgagatttacaaaatcctcctcgggaagaagccgccggcagcagccgccgctcggcgcccggcctcgccgacgccgccctctgcgccgggccggccgtgcggccccgccgcctggaatcggggcccggggactgcggtatttgccggggagggggctgtcgcctccccggccccgggcgccgctggaaccgcgagccgaggagagactgagcaggctgcggcgcggccaggagccggagcgccgggggcggagagaggctgccggggcggcgctggctgcggaggccgcggcgggagcgcggcgcgggagcccgaggctgagactcaccggaggaagcggcgcgagcgccccgccatcgtcccggatctcaccctgttgcccaggctggagtgcagtggcatgatcagggctcactgcagccttgacttcctggaatcagtgttatagttttgccgctggactcttccctcccttcccccaccccatcaggatgatatgagacttgaaagaagacgatgcatacaggaggagagacttcagcatgcaaaccttcatctgttcggcttgcaccgtcattttcattccatgctgctggccttcagatggctggacagatgccccattcacatcagtacagtgaccgtcgccagccaaacataagtgaccaacaggtttctgccttatcatattctgaccagattcagcaacctctaactaaccaggtgatgcctgatattgtcatgttacagaggcggatgccccaaaccttccgtgacccagcaactgctcccctgagaaaactttctgttgacttgatcaaaacatacaagcatattaatgaggtttactatgcaaaaaagaagcgaagacaccaacagggccagggagacgattctagtcataagaaggaacggaaggtttacaatgatggttatgatgatgataactatgattatattgtaaaaaacggagaaaagtggatggatcgttacgaaattgactccttgataggcaaaggttcctttggacaggttgtaaaggcatatgatcgtgtggagcaagaatgggttgccattaaaataataaagaacaagaaggcttttctgaatcaagcacagatagaagtgcgacttcttgagctcatgaacaaacatgacactgaaatgaaatactacatagtgcatttgaaacgccactttatgtttcgaaaccatctctgtttagtttttgaaatgctgtcctacaacctctatgacttgctgagaaacaccaatttccgaggggtctctttgaacctaacacgaaagtttgcgcaacagatgtgcactgcactgcttttccttgcgactccagaacttagtatcattcactgtgatctaaaacctgaaaatatccttctttgtaaccccaaacgcagtgcaatcaagatagttgactttggcagttcttgtcagttggggcagaggatataccagtatattcagagtcgcttttatcggtctccagaggtgctactgggaatgccttatgaccttgccattgatatgtggtccctcgggtgtattttggttgaaatgcacactggagaacctctgttcagtggtgccaatgaggtagatcagatgaataaaatagtggaagttctgggtattccacctgctcatattcttgaccaagcaccaaaagcaagaaagttctttgagaagttgccagatggcacttggaacttaaagaagaccaaagatggaaaacgggagtacaaaccaccaggaacccgtaaacttcataacattcttggagtggaaacaggaggacctggtgggcgacgtgctggggagtcaggtcatacggtcgctgactacttgaagttcaaagacctcattttaaggatgcttgattatgaccccaaaactcgaattcaaccttattatgctctgcagcacagtttcttcaagaaaacagctgatgaaggtacaaatacaagtaatagtgtatctacaagccccgccatggagcagtctcagtcttcgggcaccacctccagtacatcgtcaagctcaggtggctcatcggggacaagcaacagtgggagagcccggtcggatccgacgcaccagcatcggcacagtggtgggcacttcacagctgccgtgcaggccatggactgcgagacacacagtccccaggtgcgtcagcaatttcctgctcctcttggttggtcaggcactgaagctcctacacaggtcactgttgaaactcatcctgttcaagaaacaacctttcatgtagcccctcaacagaatgcattgcatcatcaccatggtaacagttcccatcaccatcaccaccaccaccaccatcaccaccaccatggacaacaagccttgggtaaccggaccaggccaagggtctacaattctccaacgaatagctcctctacccaagattctatggaggttggccacagtcaccactccatgacatccctgtcttcctcaacgacttcttcctcgacatcttcctcctctactggtaaccaaggcaatcaggcctaccagaatcgcccagtggctgctaataccttggactttggacagaatggagctatggacgttaatttgaccgtctactccaatccccgccaagagactggcatagctggacatccaacataccaattttctgctaatacaggtcctgcacattacatgactgaaggacatctgacaatgaggcaaggggctgatagagaagagtcccccatgacaggagtttgtgtgcaacagagtcctgtagctagctcgtgactacattgaaacttgagtttgtttcttgtgtgtttttatagaagtggtgttttttttccaaaaacaaagtgcaaagctgcttgaatcaggaggattgcttgagcccaagaatttgaggttgcagtgagctgtaattatgccactgcattccagtctgggtgacagagtaagagtaagaccctgtctctctgtctctctttctctcttttttttttttaaaggagtcagctctacaaagatgttgctttctttgatgcattgcaaaaagcaaagctttggactgggattcaggagacccggactctgtcattaaatcaactgtgactctgggccagttactttccatttttgagtctagatttcctacttattgagggagcttatttggatgatctttaaggtcttttttggcactaataactcggtgtctctttttttcactttcaccatttcagttgatccaccaacaaacctgagagatcaggtatggcttccaagagttgtctcggccaactctgatgaaatgcttactctgtactagacattgttacaagcatgttacgtgcataaacnatttatcttcccacatcttgtgaggaggcactatagagacgctatttgagatgggaaacaaggtacaaagagtctagttgaccttaagtacttataagaagtggagagtggagtcacatccggcttaagtccaaggttggctataacacatttggctcgttttttaccaaattttccaagagttcttgatccattcaggagttggccattggttattcgggcttatttcagcccg

SEQ ID NO: 457791 - DNA, 1727 bp, Homo sapiens
cgcggcccaggtcggcctcagagagcggacaccccgagcggggggtgcgggcgccgccgccgccgcttctgctgctgctgttcctgctgctgctgttggtgccgctgccgccgccggcgagcaggcgggaccggtgtgagtgcgagtgtgtgtgcgagggagcgtgtgcgagggcgattgtgcgcgcgagtgtgcgggtgtgtgcgagtgtctgtctgtctgtgcggggactcgggggcgggcggttcgggctctcctggcggaggagccgccgccgccgcccgggccccggcgcttctcgctgcgcaggttcggagcgcgcgccattttgtgagatttacaaaatcctcctcgggaagaagccgccggcagcagccgccgctcggcgcccggcctcgccgacgccgccctctgcgccgggccggccgtgcggccccgccgcctggaatcggggcccggggactgcggtatttgccggggagggggctgtcgcctccccggccccgggcgccgctggaaccgcgagccgaggagagactgagcaggctgcggcgcggccaggagccggagcgccgggggcggagagaggctgccggggcggcgctggctgcggaggccgcggcgggagcgcggcgcgggagcccgaggctgagactcaccggaggaagcggcgcgagcgccccgccatcgtcccggatctcaccctgttgcccaggctggagtgcagtggcatgatcagggctcactgcagccttgacttcctggaatcagtgttatagttttgccgctggactcttccctcccttcccccaccccatcaggatgatatgagacttgaaagaagacgatgcatacaggaggagagacttcagcatgcaaaccttcatctgttcggcttgcaccgtcattttcattccatgctgctggccttcagatggctggacagatgccccattcacatcagtacagtgaccgtcgccagccaaacataagtgaccaacaggtttctgccttatcatattctgaccagattcagcaacctctaactaaccagaggcggatgccccaaaccttccgtgacccagcaactgctcccctgagaaaactttctgttgacttgatcaaaacatacaagcatattaatgaggtaagacttgatttgttataataacatctatcttgcagtatgtcattgagaaaaaaagtgtgacctatttaccctaaacttttttttcattcctagtagttgtcatattgatgattattatgaagactaatgatttagaaataatattacaattatgtaaaagatatattaacaaggactgcagagtataaagataattgtggataacttgatttttttaaggttgtatttaatatactgttatttctttttttaatttttattttttgttttttatttcatttgagttctgtaataacttattcaaaacaagaaaggggaataaggactctaaaagtatatatgtgttagaatttttgctagaatttttatatatttgtttctgcttttgccatgggtgtcaggaagctctgaaatatgtttaatacctagttacaggcatttggcctagtttatttgatctatctatatttctgtgattttattgtcttttaactttttatgtgtgttcttttatctatatctttttatgataagatgtccagaagcttttttgttgtaagtaaataagataaaaaac

SEQ ID NO: 457792 - DNA, 484 bp, Homo sapiens
aagtgcagtggcacgatcataggtggtcactacagtctcagattcctgggcttaagcagtcttcccacctcagcctccccagtagctgggattacaggtaagtgccaccatactcggctcattttgatgttaattccagttttctcacctattgcacgtctcctggacttacacagaaaatagaagacagttggctgggcactgtggctcacgcctgtaatctcagtactctgggaggtcacagtgggcagatcacttgaggacaagagttcgggaccaacctgactatcacagtgaaactctgtctctactaaaaatagaaaaaattatctgggcatggtggcgcccacttgtaatcccagttactagggatgccgaggcatgagaattgcttgagcctgagaggcggaagttttagcgagctgagattgtgccactgcactccagcctgggcgacagagtgagattctgtctttaaaaaaaa

SEQ ID NO: 457793 - DNA, 5781 bp, Homo sapiens
cgcggcccaggtcggcctcagagagcggacaccccgagcggggggtgcgggcgccgccgccgccgcttctgctgctgctgttcctgctgctgctgttggtgccgctgccgccgccggcgagcaggcgggaccggtgtgagtgcgagtgtgtgtgcgagggagcgtgtgcgagggcgattgtgcgcgcgagtgtgcgggtgtgtgcgagtgtctgtctgtctgtgcggggactcgggggcgggcggttcgggctctcctggcggaggagccgccgccgccgcccgggccccggcgcttctcgctgcgcaggttcggagcgcgcgccattttgtgagatttacaaaatcctcctcgggaagaagccgccggcagcagccgccgctcggcgcccggcctcgccgacgccgccctctgcgccgggccggccgtgcggccccgccgcctggaatcggggcccggggactgcggtatttgccggggagggggctgtcgcctccccggccccgggcgccgctggaaccgcgagccgaggagagactgagcaggctgcggcgcggccaggagccggagcgccgggggcggagagaggctgccggggcggcgctggctgcggaggccgcggcgggagcgcggcgcgggagcccgaggctgagactcaccggaggaagcggcgcgagcgccccgccatcgtcccggatctcaccctgttgcccaggctggagtgcagtggcatgatcagggctcactgcagccttgacttcctggaatcagtgttatagttttgccgctggactcttccctcccttcccccaccccatcaggatgatatgagacttgaaagaagacgatgcatacaggaggagagacttcagcatgcaaaccttcatctgttcggcttgcaccgtcattttcattccatgctgctggccttcagatggctggacagatgccccattcacatcagtacagtgaccgtcgccagccaaacataagtgaccaacaggtttctgccttatcatattctgaccagattcagcaacctctaactaaccaggtgatgcctgatattgtcatgttacagaggcggatgccccaaaccttccgtgacccagcaactgctcccctgagaaaactttctgttgacttgatcaaaacatacaagcatattaatgaggtttactatgcaaaaaagaagcgaagacaccaacagggccagggagacgattctagtcataagaaggaacggaaggtttacaatgatggttatgatgatgataactatgattatattgtaaaaaacggagaaaagtggatggatcgttacgaaattgactccttgataggcaaaggttcctttggacaggttgtaaaggcatatgatcgtgtggagcaagaatgggttgccattaaaataataaagaacaagaaggcttttctgaatcaagcacagatagaagtgcgacttcttgagctcatgaacaaacatgacactgaaatgaaatactacatagtgcatttgaaacgccactttatgtttcgaaaccatctctgtttagtttttgaaatgctgtcctacaacctctatgacttgctgagaaacaccaatttccgaggggtctctttgaacctaacacgaaagtttgcgcaacagatgtgcactgcactgcttttccttgcgactccagaacttagtatcattcactgtgatctaaaacctgaaaatatccttctttgtaaccccaaacgcagtgcaatcaagatagttgactttggcagttcttgtcagttggggcagaggatataccagtatattcagagtcgcttttatcggtctccagaggtgctactgggaatgccttatgaccttgccattgatatgtggtccctcgggtgtattttggttgaaatgcacactggagaacctctgttcagtggtgccaatgaggtagatcagatgaataaaatagtggaagttctgggtattccacctgctcatattcttgaccaagcaccaaaagcaagaaagttctttgagaagttgccagatggcacttggaacttaaagaagaccaaagatggaaaacgggagtacaaaccaccaggaacccgtaaacttcataacattcttggagtggaaacaggaggacctggtgggcgacgtgctggggagtcaggtcatacggtcgctgactacttgaagttcaaagacctcattttaaggatgcttgattatgaccccaaaactcgaattcaaccttattatgctctgcagcacagtttcttcaagaaaacagctgatgaaggtacaaatacaagtaatagtgtatctacaagccccgccatggagcagtctcagtcttcgggcaccacctccagtacatcgtcaagctcaggtggctcatcggggacaagcaacagtgggagagcccggtcggatccgacgcaccagcatcggcacagtggtgggcacttcacagctgccgtgcaggccatggactgcgagacacacagtccccaggtgcgtcagcaatttcctgctcctcttggttggtcaggcactgaagctcctacacaggtcactgttgaaactcatcctgttcaagaaacaacctttcatgtagcccctcaacagaatgcattgcatcatcaccatggtaacagttcccatcaccatcaccaccaccaccaccatcaccaccaccatggacaacaagccttgggtaaccggaccaggccaagggtctacaattctccaacgaatagctcctctacccaagattctatggaggttggccacagtcaccactccatgacatccctgtcttcctcaacgacttcttcctcgacatcttcctcctctactggtaaccaaggcaatcaggcctaccagaatcgcccagtggctgctaataccttggactttggacagaatggagctatggacgttaatttgaccgtctactccaatccccgccaagagactggcatagctggacatccaacataccaattttctgctaatacaggtcctgcacattacatgactgaaggacatctgacaatgaggcaaggggctgatagagaagagtcccccatgacaggagtttgtgtgcaacagagtcctgtagctagctcgtgactacattgaaacttgagtttgtttcttgtgtgtttttatagaagtggtgttttttttccaaaaacaaagtgcaaagctgcttgaatcaggaggagattaacacactgaaccgctacaagagggcaaagctgattttttttttaacttgaaaagattgcaaagggacattgaagtgtttaaaagagccatgtccaaacccatcttcatggatagctcagaggtatcctctttttgctcccccattttaacttgccacatcccagtcacagtggggtttttttgtctttctattcagcaaaagttaatattcagatgttggtcttggtcatttgccaactaattttaaagtaaaaggcactgcacataatttgcataaagggccccatgagggtgtttttttttttctttttgtcccccccatccccctttttttttgttttgttctgttttgttttgggtgggagggtgggaaatttgggtttttaagtcctctaaacacacttgggcacggaaatgcagtactgtaaggaagagggacctccagcttccacaaacaccatcttcagctgtatgaaagggacggttgtggtgaagtttgtcaggcacagtaagcatgctgagtggcggggatcagaactctcctatctgaacctactgaggagcaaagcagcaattacatgggatcctgtggctctcccgttgcagaggccacaggaagataggatggaacgtgactggtctcctaaccaaggtgcactgagaagcaatcaacgggtcggtcgtggccagtcctggggaggtctgagtggtggtctttgggataacctttggccttatggatttggactcgaaattagaagagcctaccatttcagatgcaatcacttttggacatgcttttgcagacagtccttaatgctgaaaacacagagaatgggtaattcaagaggcctttcttttaaaatagacttttgtgacccactaattgtaaggtattgcaaggtcactttgcgtgtgtcataaagttgacttccttattggttgaaggtcacagaagtagtggtttgctttgatggaaatagctacagctgtgtcccttcctgctttttactttttcttttgctttttctcggcacgtggtatctccaccatttcttctgcacaaagatgtcttctgttcatcctgaacatttttaaaaaatgcagaattttatgtgactgcttttttgcctcacaattatgctgtgaattttacaaaaatttattttcttttttgataatttattgtaccaaagctgtttttatagcacatagatgtctgtaaccaataatgtagcagttctgcactttgacacaaggtgtaactagaccatttttaaatgtcagttgaaaattatggctgtactattgcttaaacaaaactggaactgttgttgaatccatagccaatacatttacagcaatctgtgtactgaacatagtagattgacatctaattcaagattacaacatctgttacattctaagtgtgttcaggcttctgaaggtaaagggacactggatccagaagctatggaaccagcagttgattcttgtattcctgattaacctacttgtaaacttgaaagcaagaccttgattgcaccaacaggtccagagtatgagtgcaagcaaagcagaactctcatgcgtgacctgagcagacaggctggtatttaacaggtgcctcgtgttgagattacgctgccttaatgtaacacagtctggcagttgctaaatttgtgttcccattttaaattgaccaattttggggtgtgacacttttgagcggttgaattgggagaatgaagataagtaatttacctgtccaggatcaaaagaagcctagaaaagaagcagtaatctacctctgccgataacctgtttaagatgactcagcagaacaccgcgtttcattctattggtcaattccatgtggctgactaggtcaattttttttctgaacaaaagcaggtttttatatgtaaacagtgagaaaagaaaggctaaacactatgtaaatgtgaatggaaacttggaaatactcgtttttataaactacaaaaactttttgttgtttatcaggaaatccatatttattttgtaattaactgtcaagcctgtggatgatttttttgaacttggtagttcataaaggtttacagtgaataaaaggatatcatcttgagtatagcaatatcaaaaggaattcagtagttactgctgtttaggaatataaggttaagatatcatatgggtcaggtcattttttttttctgtgctggttgccacatcttagcaagcaccaaaaaactaaagcagtttttaaaccgatatttacgtaaagaaaatcataaaatccaatgcttctgcatactgtgttatgttacagtccagttttgtgtgctttactacacagtttggttacaggacttctgtgcattgtaaacataaacagcatggaaaaggttaaatacctgtgttcagattgtaagatctagtccggacttgctgtgtatattgtaacgttaaatgaaaaaagaacccccctttgtattatagtcatgcggtcttatgtatgataaacagttgaataatttgtc

SEQ ID NO: 457794 - DNA, 5651 bp, Homo sapiens
cgcggcccaggtcggcctcagagagcggacaccccgagcggggggtgcgggcgccgccgccgccgcttctgctgctgctgttcctgctgctgctgttggtgccgctgccgccgccggcgagcaggcgggaccggtgtgagtgcgagtgtgtgtgcgagggagcgtgtgcgagggcgattgtgcgcgcgagtgtgcgggtgtgtgcgagtgtctgtctgtctgtgcggggactcgggggcgggcggttcgggctctcctggcggaggagccgccgccgccgcccgggccccggcgcttctcgctgcgcaggttcggagcgcgcgccattttgtgagatttacaaaatcctcctcgggaagaagccgccggcagcagccgccgctcggcgcccggcctcgccgacgccgccctctgcgccgggccggccgtgcggccccgccgcctggaatcggggcccggggactgcggtatttgccggggagggggctgtcgcctccccggccccgggcgccgctggaaccgcgagccgaggagagactgagcaggctgcggcgcggccaggagccggagcgccgggggcggagagaggctgccggggcggcgctggctgcggaggccgcggcgggagcgcggcgcgggagcccgaggctgagactcaccggaggaagcggcgcgagcgccccgccatcgtcccggatctcaccctgttgcccaggctggagtgcagtggcatgatcagggctcactgcagccttgacttcctggaatcagtgttatagttttgccgctggactcttccctcccttcccccaccccatcaggatgatatgagacttgaaagaagacgatgcatacaggaggagagacttcagcatgcaaaccttcatctgttcggcttgcaccgtcattttcattccatgctgctggccttcagatggctggacagatgccccattcacatcagtacagtgaccgtcgccagccaaacataagtgaccaacaggtttctgccttatcatattctgaccagattcagcaacctctaactaaccaggtgatgcctgatattgtcatgttacagaggcggatgccccaaaccttccgtgacccagcaactgctcccctgagaaaactttctgttgacttgatcaaaacatacaagcatattaatgaggtttactatgcaaaaaagaagcgaagacaccaacagggccagggagacgattctagtcataagaaggaacggaaggtttacaatgatggttatgatgatgataactatgattatattgtaaaaaacggagaaaagtggatggatcgttacgaaattgactccttgataggcaaaggttcctttggacaggttgtaaaggcatatgatcgtgtggagcaagaatgggttgccattaaaataataaagaacaagaaggcttttctgaatcaagcacagatagaagtgcgacttcttgagctcatgaacaaacatgacactgaaatgaaatactacatagtgcatttgaaacgccactttatgtttcgaaaccatctctgtttagtttttgaaatgctgtcctacaacctctatgacttgctgagaaacaccaatttccgaggggtctctttgaacctaacacgaaagtttgcgcaacagatgtgcactgcactgcttttccttgcgactccagaacttagtatcattcactgtgatctaaaacctgaaaatatccttctttgtaaccccaaacgcagtgcaatcaagatagttgactttggcagttcttgtcagttggggcagaggatataccagtatattcagagtcgcttttatcggtctccagaggtgctactgggaatgccttatgaccttgccattgatatgtggtccctcgggtgtattttggttgaaatgcacactggagaacctctgttcagtggtgccaatgaggtagatcagatgaataaaatagtggaagttctgggtattccacctgctcatattcttgaccaagcaccaaaagcaagaaagttctttgagaagttgccagatggcacttggaacttaaagaagaccaaagatggaaaacgggagtacaaaccaccaggaacccgtaaacttcataacattcttggagtggaaacaggaggacctggtgggcgacgtgctggggagtcaggtcatacggtcgctgactacttgaagttcaaagacctcattttaaggatgcttgattatgaccccaaaactcgaattcaaccttattatgctctgcagcacagtttcttcaagaaaacagctgatgaaggtacaaatacaagtaatagtgtatctacaagccccgccatggagcagtctcagtcttcgggcaccacctccagtacatcgtcaagctcaggtggctcatcggggacaagcaacagtgggagagcccggtcggatccgacgcaccagcatcggcacagtggtgggcacttcacagctgccgtgcaggccatggactgcgagacacacagtccccaggtgcgtcagcaatttcctgctcctcttggttggtcaggcactgaagctcctacacaggtcactgttgaaactcatcctgttcaagaaacaacctttcatgtagcccctcaacagaatgcattgcatcatcaccatggtaacagttcccatcaccatcaccaccaccaccaccatcaccaccaccatggacaacaagccttgggtaaccggaccaggccaagggtctacaattctccaacgaatagctcctctacccaagattctatggaggttggccacagtcaccactccatgacatccctgtcttcctcaacgacttcttcctcgacatcttcctcctctactggtaaccaaggcaatcaggcctaccagaatcgcccagtggctgctaataccttggactttggacagaatggagctatggacgttaatttgaccgtctactccaatccccgccaagagactggcatagctggacatccaacataccaattttctgctaatacaggtcctgcacattacatgactgaaggacatctgacaatgaggcaaggggctgatagagaagagtcccccatgacaggagtttgtgtgcaacagagtcctgtagctagctcgtgactacattgaaacttgagtttgtttcttgtgtgtttttatagaagtggtgttttttttccaaaaacaaagtgcaaagctgcttgaatcaggaggagattaacacactgaaccgctacaagagggcaaagctgattttttttttaacttgaaaagattgcaaagggacattgaagtgtttaaaagagccatgtccaaacccatcttcatggatagctcagaggtatcctctttttgctcccccattttaacttgccacatcccagtcacagtggggtttttttgtctttctattcagcaaaagttaatattcagatgttggtcttggtcatttgccaactaattttaaagtaaaaggcactgcacataatttgcataaagggccccatgagggtgtttttttttttctttttgtcccccccatccccctttttttttgttttgttctgttttgttttgggtgggagggtgggaaatttgggtttttaagtcctctaaacacacttgggcacggaaatgcagtactgtaaggaagagggacctccagcttccacaaacaccatcttcagctgtatgaaagggacggttgtggtgaagtttgtcaggcacagtaagcatgctgagtggcggggatcagaactctcctatctgaacctactgaggagcaaagcagcaattacatgggatcctgtggctctcccgttgcagaggccacaggaagataggatggaacgtgactggtctcctaaccaaggtgcactgagaagcaatcaacgggtcggtcgtggccagtcctggggaggtctgagtggtggtctttgggataacctttggccttatggatttggactcgaaattagaagagcctaccatttcagatgcaatcacttttggacatgcttttgcagacagtccttaatgctgaaaacacagagaatgggtaattcaagaggcctttcttttaaaatagacttttgtgacccactaattgtaaggtattgcaaggtcactttgcgtgtgtcataaagttgacttccttattggttgaaggtcacagaagtagtggtttgctttgatggaaatagctacagctgtgtcccttcctgctttttactttttcttttgctttttctcggcacgtggtatctccaccatttcttctgcacaaagatgtcttctgttcatcctgaacatttttaaaaaatgcagaattttatgtgactgcttttttgcctcacaattatgctgtgaattttacaaaaatttattttcttttttgataatttattgtaccaaagctgtttttatagcacatagatgtctgtaaccaataatgtagcagttctgcactttgacacaaggtgtaactagaccatttttaaatgtcagttgaaaattatggctgtactattgcttaaacaaaactggaactgttgttgaatccatagccaatacatttacagcaatctgtgtactgaacatagtagattgacatctaattcaagaccttgattgcaccaacaggtccagagtatgagtgcaagcaaagcagaactctcatgcgtgacctgagcagacaggctggtatttaacaggtgcctcgtgttgagattacgctgccttaatgtaacacagtctggcagttgctaaatttgtgttcccattttaaattgaccaattttggggtgtgacacttttgagcggttgaattgggagaatgaagataagtaatttacctgtccaggatcaaaagaagcctagaaaagaagcagtaatctacctctgccgataacctgtttaagatgactcagcagaacaccgcgtttcattctattggtcaattccatgtggctgactaggtcaattttttttctgaacaaaagcaggtttttatatgtaaacagtgagaaaagaaaggctaaacactatgtaaatgtgaatggaaacttggaaatactcgtttttataaactacaaaaactttttgttgtttatcaggaaatccatatttattttgtaattaactgtcaagcctgtggatgatttttttgaacttggtagttcataaaggtttacagtgaataaaaggatatcatcttgagtatagcaatatcaaaaggaattcagtagttactgctgtttaggaatataaggttaagatatcatatgggtcaggtcattttttttttctgtgctggttgccacatcttagcaagcaccaaaaaactaaagcagtttttaaaccgatatttacgtaaagaaaatcataaaatccaatgcttctgcatactgtgttatgttacagtccagttttgtgtgctttactacacagtttggttacaggacttctgtgcattgtaaacataaacagcatggaaaaggttaaatacctgtgttcagattgtaagatctagtccggacttgctgtgtatattgtaacgttaaatgaaaaaagaacccccctttgtattatagtcatgcggtcttatgtatgataaacagttgaataatttgtc

SEQ ID NO: 457795 - DNA, 5592 bp, Homo sapiens
cgcggcccaggtcggcctcagagagcggacaccccgagcggggggtgcgggcgccgccgccgccgcttctgctgctgctgttcctgctgctgctgttggtgccgctgccgccgccggcgagcaggcgggaccggtgtgagtgcgagtgtgtgtgcgagggagcgtgtgcgagggcgattgtgcgcgcgagtgtgcgggtgtgtgcgagtgtctgtctgtctgtgcggggactcgggggcgggcggttcgggctctcctggcggaggagccgccgccgccgcccgggccccggcgcttctcgctgcgcaggttcggagcgcgcgccattttgtgagatttacaaaatcctcctcgggaagaagccgccggcagcagccgccgctcggcgcccggcctcgccgacgccgccctctgcgccgggccggccgtgcggccccgccgcctggaatcggggcccggggactgcggtatttgccggggagggggctgtcgcctccccggccccgggcgccgctggaaccgcgagccgaggagagactgagcaggctgcggcgcggccaggagccggagcgccgggggcggagagaggctgccggggcggcgctggctgcggaggccgcggcgggagcgcggcgcgggagcccgaggctgagactcaccggaggaagcggcgcgagcgccccgccatcgtcccggaggagagacttcagcatgcaaaccttcatctgttcggcttgcaccgtcattttcattccatgctgctggccttcagatggctggacagatgccccattcacatcagtacagtgaccgtcgccagccaaacataagtgaccaacaggtttctgccttatcatattctgaccagattcagcaacctctaactaaccagaggcggatgccccaaaccttccgtgacccagcaactgctcccctgagaaaactttctgttgacttgatcaaaacatacaagcatattaatgaggtttactatgcaaaaaagaagcgaagacaccaacagggccagggagacgattctagtcataagaaggaacggaaggtttacaatgatggttatgatgatgataactatgattatattgtaaaaaacggagaaaagtggatggatcgttacgaaattgactccttgataggcaaaggttcctttggacaggttgtaaaggcatatgatcgtgtggagcaagaatgggttgccattaaaataataaagaacaagaaggcttttctgaatcaagcacagatagaagtgcgacttcttgagctcatgaacaaacatgacactgaaatgaaatactacatagtgcatttgaaacgccactttatgtttcgaaaccatctctgtttagtttttgaaatgctgtcctacaacctctatgacttgctgagaaacaccaatttccgaggggtctctttgaacctaacacgaaagtttgcgcaacagatgtgcactgcactgcttttccttgcgactccagaacttagtatcattcactgtgatctaaaacctgaaaatatccttctttgtaaccccaaacgcagtgcaatcaagatagttgactttggcagttcttgtcagttggggcagaggatataccagtatattcagagtcgcttttatcggtctccagaggtgctactgggaatgccttatgaccttgccattgatatgtggtccctcgggtgtattttggttgaaatgcacactggagaacctctgttcagtggtgccaatgaggtagatcagatgaataaaatagtggaagttctgggtattccacctgctcatattcttgaccaagcaccaaaagcaagaaagttctttgagaagttgccagatggcacttggaacttaaagaagaccaaagatggaaaacgggagtacaaaccaccaggaacccgtaaacttcataacattcttggagtggaaacaggaggacctggtgggcgacgtgctggggagtcaggtcatacggtcgctgactacttgaagttcaaagacctcattttaaggatgcttgattatgaccccaaaactcgaattcaaccttattatgctctgcagcacagtttcttcaagaaaacagctgatgaaggtacaaatacaagtaatagtgtatctacaagccccgccatggagcagtctcagtcttcgggcaccacctccagtacatcgtcaagctcaggtggctcatcggggacaagcaacagtgggagagcccggtcggatccgacgcaccagcatcggcacagtggtgggcacttcacagctgccgtgcaggccatggactgcgagacacacagtccccaggtgcgtcagcaatttcctgctcctcttggttggtcaggcactgaagctcctacacaggtcactgttgaaactcatcctgttcaagaaacaacctttcatgtagcccctcaacagaatgcattgcatcatcaccatggtaacagttcccatcaccatcaccaccaccaccaccatcaccaccaccatggacaacaagccttgggtaaccggaccaggccaagggtctacaattctccaacgaatagctcctctacccaagattctatggaggttggccacagtcaccactccatgacatccctgtcttcctcaacgacttcttcctcgacatcttcctcctctactggtaaccaaggcaatcaggcctaccagaatcgcccagtggctgctaataccttggactttggacagaatggagctatggacgttaatttgaccgtctactccaatccccgccaagagactggcatagctggacatccaacataccaattttctgctaatacaggtcctgcacattacatgactgaaggacatctgacaatgaggcaaggggctgatagagaagagtcccccatgacaggagtttgtgtgcaacagagtcctgtagctagctcgtgactacattgaaacttgagtttgtttcttgtgtgtttttatagaagtggtgttttttttccaaaaacaaagtgcaaagctgcttgaatcaggaggagattaacacactgaaccgctacaagagggcaaagctgattttttttttaacttgaaaagattgcaaagggacattgaagtgtttaaaagagccatgtccaaacccatcttcatggatagctcagaggtatcctctttttgctcccccattttaacttgccacatcccagtcacagtggggtttttttgtctttctattcagcaaaagttaatattcagatgttggtcttggtcatttgccaactaattttaaagtaaaaggcactgcacataatttgcataaagggccccatgagggtgtttttttttttctttttgtcccccccatccccctttttttttgttttgttctgttttgttttgggtgggagggtgggaaatttgggtttttaagtcctctaaacacacttgggcacggaaatgcagtactgtaaggaagagggacctccagcttccacaaacaccatcttcagctgtatgaaagggacggttgtggtgaagtttgtcaggcacagtaagcatgctgagtggcggggatcagaactctcctatctgaacctactgaggagcaaagcagcaattacatgggatcctgtggctctcccgttgcagaggccacaggaagataggatggaacgtgactggtctcctaaccaaggtgcactgagaagcaatcaacgggtcggtcgtggccagtcctggggaggtctgagtggtggtctttgggataacctttggccttatggatttggactcgaaattagaagagcctaccatttcagatgcaatcacttttggacatgcttttgcagacagtccttaatgctgaaaacacagagaatgggtaattcaagaggcctttcttttaaaatagacttttgtgacccactaattgtaaggtattgcaaggtcactttgcgtgtgtcataaagttgacttccttattggttgaaggtcacagaagtagtggtttgctttgatggaaatagctacagctgtgtcccttcctgctttttactttttcttttgctttttctcggcacgtggtatctccaccatttcttctgcacaaagatgtcttctgttcatcctgaacatttttaaaaaatgcagaattttatgtgactgcttttttgcctcacaattatgctgtgaattttacaaaaatttattttcttttttgataatttattgtaccaaagctgtttttatagcacatagatgtctgtaaccaataatgtagcagttctgcactttgacacaaggtgtaactagaccatttttaaatgtcagttgaaaattatggctgtactattgcttaaacaaaactggaactgttgttgaatccatagccaatacatttacagcaatctgtgtactgaacatagtagattgacatctaattcaagattacaacatctgttacattctaagtgtgttcaggcttctgaaggtaaagggacactggatccagaagctatggaaccagcagttgattcttgtattcctgattaacctacttgtaaacttgaaagcaagaccttgattgcaccaacaggtccagagtatgagtgcaagcaaagcagaactctcatgcgtgacctgagcagacaggctggtatttaacaggtgcctcgtgttgagattacgctgccttaatgtaacacagtctggcagttgctaaatttgtgttcccattttaaattgaccaattttggggtgtgacacttttgagcggttgaattgggagaatgaagataagtaatttacctgtccaggatcaaaagaagcctagaaaagaagcagtaatctacctctgccgataacctgtttaagatgactcagcagaacaccgcgtttcattctattggtcaattccatgtggctgactaggtcaattttttttctgaacaaaagcaggtttttatatgtaaacagtgagaaaagaaaggctaaacactatgtaaatgtgaatggaaacttggaaatactcgtttttataaactacaaaaactttttgttgtttatcaggaaatccatatttattttgtaattaactgtcaagcctgtggatgatttttttgaacttggtagttcataaaggtttacagtgaataaaaggatatcatcttgagtatagcaatatcaaaaggaattcagtagttactgctgtttaggaatataaggttaagatatcatatgggtcaggtcattttttttttctgtgctggttgccacatcttagcaagcaccaaaaaactaaagcagtttttaaaccgatatttacgtaaagaaaatcataaaatccaatgcttctgcatactgtgttatgttacagtccagttttgtgtgctttactacacagtttggttacaggacttctgtgcattgtaaacataaacagcatggaaaaggttaaatacctgtgttcagattgtaagatctagtccggacttgctgtgtatattgtaacgttaaatgaaaaaagaacccccctttgtattatagtcatgcggtcttatgtatgataaacagttgaataatttgtc

SEQ ID NO: 457796 - DNA, 5306 bp, Homo sapiens
cgcggcccaggtcggcctcagagagcggacaccccgagcggggggtgcgggcgccgccgccgccgcttctgctgctgctgttcctgctgctgctgttggtgccgctgccgccgccggcgagcaggcgggaccggtgtgagtgcgagtgtgtgtgcgagggagcgtgtgcgagggcgattgtgcgcgcgagtgtgcgggtgtgtgcgagtgtctgtctgtctgtgcggggactcgggggcgggcggttcgggctctcctggcggaggagccgccgccgccgcccgggccccggcgcttctcgctgcgcaggttcggagcgcgcgccattttgtgagatttacaaaatcctcctcgggaagaagccgccggcagcagccgccgctcggcgcccggcctcgccgacgccgccctctgcgccgggccggccgtgcggccccgccgcctggaatcggggcccggggactgcggtatttgccggggagggggctgtcgcctccccggccccgggcgccgctggaaccgcgagccgaggagagactgagcaggctgcggcgcggccaggagccggagcgccgggggcggagagaggctgccggggcggcgctggctgcggaggccgcggcgggagcgcggcgcgggagcccgaggctgagactcaccggaggaagcggcgcgagcgccccgccatcgtcccggatctcaccctgttgcccaggctggagtgcagtggcatgatcagggctcactgcagccttgacttcctggaatcagtgttatagttttgccgctggactcttccctcccttcccccaccccatcaggatgatatgagacttgaaagaagacgatgcatacaggaggagagacttcagcatgcaaaccttcatctgttcggcttgcaccgtcattttcattccatgctgctggccttcagatggctggacagatgccccattcacatcagtacagtgaccgtcgccagccaaacataagtgaccaacaggtttctgccttatcatattctgaccagattcagcaacctctaactaaccaggtgatgcctgatattgtcatgttacagaggcggatgccccaaaccttccgtgacccagcaactgctcccctgagaaaactttctgttgacttgatcaaaacatacaagcatattaatgaggtttactatgcaaaaaagaagcgaagacaccaacagggccagggagacgattctagtcataagaaggaacggaaggtttacaatgatggttatgatgatgataactatgattatattgtaaaaaacggagaaaagtggatggatcgttacgaaattgactccttgataggcaaaggttcctttggacaggttgtaaaggcatatgatcgtgtggagcaagaatgggttgccattaaaataataaagaacaagaaggcttttctgaatcaagcacagatagaagtgcgacttcttgagctcatgaacaaacatgacactgaaatgaaatactacatagtgcatttgaaacgccactttatgtttcgaaaccatctctgtttagtttttgaaatgctgtcctacaacctctatgacttgctgagaaacaccaatttccgaggggtctctttgaacctaacacgaaagtttgcgcaacagatgtgcactgcactgcttttccttgcgactccagaacttagtatcattcactgtgatctaaaacctgaaaatatccttctttgtaaccccaaacgcagtgcaatcaagatagttgactttggcagttcttgtcagttggggcagaggatataccagtatattcagagtcgcttttatcggtctccagaggtgctactgggaatgccttatgaccttgccattgatatgtggtccctcgggtgtattttggttgaaatgcacactggagaacctctgttcagtggtgccaatgaggtagatcagatgaataaaatagtggaagttctgggtattccacctgctcatattcttgaccaagcaccaaaagcaagaaagttctttgagaagttgccagatggcacttggaacttaaagaagaccaaagatggaaaacgggagtacaaaccaccaggaacccgtaaacttcataacattcttggagtggaaacaggaggacctggtgggcgacgtgctggggagtcaggtcatacggtcgctgactacttgaagttcaaagacctcattttaaggatgcttgattatgaccccaaaactcgaattcaaccttattatgctctgcagcacagtttcttcaagaaaacagctgatgaaggtacaaatacaagtaatagtgtatctacaagccccgccatggagcagtctcagtcttcgggcaccacctccagtacatcgtcaagctcaggtggctcatcggggacaagcaacagtgggagagcccggtcggatccgacgcaccagcatcggcacagtggtgggcacttcacagctgccgtgcaggccatggactgcgagacacacagtccccaggtgcgtcagcaatttcctgctcctcttggttggtcaggcactgaagctcctacacaggtcactgttgaaactcatcctgttcaagaaacaacctttcatgtagcccctcaacagaatgcattgcatcatcaccatggtaacagttcccatcaccatcaccaccaccaccaccatcaccaccaccatggacaacaagccttgggtaaccggaccaggccaagggtctacaattctccaacgaatagctcctctacccaagattctatggaggttggccacagtcaccactccatgacatccctgtcttcctcaacgacttcttcctcgacatcttcctcctctactggtaaccaaggcaatcaggcctaccagaatcgcccagtggctgctaataccttggactttggacagaatggagctatggacgttaatttgaccgtctactccaatccccgccaagagactggcatagctggacatccaacataccaattttctgctaatacaggtcctgcacattacatgactgaaggacatctgacaatgaggcaaggggctgatagagaagagtcccccatgacaggagtttgtgtgcaacagagtcctgtagctagctcgtgactacattgaaacttgagtttgtttcttgtgtgtttttatagaagtggtgttttttttccaaaaacaaagtgcaaagctgcttgaatcaggaggagattaacacactgaaccgctacaagagggcaaagctgattttttttttaacttgaaaagattgcaaagggacattgaagtgtttaaaagagccatgtccaaacccatcttcatggatagctcagaggtatcctctttttgctcccccattttaacttgccacatcccagtcacagtggggtttttttgtctttctattcagcaaaagttaatattcagatgttggtcttggtcatttgccaactaattttaaagtaaaaggcactgcacataatttgcataaagggccccatgagggtgtttttttttttctttttgtcccccccatccccctttttttttgttttgttctgttttgttttgggtgggagggtgggaaatttgggtttttaagtcctctaaacacacttgggcacggaaatgcagtactgtaaggaagagggacctccagcttccacaaacaccatcttcagctgtatgaaagggacggttgtggtgaagtttgtcaggcacagtaagcatgctgagtggcggggatcagaactctcctatctgaacctactgaggagcaaagcagcaattacatgggatcctgtggctctcccgttgcagaggccacaggaagataggatggaacgtgactggtctcctaaccaaggtgcactgagaagcaatcaacgggtcggtcgtggccagtcctggggaggtctgagtggtggtctttgggataacctttggccttatggatttggactcgaaattagaagagcctaccatttcagatgcaatcacttttggacatgcttttgcagacagtccttaatgctgaaaacacagagaatgggtaattcaagaggcctttcttttaaaatagacttttgtgacccactaattgtaaggtattgcaaggtcactttgcgtgtgtcataaagttgacttccttattggttgaaggtcacagaagtagtggtttgctttgatggaaatagctacagctgtgtcccttcctgctttttactttttcttttgctttttctcggcacgtggtatctccaccatttcttctgcacaaagatgtcttctgttcatcctgaacatttttaaaaaatgcagaattttatgtgactgcttttttgcctcacaattatgctgtgaattttacaaaaatttattttcttttttgataatttattgtaccaaagctgtttttatagcacatagatgtctgtaaccaataatgtagcagttctgcactttgacacaaggtgtaactagaccatttttaaatgtcagttgaaaattatggctgtactattgcttaaacaaaactggaactgttgttgaatccatagccaatacatttacagcaatctgtgtactgaacatagtagattgacatctaattcaagattacaacatctgttacattctaagtgtgttcaggcttctgaaggtaaagggacactggatccagaagctatggaaccagcagttgattcttgtattcctgattaacctacttgtaaacttgaaagcaagaccttgattgcaccaacaggtccagagtatgagtgcaagcaaagcagaactctcatgcgtgacctgagcagacaggctggtatttaacaggtgcctcgtgttgagattacgctgccttaatgtaacacagtctggcagttgctaaatttgtgttcccattttaaattgaccaattttggggtgtgacacttttgagcggttgaattgggagaatgaagataagtaatttacctgtccaggatcaaaagaagcctagaaaagaagcagtaatctacctctgccgataacctgtttaagatgactcagcagaacaccgcgtttcattctattggtcaattccatgtggctgactaggtcaattttttttctgtgcattgtaaacataaacagcatggaaaaggttaaatacctgtgttcagattgtaagatctagtccggacttgctgtgtatattgtaacgttaaatgaaaaaagaacccccctttgtattatagtcatgcggtcttatgtatgataaacagttgaataatttgtc

SEQ ID NO: 457797 - DNA, 5119 bp, Homo sapiens
cgcggcccaggtcggcctcagagagcggacaccccgagcggggggtgcgggcgccgccgccgccgcttctgctgctgctgttcctgctgctgctgttggtgccgctgccgccgccggcgagcaggcgggaccggtgtgagtgcgagtgtgtgtgcgagggagcgtgtgcgagggcgattgtgcgcgcgagtgtgcgggtgtgtgcgagtgtctgtctgtctgtgcggggactcgggggcgggcggttcgggctctcctggcggaggagccgccgccgccgcccgggccccggcgcttctcgctgcgcaggttcggagcgcgcgccattttgtgagatttacaaaatcctcctcgggaagaagccgccggcagcagccgccgctcggcgcccggcctcgccgacgccgccctctgcgccgggccggccgtgcggccccgccgcctggaatcggggcccggggactgcggtatttgccggggagggggctgtcgcctccccggccccgggcgccgctggaaccgcgagccgaggagagactgagcaggctgcggcgcggccaggagccggagcgccgggggcggagagaggctgccggggcggcgctggctgcggaggccgcggcgggagcgcggcgcgggagcccgaggctgagactcaccggaggaagcggcgcgagcgccccgccatcgtcccggatctcaccctgttgcccaggctggagtgcagtggcatgatcagggctcactgcagccttgacttcctggaatcagtgttatagttttgccgctggactcttccctcccttcccccaccccatcaggatgatatgagacttgaaagaagacgatgcatacaggaggagagacttcagcatgcaaaccttcatctgttcggcttgcaccgtcattttcattccatgctgctggccttcagatggctggacagatgccccattcacatcagtacagtgaccgtcgccagccaaacataagtgaccaacaggtttctgccttatcatattctgaccagattcagcaacctctaactaaccaggtgatgcctgatattgtcatgttacagaggcggatgccccaaaccttccgtgacccagcaactgctcccctgagaaaactttctgttgacttgatcaaaacatacaagcatattaatgaggtttactatgcaaaaaagaagcgaagacaccaacagggccagggagacgattctagtcataagaaggaacggaaggtttacaatgatggttatgatgatgataactatgattatattgtaaaaaacggagaaaagtggatggatcgttacgaaattgactccttgataggcaaaggttcctttggacaggttgtaaaggcatatgatcgtgtggagcaagaatgggttgccattaaaataataaagaacaagaaggcttttctgaatcaagcacagatagaagtgcgacttcttgagctcatgaacaaacatgacactgaaatgaaatactacatagtgcatttgaaacgccactttatgtttcgaaaccatctctgtttagtttttgaaatgctgtcctacaacctctatgacttgctgagaaacaccaatttccgaggggtctctttgaacctaacacgaaagtttgcgcaacagatgtgcactgcactgcttttccttgcgactccagaacttagtatcattcactgtgatctaaaacctgaaaatatccttctttgtaaccccaaacgcagtgcaatcaagatagttgactttggcagttcttgtcagttggggcagaggatataccagtatattcagagtcgcttttatcggtctccagaggtgctactgggaatgccttatgaccttgccattgatatgtggtccctcgggtgtattttggttgaaatgcacactggagaacctctgttcagtggtgccaatgaggtagatcagatgaataaaatagtggaagttctgggtattccacctgctcatattcttgaccaagcaccaaaagcaagaaagttctttgagaagttgccagatggcacttggaacttaaagaagaccaaagatggaaaacgggagtacaaaccaccaggaacccgtaaacttcataacattcttggagtggaaacaggaggacctggtgggcgacgtgctggggagtcaggtcatacggtcgctgactacttgaagttcaaagacctcattttaaggatgcttgattatgaccccaaaactcgaattcaaccttattatgctctgcagcacagtttcttcaagaaaacagctgatgaaggtacaaatacaagtaatagtgtatctacaagccccgccatggagcagtctcagtcttcgggcaccacctccagtacatcgtcaagctcaggtggctcatcggggacaagcaacagtgggagagcccggtcggatccgacgcaccagcatcggcacagtggtgggcacttcacagctgccgtgcaggccatggactgcgagacacacagtccccaggtgcgtcagcaatttcctgctcctcttggttggtcaggcactgaagctcctacacaggtcactgttgaaactcatcctgttcaagaaacaacctttcatgtagcccctcaacagaatgcattgcatcatcaccatggtaacagttcccatcaccatcaccaccaccaccaccatcaccaccaccatggacaacaagccttgggtaaccggaccaggccaagggtctacaattctccaacgaatagctcctctacccaagattctatggaggttggccacagtcaccactccatgacatccctgtcttcctcaacgacttcttcctcgacatcttcctcctctactggtaaccaaggcaatcaggcctaccagaatcgcccagtggctgctaataccttggactttggacagaatggagctatggacgttaatttgaccgtctactccaatccccgccaagagactggcatagctggacatccaacataccaattttctgctaatacaggtcctgcacattacatgactgaaggacatctgacaatgaggcaaggggctgatagagaagagtcccccatgacaggagtttgtgtgcaacagagtcctgtagctagctcgtgactacattgaaacttgagtttgtttcttgtgtgtttttatagaagtggtgttttttttccaaaaacaaagtgcaaagctgcttgaatcaggaggagattaacacactgaaccgctacaagagggcaaagctgattttttttttaacttgaaaagattgcaaagggacattgaagtgtttaaaagagccatgtccaaacccatcttcatggatagctcagaggtatcctctttttgctcccccattttaacttgccacatcccagtcacagtggggtttttttgtctttctattcagcaaaagttaatattcagatgttggtcttggtcatttgccaactaattttaaagtaaaaggcactgcacataatttgcataaagggccccatgagggtgtttttttttttctttttgtcccccccatccccctttttttttgttttgttctgttttgttttgggtgggagggtgggaaatttgggtttttaagtcctctaaacacacttgggcacggaaatgcagtactgtaaggaagagggacctccagcttccacaaacaccatcttcagctgtatgaaagggacggttgtggtgaagtttgtcaggcacagtaagcatgctgagtggcggggatcagaactctcctatctgaacctactgaggagcaaagcagcaattacatgggatcctgtggctctcccgttgcagaggccacaggaagataggatggaacgtgactggtctcctaaccaaggtgcactgagaagcaatcaacgggtcggtcgtggccagtcctggggaggtctgagtggtggtctttgggataacctttggccttatggatttggactcgaaattagaagagcctaccatttcagatgcaatcacttttggacatgcttttgcagacagtccttaatgctgaaaacacagagaatgggtaattcaagaggcctttcttttaaaatagacttttgtgacccactaattgtaaggtattgcaaggtcactttgcgtgtgtcataaagttgacttccttattggttgaaggtcacagaagtagtggtttgctttgatggaaatagctacagctgtgtcccttcctgctttttactttttcttttgctttttctcggcacgtggtatctccaccatttcttctgcacaaagatgtcttctgttcatcctgaacatttttaaaaaatgcagaattttatgtgactgcttttttgcctcacaattatgctgtgaattttacaaaaatttattttcttttttgataatttattgtaccaaagctgtttttatagcacatagatgtctgtaaccaataatgtagcagttctgcactttgacacaaggtgtaactagaccatttttaaatgtcagttgaaaattatggctgtactattgcttaaacaaaactggaactgttgttgaatccatagccaatacatttacagcaatctgtgtactgaacatagtagattgacatctaattcaagattacaacatctgttacattctaagtgtgttcaggcttctgaaggtaaagggacactggatccagaagctatggaaccagcagttgattcttgtattcctgattaacctacttgtaaacttgaaagcaagaccttgattgcaccaacaggtccagagtatgagtgcaagcaaagcagaactctcatgcgtgacctgagcagacaggctggtatttaacaggtgcctcgtgttgagattacgctgccttaatgtaacacagtctggcagttgctaaatttgtgttcccattttaaattgaccaattttggggtgtgacacttttgagcggcgttggatgcagtcagcggcgttggatgcagtcagcggcgttggatgcagtcagcggcgttggatgcagtcagcggcgttggatgcagtcagcggcgttggatcagtcagcggcgttggatgcagtagcgcgtgatcagtagcgcgtga

SEQ ID NO: 457798 - DNA, 2274 bp, Homo sapiens
cgcggcccaggtcggcctcagagagcggacaccccgagcggggggtgcgggcgccgccgccgccgcttctgctgctgctgttcctgctgctgctgttggtgccgctgccgccgccggcgagcaggcgggaccggtgtgagtgcgagtgtgtgtgcgagggagcgtgtgcgagggcgattgtgcgcgcgagtgtgcgggtgtgtgcgagtgtctgtctgtctgtgcggggactcgggggcgggcggttcgggctctcctggcggaggagccgccgccgccgcccgggccccggcgcttctcgctgcgcaggttcggagcgcgcgccattttgtgagatttacaaaatcctcctcgggaagaagccgccggcagcagccgccgctcggcgcccggcctcgccgacgccgccctctgcgccgggccggccgtgcggccccgccgcctggaatcggggcccggggactgcggtatttgccggggagggggctgtcgcctccccggccccgggcgccgctggaaccgcgagccgaggagagactgagcaggctgcggcgcggccaggagccggagcgccgggggcggagagaggctgccggggcggcgctggctgcggaggccgcggcgggagcgcggcgcgggagcccgaggctgagactcaccggaggaagcggcgcgagcgccccgccatcgtcccggaggagagacttcagcatgcaaaccttcatctgttcggcttgcaccgtcattttcattccatgctgctggccttcagatggctggacagatgccccattcacatcagtacagtgaccgtcgccagccaaacataagtgaccaacaggtttctgccttatcatattctgaccagattcagcaacctctaactaaccagaggcggatgccccaaaccttccgtgacccagcaactgctcccctgagaaaactttctgttgacttgatcaaaacatacaagcatattaatgaggtttactatgcaaaaaagaagcgaagacaccaacagggccagggagacgattctagtcataagaaggaacggaaggtttacaatgatggttatgatgatgataactatgattatattgtaaaaaacggagaaaagtggatggatcgttacgaaattgactccttgataggcaaaggttcctttggacaggttgtaaaggcatatgatcgtgtggagcaagaatgggttgccattaaaataataaagaacaagaaggcttttctgaatcaagcacagatagaagtgcgacttcttgagctcatgaacaaacatgacactgaaatgaaatactacatagtgcatttgaaacgccactttatgtttcgaaaccatctctgtttagtttttgaaatgctgtcctacaacctctatgacttgctgagaaacaccaatttccgaggggtctctttgaacctaacacgaaagtttgcgcaacagatgtgcactgcactgcttttccttgcgactccagaacttagtatcattcactgtgatctaaaacctgaaaatatccttctttgtaaccccaaacgcagtgcaatcaagatagttgactttggcagttcttgtcagttggggcagaggatataccagtatattcagagtcgcttttatcggtctccagaggtgctactgggaatgccttatgaccttgccattgatatgtggtccctcgggtgtattttggttgaaatgcacactggagaacctctgttcagtggtgccaatgaggtaaatgatgtattgctttacaaattctgttttcataatttgtttttgtctttcatctgtgacagtgtaatttaaaagttgtttttaggcaaagatgtctacttaatcattcaaatgtgaggtcagtttgaatatacctatttttcatatttgtcagttgtcatgtaagtttagaattatgagataggagtaggatattttaatctactcatgaaggagaacagttagaaagtgttaagtattttggcatacattttacaggttttaaatacaatacagaaagcttaaagatgataaagaatgaaggccatcctgaagagtgatacaaacatcactctaaattttgagattatgatttggagttgaagagtaatgatcagtaggactgatggatactcagtctgaataatgtagagtaaacgagattatagacttgtagggctacagagactgtgtgcagttctgaagtctacaggttttcagtctgtgttctggaagatttttcaaggtcagaggca

SEQ ID NO: 457799 - DNA, 1592 bp, Homo sapiens
tgatacatcgttgctcattttgcagaacataacagttgcacattgcaagagtcaacttgcttcgggtcttttcatgctcatggcggtattgagcggagtccgctggctgacccgagcgctggtctccgccgggaaccctggggcatggagaggtctgagtacctcggccgcggcgcacgctgcatcgcggagccaggccgaggacgtgagggtggagggctcctttcccgtgaccatgcttccgggagacggtgtggggcctgagctgatgcacgccgtcaaggaggtgttcaaggctgccgctgtcccagtggagttccaggagcaccacctgagtgaggtgcagaatatggcatctgaggagaagctggagcaggtgctgagttccatgaaggagaacaaagtggccatcattggaaagattcataccccgatggagtataagggggagctagcctcctatgatatgcggctgaggcgtaagttggacttatttgccaacgtagtccatgtgaagtcacttcctgggtatatgactcggcacaacaatctagacctggtgatcattcgagagcagacagaaggggagtacagctctctggaacatgagagtgcaaggggtgtgattgagtgtttgaagattgtcacacgagccaagtctcagcggattgcaaagttcgcctttgactatgccaccaagaaggggcggggcaaggtcactgctgtccacaaggccaacatcatgaaacttggggatgggttgttcctgcagtgctgtgaggaagttgctgaactgtaccccaaaatcaaatttgagacaatgatcatagacaactgctgcatgcagctggtgcagaatccttaccagtttgatgtgcttgtgatgcccaatctctatgggaacattattgacaatctggctgctggcctggttgggggagctggtgtggtccctggtgagagctatagtgcagaatacgcagtctttgagacgggtgcccggcacccatttgcccaggcagtgggcaggaatatagccaatcccacggccatgctgctgtcggcttccaacatgctgcggcatcttaatcttgagtatcactccagcatgatcgcagatgcggtgaagaaggtgatcaaagttggcaaggtgcggactcgagacatgggcggctacagcaccacaaccgacttcatcaagtctgtcatcggtcacctgcagactaaagggagctagagccctttatttcttccaaccttgcaaggaccacactccccatacccttcagtgcagtgtaccagggaagagaccttgtgcctctaagcagtggaccatggtcaccttgctgggtagagcctaggttgtccttgggccggcttccttaggggacagactgttgggtggtgatggggattgttaggatggagcccaggccacatggatgatgatgattctcccccacaggttcgaacctctgacatgggtggctatgctacttgccatgacttcactgaggctgtcattgctgccttgccccacccataggccctgtccatacccatgtaaggtgttcaataaagaacatgaacca

SEQ ID NO: 457800 - DNA, 1356 bp, Homo sapiens
tgatacatcgttgctcattttgcagaacataacagttgcacattgcaagagtcaacttgcttcgggtcttttcatgctcatggcggtattgagcggagtccgctggctgacccgagcgctggtctccgccgggaaccctggggcatggagaggtctgagtacctcggccgcggcgcacgctgcatcgcggagccaggccgaggacgtgagggtggagggctcctttcccgtgaccatgcttccgggagacggtgtggggcctgagctgatgcacgccgtcaaggaggtgttcaaggctgccgctgtcccagtggagttccaggagcaccacctgagtgaggtgcagaatatggcatctgaggagaagctggagcaggtgctgagttccatgaaggagaacaaagtggccatcattggaaagattcataccccgatggagtataagggggagctagcctcctatgatatgcggctgaggcgtaagttggacttatttgccaacgtagtccatgtgaagtcacttcctgggtatatgactcggcacaacaatctagacctggtgatcattcgagagcagacagaaggggagtacagctctctggaacatgagagtgcaaggggtgtgattgagtgtttgaagattgtcacacgagccaagtctcagcggattgcaaagttcgcctttgactatgccaccaagaaggggcggggcaaggtcactgctgtccacaaggccaacatcatgaaacttggggatgggttgttcctgcagtgctgtgaggaagttgctgaactgtaccccaaaatcaaatttgagacaatgatcatagacaactgctgcatgcagctggtgcagaatccttaccagtttgatgtgcttgtgatgcccaatctctatgggaacattattgacaatctggctgctggcctggttgggggagctggtgtggtccctggtgagagctatagtgcagaatacgcagtctttgagacgggtgcccggcacccatttgcccaggcagtgggcaggaatatagccaatcccacggccatgctgctgtcggcttccaacatgctgcggcatcttaatcttgagtatcactccagcatgatcgcagatgcggtgaagaaggtgatcaaagttggcaaggtgcggactcgagacatgggcggctacagcaccacaaccgacttcatcaagtctgtcatcggtcacctgcagactaaaggttcgaacctctgacatgggtggctatgctacttgccatgacttcactgaggctgtcattgctgccttgccccacccataggccctgtccatacccatgtaaggtgttcaataaagaacatgaacca

SEQ ID NO: 457801 - DNA, 649 bp, Homo sapiens
atctccacttcctaagtgatcttggcctgttcttcccccacgctgcccaccatgcctcttttcagtgaccctggcctgagctccccctcccataatgtccttttccaacctaagcctctgcatacccctcctgcctcctcccagtgtctagcctgcccctctctccacagggtgcccggcacccatttgcccaggcagtgggcaggaatatagccaatcccacggccatgctgctgtcggcttccaacatgctgcggcatcttaatcttgagtatcactccagcatgatcgcagatgcggtgaagaaggtgatcaaagttggcaaggtgcggactcgagacatgggcggctacagcaccacaaccgacttcatcaagtctgtcatcggtcacctgcagactaaagggagctagagccctttatttcttccaaccttgcaaggaccacactccccatacccttcagtgcagtgtaccagggaagagaccttgtgcctctaagcagtggaccatggtcaccttggttcgaacctctgacatgggtggctatgctacttgccatgacttcactgaggctgtcattgctgccttgccccacccataggccctgtccatacccatgtaaggtgttcaataaagaacatgaacca

SEQ ID NO: 457802 - DNA, 1532 bp, Homo sapiens
gcgacttcctgcgggaaacatggcggcattgagcggagtccgctggctgacccgagcgctggtctccgccgggaaccctggggcatggagaggtctgagtacctcggccgcggcgcacgctgcatcgcggagccaggccgaggacgtgagggtggagggctcctttcccgtgaccatgcttccgggagacggtgtggggcctgagctgatgcacgccgtcaaggaggtgttcaaggctgccgctgtcccagtggagttccaggagcaccacctgagtgaggtgcagaatatggcatctgaggagaagctggagcaggtgctgagttccatgaaggagaacaaagtggccatcattggaaagattcataccccgatggagtataagggggagctagcctcctatgatatgcggctgaggcgtaagttggacttatttgccaacgtagtccatgtgaagtcacttcctgggtatatgactcggcacaacaatctagacctggtgatcattcgagagcagacagaaggggagtacagctctctggaacatgagagtgcaaggggtgtgattgagtgtttgaagattgtcacacgagccaagtctcagcggattgcaaagttcgcctttgactatgccaccaagaaggggcggggcaaggtcactgctgtccacaaggccaacatcatgaaacttggggatgggttgttcctgcagtgctgtgaggaagttgctgaactgtaccccaaaatcaaatttgagacaatgatcatagacaactgctgcatgcagctggtgcagaatccttaccagtttgatgtgcttgtgatgcccaatctctatgggaacattattgacaatctggctgctggcctggttgggggagctggtgtggtccctggtgagagctatagtgcagaatacgcagtctttgagacgggtgcccggcacccatttgcccaggcagtgggcaggaatatagccaatcccacggccatgctgctgtcggcttccaacatgctgcggcatcttaatcttgagtatcactccagcatgatcgcagatgcggtgaagaaggtgatcaaagttggcaaggtgcggactcgagacatgggcggctacagcaccacaaccgacttcatcaagtctgtcatcggtcacctgcagactaaagggagctagagccctttatttcttccaaccttgcaaggaccacactccccatacccttcagtgcagtgtaccagggaagagaccttgtgcctctaagcagtggaccatggtcaccttgctgggtagagcctaggttgtccttgggccggcttccttaggggacagactgttgggtggtgatggggattgttaggatggagcccaggccacatggatgatgatgattctcccccacaggttcgaacctctgacatgggtggctatgctacttgccatgacttcactgaggctgtcattgctgccttgccccacccataggccctgtccatacccatgtaaggtgttcaataaagaacatgaacca

SEQ ID NO: 457803 - DNA, 1296 bp, Homo sapiens
gcgacttcctgcgggaaacatggcggcattgagcggagtccgctggctgacccgagcgctggtctccgccgggaaccctggggcatggagaggtctgagtacctcggccgcggcgcacgctgcatcgcggagccaggccgaggacgtgagggtggagggctcctttcccgtgaccatgcttccgggagacggtgtggggcctgagctgatgcacgccgtcaaggaggtgttcaaggctgccgctgtcccagtggagttccaggagcaccacctgagtgaggtgcagaatatggcatctgaggagaagctggagcaggtgctgagttccatgaaggagaacaaagtggccatcattggaaagattcataccccgatggagtataagggggagctagcctcctatgatatgcggctgaggcgtaagttggacttatttgccaacgtagtccatgtgaagtcacttcctgggtatatgactcggcacaacaatctagacctggtgatcattcgagagcagacagaaggggagtacagctctctggaacatgagagtgcaaggggtgtgattgagtgtttgaagattgtcacacgagccaagtctcagcggattgcaaagttcgcctttgactatgccaccaagaaggggcggggcaaggtcactgctgtccacaaggccaacatcatgaaacttggggatgggttgttcctgcagtgctgtgaggaagttgctgaactgtaccccaaaatcaaatttgagacaatgatcatagacaactgctgcatgcagctggtgcagaatccttaccagtttgatgtgcttgtgatgcccaatctctatgggaacattattgacaatctggctgctggcctggttgggggagctggtgtggtccctggtgagagctatagtgcagaatacgcagtctttgagacgggtgcccggcacccatttgcccaggcagtgggcaggaatatagccaatcccacggccatgctgctgtcggcttccaacatgctgcggcatcttaatcttgagtatcactccagcatgatcgcagatgcggtgaagaaggtgatcaaagttggcaaggtgcggactcgagacatgggcggctacagcaccacaaccgacttcatcaagtctgtcatcggtcacctgcagactaaaggttcgaacctctgacatgggtggctatgctacttgccatgacttcactgaggctgtcattgctgccttgccccacccataggccctgtccatacccatgtaaggtgttcaataaagaacatgaacca

SEQ ID NO: 457804 - DNA, 2219 bp, Homo sapiens
gcgacttcctgcgggaaacatggcggcattgagcggagtccgctggctgacccgagcgctggtctccgccgggaaccctggggcatggagaggtctgagtacctcggccgcggcgcacgctgcatcgcggagccaggccgaggacgtgagggtggagggctcctttcccgtgaccatgcttccgggagacggtgtggggcctgagctgatgcacgccgtcaaggaggtgttcaaggctgccgctgtcccagtggagttccaggagcaccacctgagtgaggtgcagaatatggcatctgaggagaagctggagcaggtgctgagttccatgaaggagaacaaagtggccatcattggaaagattcataccccgatggagtataagggggagctagcctcctatgatatgcggctgaggcgtaagttggacttatttgccaacgtagtccatgtgaagtcacttcctgggtatatgactcggcacaacaatctagacctggtgatcattcgagagcagacagaaggggagtacagctctctggaacatgagagtgcaaggggtgtgattgagtgtttgaagattgtcacacgagccaagtctcagcggattgcaaagttcgcctttgactatgccaccaagaaggggcggggcaaggtcactgctgtccacaaggccaacatcatgaaacttggggatgggttgttcctgcagtgctgtgaggaagttgctgaactgtaccccaaaatcaaatttgagacaatgatcatagacaactgctgcatgcagctggtgcagaatccttaccagtttgatgtgcttgtgatgcccaatctctatgggaacattattgacaatctggctgctggcctggttgggggagctggtgtggtccctggtgagagctatagtgcagaatacgcagtctttgagacgggtgcccggcacccatttgcccaggcagtgggcaggaatatagccaatcccacggccatgctgctgtcggcttccaacatgctgcggcatcttaatcttgagtatcactccagcatgatcgcagatgcggtgaagaaggtgatcaaagttggcaaggtgagttgagaagagtagtgctggcttcaggatttagagtagttctggtgtcagcacctcggcactaccctctggggaacctgaatgggggtctcctttccccccaggtccccagaacatctgctccctgacatccctgcatccctctcagggctgttcttcatctcccttctcttggctgtttcatcctcttgatctcttttgcctcttagatcccatctgctgttccctctttcctgctccatccactgcccttttcatgggccatctgaatgcagaacttgcagctctccttgggggtggaacagcaagggatacaggcaggctgaagcatcagcttcaccttcacgccccatctccttttcgctgtgattctttccttccacctggtcttgtctctatttcttccaaggaaggtagccacatcctgcctctgatctgcgtttcccatcatctttgcctgctcagcctcctgtcctgccctggctgcagcacagctaatagtggcttaagaggagtggcaggtccatgtgcttcccatcctggctcctccttccattcctgtgcattgccttttttctggctgtcacgcattcttggcttccatttcctcaatcacattgccctacctcccttcatgggctctcttttctccctccccacggctgttgccggtggtggctgtaggtgcggactcgagacatgggcggctacagcaccacaaccgacttcatcaagtctgtcatcggtcacctgcagactaaagggagctagagccctttatttcttccaaccttgcaaggaccacactccccatacccttcagtgcagtgtaccagggaagagaccttgtgcctctaagcagtggaccatggtcaccttgctgggtagagcctaggttgtccttgggccggcttccttaggggacagactgttgggtggtgatggggattgttaggatggagcccaggccacatggatgatgatgattctcccccacaggttcgaacctctgacatgggtggctatgctacttgccatgacttcactgaggctgtcattgctgccttgccccacccataggccctgtccatacccatgtaaggtgttcaataaagaacatgaacca

SEQ ID NO: 457805 - DNA, 1373 bp, Homo sapiens
gcgacttcctgcgggaaacatggcggcattgagcggagtccgctggctgacccgagcgctggtctccgccgggaaccctggggcatggagaggtctgagtacctcggccgcggcgcacgctgcatcgcggagccaggccgaggacgtgagggtggagggctcctttcccgtgaccatgcttccgggagacggtgtggggcctgagctgatgcacgccgtcaaggaggtgttcaaggctgccgctgtcccagtggagttccaggagcaccacctgagtgaggtgcagaatatggcatctgaggagaagctggagcaggtgctgagttccatgaaggagaacaaagtggccatcattggaaagattcataccccgatggagtataagggggagctagcctcctatgatatgcggctgaggcgtaagttggacttatttgccaacgtagtccatgtgaagtcacttcctgggtatatgactcggcacaacaatctagacctggtgatcattcgagagcagacagaaggggagtacagctctctggaacatgagagtgcaaggggtgtgattgagtgtttgaagattgtcacacgagccaagtctcagcggattgcaaagttcgcctttgactatgccaccaagaaggggcggggcaaggtcactgctgtccacaaggccaacatcatgaaacttggggatgggttgttcctgcagtgctgtgaggaagttgctgaactgtaccccaaaatcaaatttgagacaatgatcatagacaactgctgcatgcagctggtgcagaatccttaccagtttgatgtgcttgtgatgcccaatctctatgggaacattattgacaatctggctgctggcctggttgggggagctggtgtggtccctggtgagagctatagtgcagaatacgcagtctttgagacgggtgcccggcacccatttgcccaggcagtgggcaggaatatagccaatcccacggccatgctgctgtcggcttccaacatgctgcggcatcttaatcttgagtatcactccagcatgatcgcagatgcggtgaagaaggtgatcaaagttggcaaggtgcggactcgagacatgggcggctacagcaccacaaccgacttcatcaagtctgtcatcggtcacctgcagactaaagggagctagagccctttatttcttccaaccttgcaaggaccacactccccatacccttcagtgcagtgtaccagggaagttcgaacctctgacatgggtggctatgctacttgccatgacttcactgaggctgtcattgctgccttgccccacccataggccctgtccatacccatgtaaggtgttcaataaagaacatgaacca

SEQ ID NO: 457806 - DNA, 1217 bp, Homo sapiens
gcgacttcctgcgggaaacatggcggcattgagcggagtccgctggctgacccgagcgctggtctccgccgggaaccctggggcatggagaggtctgagtacctcggccgcggcgcacgctgcatcgcggagccaggccgaggacgtgagggtggagggctcctttcccgtgaccatgcttccgggagacggtgtggggcctgagctgatgcacgccgtcaaggaggtgttcaaggctgccgctgtcccagtggagttccaggagcaccacctgagtgaggtgcagaatatggcatctgaggagaagctggagcaggtgctgagttccatgaaggagaacaaagtggccatcattggaaagattcataccccgatggagtataagggggagctagcctcctatgatatgcggctgaggcgtaagttggacttatttgccaacgtagtccatgtgaagtcacttcctgggtatatgactcggcacaacaatctagacctggtgatcattcgagagcagacagaaggggagtacagctctctggaacatgagagtgcaaggggtgtgattgagtgtttgaagattgtcacacgagccaagtctcagcggattgcaaagttcgcctttgactatgccaccaagaaggggcggggcaaggtcactgctgtccacaaggccaacatcatgaaacttggggatgggttgttcctgcagtgctgtgaggaagttgctgaactgtaccccaaaatcaaatttgagacaatgatcatagacaactgctgcatgcagctggtgcagaatccttaccagtttgatgtgcttgtgatgcccaatctctatgggaacattattgacaatctggctgctggcctggttgggggagctggtgtggtccctggtgagagctatagtgcagaatacgcagtctttgagacgggtgcccggcacccatttgcccaggcagtgggcaggaatatagccaatcccacggccatgctgctgtcggcttccaacatgctgcggcatcttaatcttgagtatcactccagcatgatcgcagatgcggtgaagaaggtgatcaaagttggcaaggttcgaacctctgacatgggtggctatgctacttgccatgacttcactgaggctgtcattgctgccttgccccacccataggccctgtccatacccatgtaaggtgttcaataaagaacatgaacca

SEQ ID NO: 457807 - DNA, 1618 bp, Homo sapiens
gcgacttcctgcgggaaacatggcggcattgagcggagtccgctggctgacccgagcgctggtctccgccgggaaccctggggcatggagaggtctgagtacctcggccgcggcgcacgctgcatcgcggagccaggccgaggacgtgagggtggagggctcctttcccgtgaccatgcttccgggagacggtgtggggcctgagctgatgcacgccgtcaaggaggtgttcaaggctgccgctgtcccagtggagttccaggagcaccacctgagtgaggtgcagaatatggcatctgaggagaagctggagcaggtgctgagttccatgaaggagaacaaagtggccatcattggaaagattcataccccgatggagtataagggggagctagcctcctatgatatgcggctgaggcgtaagttggacttatttgccaacgtagtccatgtgaagtcacttcctgggtatatgactcggcacaacaatctagacctggtgatcattcgagagcagacagaaggggagtacagctctctggaacatgagagtgcaaggggtgtgattgagtgtttgaagattgtcacacgagccaagtctcagcggattgcaaagttcgcctttgactatgccaccaagaaggggcggggcaaggtcactgctgtccacaaggccaacatcatgaaacttggggatgggttgttcctgcagtgctgtgaggaagttgctgaactgtaccccaaaatcaaatttgagacaatgatcatagacaactgctgcatgcaggtgaggcctccccacatctctactcatggggcggaggaggagggtggggagtggaatttacttcatgcctgcatctcaccctctagctggtgcagaatccttaccagtttgatgtgcttgtgatgcccaatctctatgggaacattattgacaatctggctgctggcctggttgggggagctggtgtggtccctggtgagagctatagtgcagaatacgcagtctttgagacgggtgcccggcacccatttgcccaggcagtgggcaggaatatagccaatcccacggccatgctgctgtcggcttccaacatgctgcggcatcttaatcttgagtatcactccagcatgatcgcagatgcggtgaagaaggtgatcaaagttggcaaggtgcggactcgagacatgggcggctacagcaccacaaccgacttcatcaagtctgtcatcggtcacctgcagactaaagggagctagagccctttatttcttccaaccttgcaaggaccacactccccatacccttcagtgcagtgtaccagggaagagaccttgtgcctctaagcagtggaccatggtcaccttgctgggtagagcctaggttgtccttgggccggcttccttaggggacagactgttgggtggtgatggggattgttaggatggagcccaggccacatggatgatgatgattctcccccacaggttcgaacctctgacatgggtggctatgctacttgccatgacttcactgaggctgtcattgctgccttgccccacccataggccctgtccatacccatgtaaggtgttcaataaagaacatgaacca

SEQ ID NO: 457808 - DNA, 1545 bp, Homo sapiens
  misc_feature (13)..(14): n is a, c, g, or t
  misc_feature (18)..(18): n is a, c, g, or t
  misc_feature (20)..(22): n is a, c, g, or t
  misc_feature (25)..(25): n is a, c, g, or t
  misc_feature (27)..(27): n is a, c, g, or t
ccaacccaaatanncatngnnncgncnggtgtgaatcggacgagggcggagtccgctggctgacccgagcgctggtctccgccgggaaccctggggcatggagaggtctgagtacctcggccgcggcgcacgctgcatcgcggagccaggccgaggacgtgagggtggagggctcctttcccgtgaccatgcttccgggagacggtgtggggcctgagctgatgcacgccgtcaaggaggtgttcaaggctgccgctgtcccagtggagttccaggagcaccacctgagtgaggtgcagaatatggcatctgaggagaagctggagcaggtgctgagttccatgaaggagaacaaagtggccatcattggaaagattcataccccgatggagtataagggggagctagcctcctatgatatgcggctgaggcgtaagttggacttatttgccaacgtagtccatgtgaagtcacttcctgggtatatgactcggcacaacaatctagacctggtgatcattcgagagcagacagaaggggagtacagctctctggaacatgagagtgcaaggggtgtgattgagtgtttgaagattgtcacacgagccaagtctcagcggattgcaaagttcgcctttgactatgccaccaagaaggggcggggcaaggtcactgctgtccacaaggccaacatcatgaaacttggggatgggttgttcctgcagtgctgtgaggaagttgctgaactgtaccccaaaatcaaatttgagacaatgatcatagacaactgctgcatgcagctggtgcagaatccttaccagtttgatgtgcttgtgatgcccaatctctatgggaacattattgacaatctggctgctggcctggttgggggagctggtgtggtccctggtgagagctatagtgcagaatacgcagtctttgagacgggtgcccggcacccatttgcccaggcagtgggcaggaatatagccaatcccacggccatgctgctgtcggcttccaacatgctgcggcatcttaatcttgagtatcactccagcatgatcgcagatgcggtgaagaaggtgatcaaagttggcaaggtgcggactcgagacatgggcggctacagcaccacaaccgacttcatcaagtctgtcatcggtcacctgcagactaaagggagctagagccctttatttcttccaaccttgcaaggaccacactccccatacccttcagtgcagtgtaccagggaagagaccttgtgcctctaagcagtggaccatggtcaccttgctgggtagagcctaggttgtccttgggccggcttccttaggggacagactgttgggtggtgatggggattgttaggatggagcccaggccacatggatgatgatgattctcccccacaggttcgaacctctgacatgggtggctatgctacttgccatgacttcactgaggctgtcattgctgccttgccccacccataggccctgtccatacccatgtaaggtgttcaataaagaacatgaacca

SEQ ID NO: 457809 - DNA, 1623 bp, Homo sapiens
gcgacttcctgcgggaaacatggcggcattgagcggagtccgctggctgacccgagcgctggtctccgccgggaaccctggggcatggagaggtctgagtacctcggccgcggcgcacgctgcatcgcggagccaggccgaggacgtgagggtggagggctcctttcccgtgaccatgcttccgggagacggtgtggggcctgagctgatgcacgccgtcaaggaggtgttcaaggctgccgctgtcccagtggagttccaggagcaccacctgagtgaggtgcagaatatggcatctgaggagaagctggagcaggtgctgagttccatgaaggagaacaaagtggccatcattggaaagattcataccccgatggagtataagggggagctagcctcctatgatatgcggctgaggcgtaagttggacttatttgccaacgtagtccatgtgaagtcacttcctgggtatatgactcggcacaacaatctagacctggtgatcattcgagagcagacagaaggggagtacagctctctggaacatgagagtgcaaggggtgtgattgagtgtttgaagattgtcacacgagccaagtctcagcggattgcaaagttcgcctttgactatgccaccaagaaggggcggggcaaggtcactgctgtccacaaggccaacatcatgtgaggggcatggctttgtgtaggatgggttcctgggaaggtagcccctgtactttcttggctgattctgtcccctttggcccatggacaggaaacttggggatgggttgttcctgcagtgctgtgaggaagttgctgaactgtaccccaaaatcaaatttgagacaatgatcatagacaactgctgcatgcagctggtgcagaatccttaccagtttgatgtgcttgtgatgcccaatctctatgggaacattattgacaatctggctgctggcctggttgggggagctggtgtggtccctggtgagagctatagtgcagaatacgcagtctttgagacgggtgcccggcacccatttgcccaggcagtgggcaggaatatagccaatcccacggccatgctgctgtcggcttccaacatgctgcggcatcttaatcttgagtatcactccagcatgatcgcagatgcggtgaagaaggtgatcaaagttggcaaggtgcggactcgagacatgggcggctacagcaccacaaccgacttcatcaagtctgtcatcggtcacctgcagactaaagggagctagagccctttatttcttccaaccttgcaaggaccacactccccatacccttcagtgcagtgtaccagggaagagaccttgtgcctctaagcagtggaccatggtcaccttgctgggtagagcctaggttgtccttgggccggcttccttaggggacagactgttgggtggtgatggggattgttaggatggagcccaggccacatggatgatgatgattctcccccacaggttcgaacctctgacatgggtggctatgctacttgccatgacttcactgaggctgtcattgctgccttgccccacccataggccctgtccatacccatgtaaggtgttcaataaagaacatgaacca

SEQ ID NO: 457810 - DNA, 1729 bp, Homo sapiens
gcgacttcctgcgggaaacatggcggcattgagcggagtccgctggctgacccgagcgctggtctccgccgggaaccctggggcatggagaggtctgagtacctcggccgcggcgcacgctgcatcgcggagccaggccgaggacgtgagggtggagggctcctttcccgtgaccatgcttccgggagacggtgtggggcctgagctgatgcacgccgtcaaggaggtgttcaaggctgccgctgtcccagtggagttccaggagcaccacctgagtgaggtgcagaatatggcatctgaggagaagctggagcaggtgctgagttccatgaaggagaacaaagtggccatcattggaaagattcataccccgatggagtataagggggagctagcctcctatgatatgcggctgaggcgtaagttggacttatttgccaacgtagtccatgtgaagtcacttcctgggtatatgactcggcacaacaatctagacctggtgatcattcgagagcagacagaaggggagtacagctctctggaacatgaggtgaggccccagaaactgggggagggcaaggatgaagatgggagagaggtggagctccttgtttcccttcccagtgtcacctagctgctgctttcttcttacccagagtgcaaggggtgtgattgagtgtttgaagattgtcacacgagccaagtctcagcggattgcaaagttcgcctttgactatgccaccaagaaggggcggggcaaggtcactgctgtccacaaggccaacatcatgtgaggggcatggctttgtgtaggatgggttcctgggaaggtagcccctgtactttcttggctgattctgtcccctttggcccatggacaggaaacttggggatgggttgttcctgcagtgctgtgaggaagttgctgaactgtaccccaaaatcaaatttgagacaatgatcatagacaactgctgcatgcagctggtgcagaatccttaccagtttgatgtgcttgtgatgcccaatctctatgggaacattattgacaatctggctgctggcctggttgggggagctggtgtggtccctggtgagagctatagtgcagaatacgcagtctttgagacgggtgcccggcacccatttgcccaggcagtgggcaggaatatagccaatcccacggccatgctgctgtcggcttccaacatgctgcggcatcttaatcttgagtatcactccagcatgatcgcagatgcggtgaagaaggtgatcaaagttggcaaggtgcggactcgagacatgggcggctacagcaccacaaccgacttcatcaagtctgtcatcggtcacctgcagactaaagggagctagagccctttatttcttccaaccttgcaaggaccacactccccatacccttcagtgcagtgtaccagggaagagaccttgtgcctctaagcagtggaccatggtcaccttgctgggtagagcctaggttgtccttgggccggcttccttaggggacagactgttgggtggtgatggggattgttaggatggagcccaggccacatggatgatgatgattctcccccacaggttcgaacctctgacatgggtggctatgctacttgccatgacttcactgaggctgtcattgctgccttgccccacccataggccctgtccatacccatgtaaggtgttcaataaagaacatgaacca

SEQ ID NO: 457811 - DNA, 1611 bp, Homo sapiens
gcgacttcctgcgggaaacatggcggcattgagcggagtccgctggctgacccgagcgctggtctccgccgggaaccctggggcatggagaggtctgagtacctcggccgcggcgcacgctgcatcgcggagccaggccgaggacgtgagggtggagggctcctttcccgtgaccatgcttccgggagacggtgtggggcctgagctgatgcacgccgtcaaggaggtgttcaaggctgccgctgtcccagtggagttccaggagcaccacctgagtgaggtgcagaatatggcatctgaggagaagctggagcaggtgctgagttccatgaaggagaacaaagtggccatcattggaaagattcataccccgatggagtataagggggagctagcctcctatgatatgcggctgaggtaggtggtctgggtggggtgaatggttgagaggtgccagggcaccaggagcagagctgatggccctgcccaccctcaggcgtaagttggacttatttgccaacgtagtccatgtgaagtcacttcctgggtatatgactcggcacaacaatctagacctggtgatcattcgagagcagacagaaggggagtacagctctctggaacatgagagtgcaaggggtgtgattgagtgtttgaagattgtcacacgagccaagtctcagcggattgcaaagttcgcctttgactatgccaccaagaaggggcggggcaaggtcactgctgtccacaaggccaacatcatgaaacttggggatgggttgttcctgcagtgctgtgaggaagttgctgaactgtaccccaaaatcaaatttgagacaatgatcatagacaactgctgcatgcagctggtgcagaatccttaccagtttgatgtgcttgtgatgcccaatctctatgggaacattattgacaatctggctgctggcctggttgggggagctggtgtggtccctggtgagagctatagtgcagaatacgcagtctttgagacgggtgcccggcacccatttgcccaggcagtgggcaggaatatagccaatcccacggccatgctgctgtcggcttccaacatgctgcggcatcttaatcttgagtatcactccagcatgatcgcagatgcggtgaagaaggtgatcaaagttggcaaggtgcggactcgagacatgggcggctacagcaccacaaccgacttcatcaagtctgtcatcggtcacctgcagactaaagggagctagagccctttatttcttccaaccttgcaaggaccacactccccatacccttcagtgcagtgtaccagggaagagaccttgtgcctctaagcagtggaccatggtcaccttgctgggtagagcctaggttgtccttgggccggcttccttaggggacagactgttgggtggtgatggggattgttaggatggagcccaggccacatggatgatgatgattctcccccacaggttcgaacctctgacatgggtggctatgctacttgccatgacttcactgaggctgtcattgctgccttgccccacccataggccctgtccatacccatgtaaggtgttcaataaagaacatgaacca

SEQ ID NO: 457812 - DNA, 1717 bp, Homo sapiens
gcgacttcctgcgggaaacatggcggcattgagcggagtccgctggctgacccgagcgctggtctccgccgggaaccctggggcatggagaggtctgagtacctcggccgcggcgcacgctgcatcgcggagccaggccgaggacgtgagggtggagggctcctttcccgtgaccatgcttccgggagacggtgtggggcctgagctgatgcacgccgtcaaggaggtgttcaaggctgccgctgtcccagtggagttccaggagcaccacctgagtgaggtgcagaatatggcatctgaggagaagctggagcaggtgctgagttccatgaaggagaacaaagtggccatcattggaaagattcataccccgatggagtataagggggagctagcctcctatgatatgcggctgaggtaggtggtctgggtggggtgaatggttgagaggtgccagggcaccaggagcagagctgatggccctgcccaccctcaggcgtaagttggacttatttgccaacgtagtccatgtgaagtcacttcctgggtatatgactcggcacaacaatctagacctggtgatcattcgagagcagacagaaggggagtacagctctctggaacatgaggtgaggccccagaaactgggggagggcaaggatgaagatgggagagaggtggagctccttgtttcccttcccagtgtcacctagctgctgctttcttcttacccagagtgcaaggggtgtgattgagtgtttgaagattgtcacacgagccaagtctcagcggattgcaaagttcgcctttgactatgccaccaagaaggggcggggcaaggtcactgctgtccacaaggccaacatcatgaaacttggggatgggttgttcctgcagtgctgtgaggaagttgctgaactgtaccccaaaatcaaatttgagacaatgatcatagacaactgctgcatgcagctggtgcagaatccttaccagtttgatgtgcttgtgatgcccaatctctatgggaacattattgacaatctggctgctggcctggttgggggagctggtgtggtccctggtgagagctatagtgcagaatacgcagtctttgagacgggtgcccggcacccatttgcccaggcagtgggcaggaatatagccaatcccacggccatgctgctgtcggcttccaacatgctgcggcatcttaatcttgagtatcactccagcatgatcgcagatgcggtgaagaaggtgatcaaagttggcaaggtgcggactcgagacatgggcggctacagcaccacaaccgacttcatcaagtctgtcatcggtcacctgcagactaaagggagctagagccctttatttcttccaaccttgcaaggaccacactccccatacccttcagtgcagtgtaccagggaagagaccttgtgcctctaagcagtggaccatggtcaccttgctgggtagagcctaggttgtccttgggccggcttccttaggggacagactgttgggtggtgatggggattgttaggatggagcccaggccacatggatgatgatgattctcccccacaggttcgaacctctgacatgggtggctatgctacttgccatgacttcactgaggctgtcattgctgccttgccccacccataggccctgtccatacccatgtaaggtgttcaataaagaacatgaacca

SEQ ID NO: 457813 - DNA, 768 bp, Homo sapiens
atctccacttcctaagtgatcttggcctgttcttcccccacgctgcccaccatgcctcttttcagtgaccctggcctgagctccccctcccataatgtccttttccaacctaagcctctgcatacccctcctgcctcctcccagtgtctagcctgcccctctctccacagggtgcccggcacccatttgcccaggcagtgggcaggaatatagccaatcccacggccatgctgctgtcggcttccaacatgctgcggcatcttaatcttgagtatcactccagcatgatcgcagatgcggtgaagaaggtgatcaaagttggcaaggtgcggactcgagacatgggcggctacagcaccacaaccgacttcatcaagtctgtcatcggtcacctgcagactaaagggagctagagccctttatttcttccaaccttgcaaggaccacactccccatacccttcagtgcagtgtaccagggaagagaccttgtgcctctaagcagtggaccatggtcaccttgctgggtagagcctaggttgtccttgggccggcttccttaggggacagactgttgggtggtgatggggattgttaggatggagcccaggccacatggatgatgatgattctcccccacaggttcgaacctctgacatgggtggctatgctacttgccatgacttcactgaggctgtcattgctgccttgccccacccataggccctgtccatacccatgtaaggtgttcaataaagaacatgaacca

SEQ ID NO: 457814 - DNA, 921 bp, Homo sapiens
gcgacttcctgcgggaaacatggcggcattgagcggagtccgctggctgacccgagcgctggtctccgccgggaaccctggggcatggagaggtctgagtacctcggccgcggcgcacgctgcatcgcggagccaggccgaggacgtgagggtggagggctcctttcccgtgaccatgcttccgggagacggtgtggggcctgagctgatgcacgccgtcaaggaggtgttcaaggctgccgctgtcccagtggagttccaggagcaccacctgagtgaggtgcagaatatggcatctgaggagaagctggagcaggtgctgagttccatgaaggagaacaaagtggccatcattggaaagattcataccccgatggagtataagggggagctagcctcctatgatatgcggctgaggcgtaagttggacttatttgccaacgtagtccatgtgaagtcacttcctgggtatatgactcggcacaacaatctagacctggtgatcattcgagagcagacagaaggggagtacagctctctggaacatgagagtgcaaggggtgtgattgagtgtttgaagattgtcacacgagccaagtctcagcggattgcaaagttcgcctttgactatgccagagaccttgtgcctctaagcagtggaccatggtcaccttgctgggtagagcctaggttgtccttgggccggcttccttaggggacagactgttgggtggtgatggggattgttaggatggagcccaggccacatggatgatgatgattctcccccacaggttcgaacctctgacatgggtggctatgctacttgccatgacttcactgaggctgtcattgctgccttgccccacccataggccctgtccatacccatgtaaggtgttcaataaagaacatgaacca

SEQ ID NO: 457815 - DNA, 744 bp, Homo sapiens
gcgacttcctgcgggaaacatggcggcattgagcggagtccgctggctgacccgagcgctggtctccgccgggaaccctggggcatggagaggtctgagtacctcggccgcggcgcacgctgcatcgcggagccaggccgaggacgtgagggtggagggctcctttcccgtgaccatgcttccgggagacggtgtggggcctgagctgatgcacgccgtcaaggaggtgttcaaggctgccgctgtcccagtggagttccaggagcaccacctgagtgaggtgcagaatatggcatctgaggagaagctggagcaggtgctgagttccatgaaggagaacaaagtggccatcattggaaagattcataccccgatggagtataagggggagctagcctcctatgatatgcggctgaggcgtaagttggacttatttgccaacgtagtccatgtgaagtcacttcctgggtatatgactcggcacaacaatctagacctggtgatcattcgagagcagacagaaggggagtacagctctctggaacatgagagtgcaaggggtgtgattgagtgtttgaagattgtcacacgagccaagtctcagcggattgcaaagttcgcctttgactatgccaccctgtccatacccatgtaaggtgttcaataaagaacatgaaccaaaaaaagaaaaaaacagagaacaaaaaagaaattaaaaggaaaaaaaggaagaaaacaaaaaag

SEQ ID NO: 457816 - DNA, 1455 bp, Homo sapiens
atctccacttcctaagtgatcttggcctgttcttcccccacgctgcccaccatgcctcttttcagtgaccctggcctgagctccccctcccataatgtccttttccaacctaagcctctgcatacccctcctgcctcctcccagtgtctagcctgcccctctctccacagggtgcccggcacccatttgcccaggcagtgggcaggaatatagccaatcccacggccatgctgctgtcggcttccaacatgctgcggcatcttaatcttgagtatcactccagcatgatcgcagatgcggtgaagaaggtgatcaaagttggcaaggtgagttgagaagagtagtgctggcttcaggatttagagtagttctggtgtcagcacctcggcactaccctctggggaacctgaatgggggtctcctttccccccaggtccccagaacatctgctccctgacatccctgcatccctctcagggctgttcttcatctcccttctcttggctgtttcatcctcttgatctcttttgcctcttagatcccatctgctgttccctctttcctgctccatccactgcccttttcatgggccatctgaatgcagaacttgcagctctccttgggggtggaacagcaagggatacaggcaggctgaagcatcagcttcaccttcacgccccatctccttttcgctgtgattctttccttccacctggtcttgtctctatttcttccaaggaaggtagccacatcctgcctctgatctgcgtttcccatcatctttgcctgctcagcctcctgtcctgccctggctgcagcacagctaatagtggcttaagaggagtggcaggtccatgtgcttcccatcctggctcctccttccattcctgtgcattgccttttttctggctgtcacgcattcttggcttccatttcctcaatcacattgccctacctcccttcatgggctctcttttctccctccccacggctgttgccggtggtggctgtaggtgcggactcgagacatgggcggctacagcaccacaaccgacttcatcaagtctgtcatcggtcacctgcagactaaagggagctagagccctttatttcttccaaccttgcaaggaccacactccccatacccttcagtgcagtgtaccagggaagagaccttgtgcctctaagcagtggaccatggtcaccttgctgggtagagcctaggttgtccttgggccggcttccttaggggacagactgttgggtggtgatggggattgttaggatggagcccaggccacatggatgatgatgattctcccccacaggttcgaacctctgacatgggtggctatgctacttgccatgacttcactgaggctgtcattgctgccttgccccacccataggccctgtccatacccatgtaaggtgttcaataaagaacatgaacca

SEQ ID NO: 457817 - DNA, 869 bp, Homo sapiens
ccctgggggggacaaaggatacgcagtaacatacttaccttacgccaatcccttttgcctggattcttccgtccaccggtcttgtctcaatttcctccaaggaaggtagccacatcctgcctctgatctgcatttcccatcatctttgcctgctcggtagccacatcctgcctctgatctgcgtttcccatcatctttgcctgctcagcctcctgtcctgccctggctgcagcacagctaatagtggcttaagaggagtggcaggtccatgtgcttcccatcctggctcctccttccattcctgtgcattgccttttttctggctgtcacgcattcttggcttccatttcctcaatcacattgccctacctcccttcatgggctctcttttctccctccccacggctgttgccggtggtggctgtaggtgcggactcgagacatgggcggctacagcaccacaaccgacttcatcaagtctgtcatcggtcacctgcagactaaagggagctagagccctttatttcttccaaccttgcaaggaccacactccccatacccttcagtgcagtgtaccagggaagagaccttgtgcctctaagcagtggaccatggtcaccttgctgggtagagcctaggttgtccttgggccggcttccttaggggacagactgttgggtggtgatggggattgttaggatggagcccaggccacatggatgatgatgattctcccccacaggttcgaacctctgacatgggtggctatgctacttgccatgacttcactgaggctgtcattgctgccttgccccacccataggccctgtccatacccatgtaaggtgttcaataaagaacatgaacca

SEQ ID NO: 457818 - DNA, 710 bp, Homo sapiens
gcgacttcctgcgggaaacatggcggcattgagcggagtccgctggctgacccgagcgctggtctccgccgggaaccctggggcatggagaggtctgagtacctcggccgcggcgcacgctgcatcgcggagccaggccgaggacgtgagggtggagggctcctttcccgtgaccatgcttccgggagacggtgtggggcctgagctgatgcacgccgtcaaggaggtgttcaaggctgccgctgtcccagtggagttccaggagcaccacctgagtgaggtgcagaatatggcatctgaggagaagctggagcaggtgctgagttccatgaaggagaacaaagtggccatcattggaaagattcataccccgatggagtataagggggagctagcctcctatgatatgcggctgaggcgtaagttggacttatttgccaacgtagtccatgtgaagtcacttcctgggtagagcctaggttgtccttgggccggcttccttaggggacagactgttgggtggtgatggggattgttaggatggagcccaggccacatggatgatgatgattctcccccacaggttcgaacctctgacatgggtggctatgctacttgccatgacttcactgaggctgtcattgctgccttgccccacccataggccctgtccatacccatgtaaggtgttcaataaagaacatgaacca

SEQ ID NO: 457819 - DNA, 654 bp, Homo sapiens
gcgacttcctgcgggaaacatggcggcattgagcggagtccgctggctgacccgagcgctggtctccgccgggaaccctggggcatggagaggtctgagtacctcggccgcggcgcacgctgcatcgcggagccaggccgaggacgtgagggtggagggctcctttcccgtgaccatgcttccgggagacggtgtggggcctgagctgatgcacgccgtcaaggaggtgttcaaggctgccgctgtcccagtggagttccaggagcaccacctgagtgaggtgcagaatatggcatctgaggagaagctggagcaggtgctgagttccatgaaggagaacaaagtggccatcattggaaagattcataccccgatggagtataagggggagctagcctcctatgatatgcggctgaggcgtaagttggacttatttgccaacgtagtccatgtgaagtcacttcgcagcgtccatctccacattgatctcaccagccacctggcctcgcagggcgtacatcctggacctcttccacaagggtacgcacctgacgggtggtcaccagttctttcttgtactgagtcaggtgggcatcctctccctccagcaggcggaggtaggtggcaatctcctgctccagccgcgtcttcaca

SEQ ID NO: 457820 - DNA, 295 bp, Homo sapiens
cgagctcggtacccccccgactagcccgacaggtgcaataggtttctgttatattctctttcattgggccttcatataagtattggatccagtttggtgttccacattccccgactagcaccacaaccgacttcatcaagtctgtcatcggtcacctgcagactaaaggttcgaacctctgacatgggtggctatgctacttgccatgacttcactgaggctgtcattgctgccttgccccacccataggccctgtccatacccatgtaaggtgttcaataaagaacatgaacca

SEQ ID NO: 457821 - DNA, 1638 bp, Homo sapiens
gcgacttcctgcgggaaacatggcggcattgagcggagtccgctggctgacccgagcgctggtctccgccgggaaccctggggcatggagaggtctgagtacctcggccgcggcgcacgctgcatcgcggagccaggccgaggacgtgagggtggagggctcctttcccgtgaccatgcttccgggagacggtgtggggcctgagctgatgcacgccgtcaaggaggtgttcaaggctgccgctgtcccagtggagttccaggagcaccacctgagtgaggtgcagaatatggcatctgaggagaagctggagcaggtgctgagttccatgaaggagaacaaagtggccatcattggaaagattcataccccgatggagtataagggggagctagcctcctatgatatgcggctgaggcgtaagttggacttatttgccaacgtagtccatgtgaagtcacttcctgggtatatgactcggcacaacaatctagacctggtgatcattcgagagcagacagaaggggagtacagctctctggaacatgaggtgaggccccagaaactgggggagggcaaggatgaagatgggagagaggtggagctccttgtttcccttcccagtgtcacctagctgctgctttcttcttacccagagtgcaaggggtgtgattgagtgtttgaagattgtcacacgagccaagtctcagcggattgcaaagttcgcctttgactatgccaccaagaaggggcggggcaaggtcactgctgtccacaaggccaacatcatgaaacttggggatgggttgttcctgcagtgctgtgaggaagttgctgaactgtaccccaaaatcaaatttgagacaatgatcatagacaactgctgcatgcagctggtgcagaatccttaccagtttgatgtgcttgtgatgcccaatctctatgggaacattattgacaatctggctgctggcctggttgggggagctggtgtggtccctggtgagagctatagtgcagaatacgcagtctttgagacgggtgcccggcacccatttgcccaggcagtgggcaggaatatagccaatcccacggccatgctgctgtcggcttccaacatgctgcggcatcttaatcttgagtatcactccagcatgatcgcagatgcggtgaagaaggtgatcaaagttggcaaggtgcggactcgagacatgggcggctacagcaccacaaccgacttcatcaagtctgtcatcggtcacctgcagactaaagggagctagagccctttatttcttccaaccttgcaaggaccacactccccatacccttcagtgcagtgtaccagggaagagaccttgtgcctctaagcagtggaccatggtcaccttgctgggtagagcctaggttgtccttgggccggcttccttaggggacagactgttgggtggtgatggggattgttaggatggagcccaggccacatggatgatgatgattctcccccacaggttcgaacctctgacatgggtggctatgctacttgccatgacttcactgaggctgtcattgctgccttgccccacccataggccctgtccatacccatgtaaggtgttcaataaagaacatgaacca

SEQ ID NO: 457822 - DNA, 1277 bp, Homo sapiens
tgatacatcgttgctcattttgcagaacataacagttgcacattgcaagagtcaacttgcttcgggtcttttcatgctcatggcggtattgagcggagtccgctggctgacccgagcgctggtctccgccgggaaccctggggcatggagaggtctgagtacctcggccgcggcgcacgctgcatcgcggagccaggccgaggacgtgagggtggagggctcctttcccgtgaccatgcttccgggagacggtgtggggcctgagctgatgcacgccgtcaaggaggtgttcaaggctgccgctgtcccagtggagttccaggagcaccacctgagtgaggtgcagaatatggcatctgaggagaagctggagcaggtgctgagttccatgaaggagaacaaagtggccatcattggaaagattcataccccgatggagtataagggggagctagcctcctatgatatgcggctgaggcgtaagttggacttatttgccaacgtagtccatgtgaagtcacttcctgggtatatgactcggcacaacaatctagacctggtgatcattcgagagcagacagaaggggagtacagctctctggaacatgagagtgcaaggggtgtgattgagtgtttgaagattgtcacacgagccaagtctcagcggattgcaaagttcgcctttgactatgccaccaagaaggggcggggcaaggtcactgctgtccacaaggccaacatcatgaaacttggggatgggttgttcctgcagtgctgtgaggaagttgctgaactgtaccccaaaatcaaatttgagacaatgatcatagacaactgctgcatgcagctggtgcagaatccttaccagtttgatgtgcttgtgatgcccaatctctatgggaacattattgacaatctggctgctggcctggttgggggagctggtgtggtccctggtgagagctatagtgcagaatacgcagtctttgagacgggtgcccggcacccatttgcccaggcagtgggcaggaatatagccaatcccacggccatgctgctgtcggcttccaacatgctgcggcatcttaatcttgagtatcactccagcatgatcgcagatgcggtgaagaaggtgatcaaagttggcaaggttcgaacctctgacatgggtggctatgctacttgccatgacttcactgaggctgtcattgctgccttgccccacccataggccctgtccatacccatgtaaggtgttcaataaagaacatgaacca

SEQ ID NO: 457823 - DNA, 1780 bp, Homo sapiens
gcgacttcctgcgggaaacatggcggcattgagcggagtccgctggctgacccgagcgctggtctccgccgggaaccctggggcatggagaggtctgagtacctcggccgcggcgcacgctgcatcgcggagccaggccgaggacgtgagggtggagggctcctttcccgtgaccatgcttccgggagacggtgtggggcctgagctgatgcacgccgtcaaggaggtgttcaaggctgccgctgtcccagtggagttccaggagcaccacctgagtgaggtgcagaatatggcatctgaggagaagctggagcaggtgctgagttccatgaaggagaacaaagtggccatcattggaaagattcataccccgatggagtataagggggagctagcctcctatgatatgcggctgaggcgtaagttggacttatttgccaacgtagtccatgtgaagtcacttcctgggtatatgactcggcacaacaatctagacctggtgatcattcgagagcagacagaaggggagtacagctctctggaacatgagagtgcaaggggtgtgattgagtgtttgaagattgtcacacgagccaagtctcagcggattgcaaagttcgcctttgactatgccaccaagaaggggcggggcaaggtcactgctgtccacaaggccaacatcatgaaacttggggatgggttgttcctgcagtgctgtgaggaagttgctgaactgtaccccaaaatcaaatttgagacaatgatcatagacaactgctgcatgcagctggtgcagaatccttaccagtttgatgtgcttgtgatgcccaatctctatgggaacattattgacaatctggctgctggcctggttgggggagctggtgtggtccctggtgagagctatagtgcagaatacgcagtctttgagacgggtgcccggcacccatttgcccaggcagtgggcaggaatatagccaatcccacggccatgctgctgtcggcttccaacatgctgcggcatcttaatcttgagtatcactccagcatgatcgcagatgcggtgaagaaggtgatcaaagttggcaaggtgcggactcgagacatgggcggctacagcaccacaaccgacttcatcaagtctgtcatcggtcacctgcagactaaagggagctagagccctttatttcttccaaccttgcaaggaccacactccccatacccttcagtgcagtgtaccagggaagagaccttgtgcctctaagcagtggaccatggtcaccttgctgggtagagcctaggttgtccttgggccggcttccttaggggacagactgttgggtggtgatggggattgttaggatggagcccaggccacatggatgatgatgattctcccccacaggttcgaacctctgacatgggtggctatgctacttgccatgacttcactgaggctgtcattgctgccttgccccacccataggccctgtccatacccatgtaaggtgttcaataaagaacatgaaccacacaagacaactaacgataaccacagtcacaaacacaacaacaacgggggccatcaaatacattcccggaggggagcgatatatcacacacaccgactattgaaacagggctccataagacaagcacctgaaacaaacgccaggccgataacaaccggcagggacaacgcactcggacttagtaaaccacctactggtggaaataggacaccacagagtcaacacggcataaatcagtcaacgtcaca

SEQ ID NO: 457824 - DNA, 1413 bp, Homo sapiens
gcgacttcctgcgggaaacatggcggcattgagcggagtccgctggctgacccgagcgctggtctccgccgggaaccctggggcatggagaggtctgagtacctcggccgcggcgcacgctgcatcgcggagccaggccgaggacgtgagggtggagggctcctttcccgtgaccatgcttccgggagacggtgtggggcctgagctgatgcacgccgtcaaggaggtgttcaaggctgccgctgtcccagtggagttccaggagcaccacctgagtgaggtgcagaatatggcatctgaggagaagctggagcaggtgctgagttccatgaaggagaacaaagtggccatcattggaaagattcataccccgatggagtataagggggagctagcctcctatgatatgcggctgaggcgtaagttggacttatttgccaacgtagtccatgtgaagtcacttcctgggtatatgactcggcacaacaatctagacctggtgatcattcgagagcagacagaaggggagtacagctctctggaacatgagagtgcaaggggtgtgattgagtgtttgaagattgtcacacgagccaagtctcagcggattgcaaagttcgcctttgactatgccaccaagaaggggcggggcaaggtcactgctgtccacaaggccaacatcatgaaacttggggatgggttgttcctgcagtgctgtgaggaagttgctgaactgtaccccaaaatcaaatttgagacaatgatcatagacaactgctgcatgcagctggtgcagaatccttaccagtttgatgtgcttgtgatgcccaatctctatgggaacattattgacaatctggctgctggcctggttgggggagctggtgtggtccctggtgagagctatagtgcagaatacgcagtctttgagacgggtgcccggcacccatttgcccaggcagtgggcaggaatatagccaatcccacggccatgctgctgtcggcttccaacatgctgcggcatcttaatcttgagtatcactccagcatgatcgcagatgcggtgaagaaggtgatcaaagttggcaaggtgcggactcgagacatgggcggctacagcaccacaaccgacttcatcaagtctgtcatcggtcacctgcagactaaagggagctagagccctttatttcttccaaccttgcaaggaccacactccccatacccttcagtgcagtgtaccagggaagagaccttgtgcctctaagcagtggaccatggtcaccttggttcgaacctctgacatgggtggctatgctacttgccatgacttcactgaggctgtcattgctgccttgccccacccataggccctgtccatacccatgtaaggtgttcaataaagaacatgaacca

SEQ ID NO: 457825 - DNA, 1494 bp, Homo sapiens
gcgacttcctgcgggaaacatggcggcattgagcggagtccgctggctgacccgagcgctggtctccgccgggaaccctggggcatggagaggtctgagtacctcggccgcggcgcacgctgcatcgcggagccaggccgaggacgtgagggtggagggctcctttcccgtgaccatgcttccgggagacggtgtggggcctgagctgatgcacgccgtcaaggaggtgttcaaggctgccgctgtcccagtggagttccaggagcaccacctgagtgaggtgcagaatatggcatctgaggagaagctggagcaggtgctgagttccatgaaggagaacaaagtggccatcattggaaagattcataccccgatggagtataagggggagctagcctcctatgatatgcggctgaggcgtaagttggacttatttgccaacgtagtccatgtgaagtcacttcctgggtatatgactcggcacaacaatctagacctggtgatcattcgagagcagacagaaggggagtacagctctctggaacatgagagtgcaaggggtgtgattgagtgtttgaagattgtcacacgagccaagtctcagcggattgcaaagttcgcctttgactatgccaccaagaaggggcggggcaaggtcactgctgtccacaaggccaacatcatgaaacttggggatgggttgttcctgcagtgctgtgaggaagttgctgaactgtaccccaaaatcaaatttgagacaatgatcatagacaactgctgcatgcagctggtgcagaatccttaccagtttgatgtgcttgtgatgcccaatctctatgggaacattattgacaatctggctgctggcctggttgggggagctggtgtggtccctgggtgcccggcacccatttgcccaggcagtgggcaggaatatagccaatcccacggccatgctgctgtcggcttccaacatgctgcggcatcttaatcttgagtatcactccagcatgatcgcagatgcggtgaagaaggtgatcaaagttggcaaggtgcggactcgagacatgggcggctacagcaccacaaccgacttcatcaagtctgtcatcggtcacctgcagactaaagggagctagagccctttatttcttccaaccttgcaaggaccacactccccatacccttcagtgcagtgtaccagggaagagaccttgtgcctctaagcagtggaccatggtcaccttgctgggtagagcctaggttgtccttgggccggcttccttaggggacagactgttgggtggtgatggggattgttaggatggagcccaggccacatggatgatgatgattctcccccacaggttcgaacctctgacatgggtggctatgctacttgccatgacttcactgaggctgtcattgctgccttgccccacccataggccctgtccatacccatgtaaggtgttcaataaagaacatgaacca

SEQ ID NO: 457826 - DNA, 1101 bp, Homo sapiens
  misc_feature (1060)..(1060): n is a, c, g, or t
gcgacttcctgcgggaaacatggcggcattgagcggagtccgctggctgacccgagcgctggtctccgccgggaaccctggggcatggagaggtctgagtacctcggccgcggcgcacgctgcatcgcggagccaggccgaggacgtgagggtggagggctcctttcccgtgaccatgcttccgggagacggtgtggggcctgagctgatgcacgccgtcaaggaggtgttcaaggctgccgctgtcccagtggagttccaggagcaccacctgagtgaggtgcagaatatggcatctgaggagaagctggagcaggtgctgagttccatgaaggagaacaaagtggccatcattggaaagattcataccccgatggagtataagggggagctagcctcctatgatatgcggctgaggcgtaagttggacttatttgccaacgtagtccatgtgaagtcacttcctgggtatatgactcggcacaacaatctagacctggtgatcattcgagagcagacagaaggggagtacagctctctggaacatgagagtgcaaggggtgtgattgagtgtttgaagattgtcacacgagccaagtctcagcggattgcaaagttcgcctttgactatgccaccaagaaggggcggggcaaggtcactgctgtccacaaggccaacatcatgaaacttggggatgggttgttcctgcagtgctgtgaggaagttgctgaactgtaccccaaaatcaaatttgagacaatgatcatagacaactgctgcatgcagctggtgcagaatccttaccagtttgatgtgcttgtgatgcccaatctctatgggaacattattgacaatctggctgctggcctggttgggggagctggtgtggtccctggtgagagctatagtgcagaatacgcagtctttgagacgggtgcccggcacccatttgcccaggcagtgggcaggaatatagccaatcccacggccatgctgctgtcggcttccaacatgctgcggcatcttaatcttgagtatcactcccagcatgatcgcaantcggtgaaaggaggtgatcgtttggcggtgcggactcggtg

SEQ ID NO: 457827 - DNA, 1522 bp, Homo sapiens
ttatttcagtactgctggctgggcttcgttgtagatacgtatgtgcttggctcgctcgcttttacacctggggcatggagaggtctgagtacctcggccgcggcgcacgctgcatcgcggagccaggccgaggacgtgagggtggagggctcctttcccgtgaccatgcttccgggagacggtgtggggcctgagctgatgcacgccgtcaaggaggtgttcaaggctgccgctgtcccagtggagttccaggagcaccacctgagtgaggtgcagaatatggcatctgaggagaagctggagcaggtgctgagttccatgaaggagaacaaagtggccatcattggaaagattcataccccgatggagtataagggggagctagcctcctatgatatgcggctgaggcgtaagttggacttatttgccaacgtagtccatgtgaagtcacttcctgggtatatgactcggcacaacaatctagacctggtgatcattcgagagcagacagaaggggagtacagctctctggaacatgagagtgcaaggggtgtgattgagtgtttgaagattgtcacacgagccaagtctcagcggattgcaaagttcgcctttgactatgccaccaagaaggggcggggcaaggtcactgctgtccacaaggccaacatcatgaaacttggggatgggttgttcctgcagtgctgtgaggaagttgctgaactgtaccccaaaatcaaatttgagacaatgatcatagacaactgctgcatgcagctggtgcagaatccttaccagtttgatgtgcttgtgatgcccaatctctatgggaacattattgacaatctggctgctggcctggttgggggagctggtgtggtccctggtgagagctatagtgcagaatacgcagtctttgagacgggtgcccggcacccatttgcccaggcagtgggcaggaatatagccaatcccacggccatgctgctgtcggcttccaacatgctgcggcatcttaatcttgagtatcactccagcatgatcgcagatgcggtgaagaaggtgatcaaagttggcaaggtgcggactcgagacatgggcggctacagcaccacaaccgacttcatcaagtctgtcatcggtcacctgcagactaaagggagctagagccctttatttcttccaaccttgcaaggaccacactccccatacccttcagtgcagtgtaccagggaagagaccttgtgcctctaagcagtggaccatggtcaccttgctgggtagagcctaggttgtccttgggccggcttccttaggggacagactgttgggtggtgatggggattgttaggatggagcccaggccacatggatgatgatgattctcccccacaggttcgaacctctgacatgggtggctatgctacttgccatgacttcactgaggctgtcattgctgccttgccccacccataggccctgtccatacccatgtaaggtgttcaataaagaacatgaacca

SEQ ID NO: 457828 - DNA, 1709 bp, Homo sapiens
gcgacttcctgcgggaaacatggcggcattgagcggagtccgctggctgacccgagcgctggtctccgccgggaaccctggggcatggagaggtctgagtacctcggccgcggcgcacgctgcatcgcggagccaggccgaggacgtgagggtggagggctcctttcccgtgaccatgcttccgggagacggtgtggggcctgagctgatgcacgccgtcaaggaggtgttcaaggctgccgctgtcccagtggagttccaggagcaccacctgagtgaggtgcagaatatggcatctgaggagaagctggagcaggtgctgagttccatgaaggagaacaaagtggccatcattggaaagattcataccccgatggagtataagggggagctagcctcctatgatatgcggctgaggcgtaagttggacttatttgccaacgtagtccatgtgaagtcacttcctgggtatatgactcggcacaacaatctagacctggtgatcattcgagagcagacagaaggggagtacagctctctggaacatgagagtgcaaggggtgtgattgagtgtttgaagattgtcacacgagccaagtctcagcggattgcaaagttcgcctttgactatgccaccaagaaggggcggggcaaggtcactgctgtccacaaggccaacatcatgtgaggggcatggctttgtgtaggatgggttcctgggaaggtagcccctgtactttcttggctgattctgtcccctttggcccatggacaggaaacttggggatgggttgttcctgcagtgctgtgaggaagttgctgaactgtaccccaaaatcaaatttgagacaatgatcatagacaactgctgcatgcaggtgaggcctccccacatctctactcatggggcggaggaggagggtggggagtggaatttacttcatgcctgcatctcaccctctagctggtgcagaatccttaccagtttgatgtgcttgtgatgcccaatctctatgggaacattattgacaatctggctgctggcctggttgggggagctggtgtggtccctggtgagagctatagtgcagaatacgcagtctttgagacgggtgcccggcacccatttgcccaggcagtgggcaggaatatagccaatcccacggccatgctgctgtcggcttccaacatgctgcggcatcttaatcttgagtatcactccagcatgatcgcagatgcggtgaagaaggtgatcaaagttggcaaggtgcggactcgagacatgggcggctacagcaccacaaccgacttcatcaagtctgtcatcggtcacctgcagactaaagggagctagagccctttatttcttccaaccttgcaaggaccacactccccatacccttcagtgcagtgtaccagggaagagaccttgtgcctctaagcagtggaccatggtcaccttgctgggtagagcctaggttgtccttgggccggcttccttaggggacagactgttgggtggtgatggggattgttaggatggagcccaggccacatggatgatgatgattctcccccacaggttcgaacctctgacatgggtggctatgctacttgccatgacttcactgaggctgtcattgctgccttgccccacccataggccctgtccatacccatgtaaggtgttcaataaagaacatgaacca

SEQ ID NO: 457829 - DNA, 1585 bp, Homo sapiens
gcgacttcctgcgggaaacatggcggcattgagcggagtccgctggctgacccgagcgctggtctccgccgggaaccctggggcatggagaggtctgagtacctcggccgcggcgcacgctgcatcgcggagccaggccgaggacgtgagggtggagggctcctttcccgtgaccatgcttccgggagacggtgtggggcctgagctgatgcacgccgtcaaggaggtgttcaaggctgccgctgtcccagtggagttccaggagcaccacctgagtgaggtgcagaatatggcatctgaggagaagctggagcaggtgctgagttccatgaaggagaacaaagtggccatcattggaaagattcataccccgatggagtataagggggagctagcctcctatgatatgcggctgaggcgtaagttggacttatttgccaacgtagtccatgtgaagtcacttcctgggtatatgactcggcacaacaatctagacctggtgatcattcgagagcagacagaaggggagtacagctctctggaacatgagagtgcaaggggtgtgattgagtgtttgaagattgtcacacgagccaagtctcagcggattgcaaagttcgcctttgactatgccaccaagaaggggcggggcaaggtcactgctgtccacaaggccaacatcatgtgaggggcatggctttgtgtaggatgggttcctgggaaggtagcccctgtactttcttggctgattctgtcccctttggcccatggacaggaaacttggggatgggttgttcctgcagtgctgtgaggaagttgctgaactgtaccccaaaatcaaatttgagacaatgatcatagacaactgctgcatgcagctggtgcagaatccttaccagtttgatgtgcttgtgatgcccaatctctatgggaacattattgacaatctggctgctggcctggttgggggagctggtgtggtccctgggtgcccggcacccatttgcccaggcagtgggcaggaatatagccaatcccacggccatgctgctgtcggcttccaacatgctgcggcatcttaatcttgagtatcactccagcatgatcgcagatgcggtgaagaaggtgatcaaagttggcaaggtgcggactcgagacatgggcggctacagcaccacaaccgacttcatcaagtctgtcatcggtcacctgcagactaaagggagctagagccctttatttcttccaaccttgcaaggaccacactccccatacccttcagtgcagtgtaccagggaagagaccttgtgcctctaagcagtggaccatggtcaccttgctgggtagagcctaggttgtccttgggccggcttccttaggggacagactgttgggtggtgatggggattgttaggatggagcccaggccacatggatgatgatgattctcccccacaggttcgaacctctgacatgggtggctatgctacttgccatgacttcactgaggctgtcattgctgccttgccccacccataggccctgtccatacccatgtaaggtgttcaataaagaacatgaacca

SEQ ID NO: 457830 - DNA, 947 bp, Homo sapiens
gcgacttcctgcgggaaacatggcggcattgagcggagtccgctggctgacccgagcgctggtctccgccgggaaccctggggcatggagaggtctgagtacctcggccgcggcgcacgctgcatcgcggagccaggccgaggacgtgagggtggagggctcctttcccgtgaccatgcttccgggagacggtgtggggcctgagctgatgcacgccgtcaaggaggtgttcaaggctgccgctgtcccagtggagttccaggagcaccacctgagtgaggtgcagaatatggcatctgaggagaagctggagcaggtgctgagttccatgaaggagaacaaagtggccatcattggaaagattcataccccgatggagtataagggggagctagcctcctatgatatgcggctgaggcgtaagttggacttatttgccaacgtagtccatgtgaagtcacttcctgggtatatgactcggcacaacaatctagacctggtgatcattcgagagcagacagaaggggagtacagctctctggaacatgagagtgcaaggggtgtgattgagtgtttgaagattgtcacacgagccaagtctcagcggattgcaaagttcgcctttgactatgccaccaagaaggggcggggcaaggtcactgctgtccacaaggccaacatcatgtgaggggcatggctttgtgtaggatgggttcctgggaaggtagcccctgtactttcttggctgattctgtcccctttggcccatggacaggaaacttggggatgggttgttcctgcagtgctgtgaggaagttgctgaactgtaccccaaaatcaaatttgagacaatgatcatagacaactgctgcatgcagctggtgcagaatccttaccagttttatgtgcttgtatacccagaaccggggataagatcctctaagtca

SEQ ID NO: 457831 - DNA, 680 bp, Homo sapiens
gcgacttcctgcgggaaacatggcggcattgagcggagtccgctggctgacccgagcgctggtctccgccgggaaccctggggcatggagaggtctgagtacctcggccgcggcgcacgctgcatcgcggagccaggccgaggacgtgagggtggagggctcctttcccgtgaccatgcttccgggagacggtgtggggcctgagctgatgcacgccgtcaaggaggtgttcaaggctgccgctgtcccagtggagttccaggagcaccacctgagtgaggtgcagaatatggcatctgaggagaagctggagcaggtgctgagttccatgaaggagaacaaagtggccatcattggaaagattcataccccgatggagtataagggggagctagcctcctatgatatgcggctgaggcgtaagttggacttatttgccaacgtagtccatgtgaagtcacttcctgggtatatgactcggcacaacaatctagacctggtgatcattcgagagcagacagaaggggagtacagctctctggaacatgagagtgcaaggggtgtgattgagtgtttgaagattgtcacacgagccaagtctcagcggattgcaaagttcgcctttgactatgccaccctgtccatacccatgtaaggtgttcaataaagaacatgaacca

SEQ ID NO: 457832 - DNA, 692 bp, Homo sapiens
gcgacttcctgcgggaaacatggcggcattgagcggagtccgctggctgacccgagcgctggtctccgccgggaaccctggggcatggagaggtctgagtacctcggccgcggcgcacgctgcatcgcggagccaggccgaggacgtgagggtggagggctcctttcccgtgaccatgcttccgggagacggtgtggggcctgagctgatgcacgccgtcaaggaggtgttcaaggctgccgctgtcccagtggagttccaggagcaccacctgagtgaggtgcagaatatggcatctgaggagaagctggagcaggtgctgagttccatgaaggagaacaaagtggccatcattggaaagattcataccccgatggagtataagggggagctagcctcctatgatatgcggctgaggcgtaagttggacttatttgccaacgtagtccatgtgaagtcacttcctgggtatatgactcggcacaacaatctagacctggtgatcattcgagagcagacagaaggggagtacagctctctggaacatgagagtgcaaggggtgtgattgagtgtttgaagattgtcacacgagccaagtctcagcggattgcaaagttcgcctttgactatgccaagcgggcgtaaacttcgtcccagaacctatagaatcaggtgatgttccgacgatcgt

SEQ ID NO: 457833 - DNA, 957 bp, Homo sapiens
  misc_feature (848)..(848): n is a, c, g, or t
  misc_feature (857)..(857): n is a, c, g, or t
  misc_feature (859)..(859): n is a, c, g, or t
  misc_feature (865)..(865): n is a, c, g, or t
  misc_feature (876)..(876): n is a, c, g, or t
tgatacatcgttgctcattttgcagaacataacagttgcacattgcaagagtcaacttgcttcgggtcttttcatgctcatggcggtattgagcggagtccgctggctgacccgagcgctggtctccgccgggaaccctggggcatggagaggtctgagtacctcggccgcggcgcacgctgcatcgcggagccaggccgaggacgtgagggtggagggctcctttcccgtgaccatgcttccgggagacggtgtggggcctgagctgatgcacgccgtcaaggaggtgttcaaggctgccgctgtcccagtggagttccaggagcaccacctgagtgaggtgcagaatatggcatctgaggagaagctggagcaggtgctgagttccatgaaggagaacaaagtggccatcattggaaagattcataccccgatggagtataagggggagctagcctcctatgatatgcggctgaggcgtaagttggacttatttgccaacgtagtccatgtgaagtcacttcctgggtatatgactcggcacaacaatctagacctggtgatcattcgagagcagacagaaggggagtacagctctctggaacatgagagtgcaaggggtgtgattgagtgtttgaagattgtcacacgagccaagtctcagcggattgcaaagttcgcctttgactatgccaccaagaaggggcggggcaaggtcactgctgtccacaaggccaacatcatgaaacttggggatgggttgttcctgcagtgctgtgaggaagttgctgaactgtaccccaaaatcaaatttgagacaatgatcatagacaactgctgcatgcagngcaatcttncnatggtngctgtgagccnctctttggaatttgcaaccgctgtggcgtggggacgggggcccccgaaaataaacctttaaggcggccctcgcgggggaac

SEQ ID NO: 457834 - DNA, 681 bp, Homo sapiens
tgatacatcgttgctcattttgcagaacataacagttgcacattgcaagagtcaacttgcttcgggtcttttcatgctcatggcggtattgagcggagtccgctggctgacccgagcgctggtctccgccgggaaccctggggcatggagaggtctgagtacctcggccgcggcgcacgctgcatcgcggagccaggccgaggacgtgagggtggagggctcctttcccgtgaccatgcttccgggagacggtgtggggcctgagctgatgcacgccgtcaaggaggtgttcaaggctgccgctgtcccagtggagttccaggagcaccacctgagtgaggtgcagaatatggcatctgaggagaagctggagcaggtgctgagttccatgaaggagaacaaagtggccatcattggaaagattcataccccgatggagtataagggggagctagcctcctatgatatgcggctgaggcgtaagttggacttatttgccaacgtagtccatgtgaagtcacttcctgggtatatgactcggcacaacaatctagacctggtgatcattcgagagcagacagaaggggagtacagctctctggaacatgagagtgccaggggcgtggtttgacgtctcatcatttgacaaccaaacccggttctgccctactgcaaagtatt

SEQ ID NO: 457835 - DNA, 1536 bp, Homo sapiens
  misc_feature (1124)..(1124): n is a, c, g, or t
  misc_feature (1220)..(1222): n is a, c, g, or t
  misc_feature (1357)..(1357): n is a, c, g, or t
  misc_feature (1398)..(1398): n is a, c, g, or t
cgcccgggcaggtttcaaatccaggcccctgactctaagctgaaccatgagaatctgctgcctcccaactaactaattatctacatgggttctacgcagtatgatcctttgggccctcaggaactctcacattcttttggcctgattcctgcagatactgggatctgaaaagtggggtttgcacacgaatcttcggtggtcaccaggggactatcacttgcatggacttgtgtaagaacaggctcgtatctggaggaagagattgccaggtaaaagtatgggatgtagacacagggaagtgcctgaagacgtttagacacaaagaccccatcttggccaccaggatcaatgatacctacattgtgagcagctgtgagcgagggctggtgaaagtgtggcacattgccatggcccagttggtaaagactctcagtggccacgagggagccgtgaaatgcctgttctttgaccagtggcatctcctctcaggaagcactgatggcctggtcatggcctggagcatggtggggaagtacgagcgctgcctgatggccttcaagcatcccaaagaggtgcctgacgtgtcccttctcttcctccggatcatcagcgcctgtgcaaatggcaagatccgaatttacaatttcctccatgggaactgtatgaaggtgataaaagccaatggcagaggcgatcctgtgctgtcctttccacagaatttcagtctgccacatcagcacatttgctaaaagaattaacgtgggatggaatggaatcgaaccaagtgctacagctcagggaggaaatgcctccttgaccgagtgtgctcatgtgagactccacatcgcgggacacttaccagcatcgaggctgcccgtggccgctgtccagcccatgacaggcgggatggccccaaccacagctccgacccatgtgttggcaatgctgatccttttcagtggtgtgtagcagcaggtatacaggaaaatgttgaagagccccagggctcctgtgagtggattcacccccaaggtcagaatggcaactcctggaacagcacaacaagtggcaaaggacacagctagcaacgggctggaaaaaggcagagaactcaactcaatcanactacctaaaatcggcactgacaaagtacaaataatccacctatccagtagaggcagcactgatctggctgaattcctggatatggggaatcctcnnnatgaaacaaacttacaataagaaagaatatgtttgtgggagctctggctgctcttcttgattttgctagctaagagtaaagtggttaagagagtcaggattagagtgttctggattcatataggttctgtccctncctggctatagggcagctaggtttcacttactcctctctanaagagaaatgatcatcttttcctcctagggttgaagactgactgagacaatgcccctgcacagtgttccattttatatttagtcatgaacaaacaacttcagacacaatattggaagatttgggcagaaaatactacc

SEQ ID NO: 457836 - DNA, 765 bp, Homo sapiens
cgcccgggcaggtttcaaatccaggcccctgactctaagctgaaccatgagaatctgctgcctcccaactaactaattatctacatgggttctacgcagtatgatcctttgggccctcaggaactctcacattcttttggcctgattcctgcagatactgggatctgaaaagtggggtttgcacacgaatcttcggtggtcaccaggggactatcacttgcatggacttgtgtaagaacaggctcgtatctggaggaagagattgccaggtaaaagtatgggatgtagacacagggaagtgcctgaagacgtttagacacaaagaccccatcttggccaccaggatcaatgatacctacattgtgagcagctgtgagcgagggctggtgaaagtgtggcacattgccatggcccagttggtaaagactctcagtggccacgagggagccgtgaaatgcctgttctttgaccagtggcatctcctctcaggaagcactgatggcctggtcatggcctggagcatggtggggaagtacgagcgctgcctgatggccttcaagcatcccaagtaggtgcctgtgaagcccggagcgatgaacctggtgtccttcccttccccgtcatagcctagactgcaatcattggcagaccttctgctccctgtagacatcgtgttctctgcacctcaccctctctgcttccctcctcttccacctgggacccatttttccccaccatcttctctgtctgactgttagcctcttc

SEQ ID NO: 457837 - DNA, 1575 bp, Homo sapiens
  misc_feature (1163)..(1163): n is a, c, g, or t
  misc_feature (1259)..(1261): n is a, c, g, or t
  misc_feature (1396)..(1396): n is a, c, g, or t
  misc_feature (1437)..(1437): n is a, c, g, or t
cgcccgggcaggtttcaaatccaggcccctgactctaagctgaaccatgagaatctgctgcctcccaactaactaattatctacatgggttctacgcagtatgatcctttgggccctcaggaactctcacattcttttggcctgattcctgcagatactgggatctgaaaagtggggtttgcacacgaatcttcggtggtcaccaggggactatcacttgcatggacttgtgtaagaacaggctcgtatctggaggaagagattgccaggtaaaagtatgggatgtagacacagggaagtgcctgaagacgtttagacacaaagaccccatcttggccaccaggatcaatgatacctacattgtgagcagctgtgagcgagggctggtgaaagtgtggcacattgccatggcccagttggtaaagactctcagtggccacgagggagccgtgaaatgcctgttctttgaccagtggcatctcctctcaggaagcactgatggcctggtcatggcctggagcatggtggggaagtacgagcgctgcctgatggccttcaagcatcccaaagaggtgcctgacgtgtcccttctcttcctccggatcatcagcgcctgtgcaaatggcaagatccgaatttacaatttcctccatgggaactgtatgaaggtgataaaagccaatggcagaggcgatcctgtgctgtccttctttattcagggcaacagtccacagaatttcagtctgccacatcagcacatttgctaaaagaattaacgtgggatggaatggaatcgaaccaagtgctacagctcagggaggaaatgcctccttgaccgagtgtgctcatgtgagactccacatcgcgggacacttaccagcatcgaggctgcccgtggccgctgtccagcccatgacaggcgggatggccccaaccacagctccgacccatgtgttggcaatgctgatccttttcagtggtgtgtagcagcaggtatacaggaaaatgttgaagagccccagggctcctgtgagtggattcacccccaaggtcagaatggcaactcctggaacagcacaacaagtggcaaaggacacagctagcaacgggctggaaaaaggcagagaacgtgggagtgatcatctccaactcaactcaatcanactacctaaaatcggcactgacaaagtacaaataatccacctatccagtagaggcagcactgatctggctgaattcctggatatggggaatcctcnnnatgaaacaaacttacaataagaaagaatatgtttgtgggagctctggctgctcttcttgattttgctagctaagagtaaagtggttaagagagtcaggattagagtgttctggattcatataggttctgtccctncctggctatagggcagctaggtttcacttactcctctctanaagagaaatgatcatcttttcctcctagggttgaagactgactgagacaatgcccctgcacagtgttccattttatatttagtcatgaacaaacaacttcagacacaatattggaagatttgggcagaaaatactacc

SEQ ID NO: 457838 - DNA, 590 bp, Homo sapiens
ttctggattgcgggctccctcaaccacctgtattcagggcgctctgtgctgtgggcacatgagctgttggtgagcctgctcttcggaggtgctaggccacgggaagtccttctagaatctgacttgatgggctcgatgagtctttgcttctgtgatggggagcagaactccactgtaacctttccttttccccctttttccccactcccatgtcttcctctgtctccctccttttcagtatgggatgtagacacagggaagtgcctgaagacgtttagacacaaagaccccatcttggccaccaggatcaatgatacctacattgtgagcagctgtgagcgagggctggtgaaagtgtggcacattgccatggcccagttggtaaaggtaagtgggcagtgggctaccttggcggaaagggcactggggaggagatgggtgggctccccctacctagctcctcaggtcatcctagagtaactgagtatggccttcaagaaggacagtcctgaagctctaaaggggaaggccccaaagtgaggcattcagagtccgtggagggtaggggctccaccgcccacatcatgacc

SEQ ID NO: 457839 - DNA, 1133 bp, Homo sapiens
taagatcctctttctctctcccccgcccctgccatcctgactccctaaggttttctatagtactatgctctcactcccaacttgaacacttctttaagctttccatccgtagtccttaattgggtttcagtccctccactcccattgttttttctccttacccctctttctcttttgccccctcccccaattctgtctccattcctagggttctaccaatcacatccgtgcactgtgatttagaggcatattctctgtagctgagaggggagccctgcgctcactgccatatgtttattagttatgaactgaataaaggaaggcttgacttcctgggtcatgggagtgaaggagtctgggtgacaggaagcaagcggcctgtcatgcctattgcctagctgccagattaaccttgccttgaaaataacgattgccccataggctattcagtgtaaggaagacaaaaattccttgggaacctactagtgggtttgccttccagatttggtagacgcaaaaagcaaagggggaacatgggcaaaggaagatttgatgaaaaagaaaatgtgtccaactgcatccagttgaaaacttcagttattaagggtattaagaatcaattgatagagcaatttccaggtattgaaccatggcttaatcaaatcatgcctaagaaagatcctgtcaaaatagtccgatgccatgaacatatagaaatccttacagtaaatggagaattactcttttttagacaaagagaagggcctttttatccaaccctaagattacttcacaaatatccttttatcctgccacaccagcaggttgataaaggagccatcaaatttgtactcagtggagcaaatatcatgtgtccaggcttaacttctcctggagctaagctttaccctgctgcagtagataccattgttgctatcatggcagaaggaaaacagcatgctctatgtgttggagtcatgaagatgtctgcagaagacattgagaaaagtcaccaagggaattgcattgaaaattttccattttttaaatgaatggcctgggcctttttaggccttttaattggaccttaaaaaggattgcccttggcctaaatatggttattgggctggatc

SEQ ID NO: 457840 - DNA, 982 bp, Homo sapiens
gattcttctcttcctgcaattgctctatcacttcttccctctcaagtcccgccctttcagctacctccaactgctgaggaaccggttgcctaaaaggagccggcaaaagcgcctacgtggagtccagaggagcggaagtagtcagatttgactgagagccgtaaagcgcggctggctctcgttttccggataacgactacagctccgactgtcagtgccggccttcctcgtgtgaggggatctgccggacccctgcaaattcaatttctttcccattccgggcccttccctatcgtcgcccccttcaccttggatcatgttcaagaaatttgatgaaaaagaaaatgtgtccaactgcatccagttgaaaacttcagttattaagggtattaagaatcaattgatagagcaatttccaggtattgaaccatggcttaatcaaatcatgcctaagaaagatcctgtcaaaatagtccgatgccatgaacatatagaaatccttacagtaaatggagaattactcttttttagacaaagagaagggcctttttatccaaccctaagattacttcacaaatatccttttatcctgccacaccagcaggttgataaaggagccatcaaatttgtactcagtggagcaaatatcatgtgtccaggcttaacttctcctggagctaagctttaccctgctgcagtagataccattgttgctatcatggcagaaggaaaacagcatgctctatgtgttggagtcatgaagatgtctgcagaagacattgagaaagtcaacaaaggaattggcattgaaaatatccattatttaaatgatgggctgtggcatatgaagacatataaatgagcctcagaaggaatgcacttgggctaaatatggatattgtgctgtatctgtgtttgtgtctgtgtgtgacagcatgaagataatgcctgtggttatgctgaataaattcaccagatgcta

SEQ ID NO: 457841 - DNA, 1496 bp, Homo sapiens
gattcttctcttcctgcaattgctctatcacttcttccctctcaagtcccgccctttcagctacctccaactgctgaggaaccggttgcctaaaaggagccggcaaaagcgcctacgtggagtccagaggagcggaagtagtcagatttgactgagagccgtaaagcgcggctggctctcgttttccggataacgactacagctccgactgtcagtgccggccttcctcgtgtgaggggatctgccggacccctgcaaattcaatttctttcccattccgggcccttccctatcgtcgcccccttcaccttggatcatgttcaagaaatttgatgaaaaagaaaatgtgtccaactgcatccagttgaaaacttcagttattaagggtattaagaatcaattgatagagcaatttccaggtattgaaccatggcttaatcaaatcatgcctaagaaagatcctgtcaaaatagtccgatgccatgaacatatagaaatccttacagtaaatggagaattactcttttttagacaaagagaagggcctttttatccaaccctaagattacttcacaaatatccttttatcctgccacaccagcaggttgataaaggagccatcaaatttgtactcagtggagcaaatatcatgtgtccaggcttaacttctcctggagctaagctttaccctgctgcagtagataccattgttgctatcatggcagaaggaaaacagcatgctctatgtgttggagtcatgaagatgtctgcagaagacattgagaaagtcaacaaaggaattggcattgaaaatatccattatttaaatgatgggctgtggcatatgaagacatataaatgagcctcagaaggaatgcacttgggctaaatatggatattgtgctgtatctgtgtttgtgtctgtgtgtgacagcatgaagataatgcctgtggttatgctgaataaattcaccagatgctaaaattctgttagcttcagaaattattttaagttttcttaaactcaagttttgggtagcaaacttggacattaaaaggtatctggtaagtaagcaaactcatacaactaatgtcctttcttaggctaatgatataagagtgaagagcaggacttggtcaatggattgccattttatggtagacctctagagaaactgtctagttaaatggggctagctagactaggaattttattctattactccaggggacccagcagtgctcattctcgtgtgtgtgtgtgtgtgtgtgtgtgtgtgtgtgtgtgtgtgtgtgtgttttgttgattgtttttttaaaaaaaacttcaatggaaaattctaaacatattaagaagtctggagaatagtataatggacctctccatatccatcacccagtttcagtttatggtcagtcttatttcatctatacctcaattatttctccccaccccccaattattttgaagcaaatcccagacatcctatcatttc

SEQ ID NO: 457842 - DNA, 1544 bp, Homo sapiens
cagaatcttgctgtgtcgcccaggctggactgcagtggtgtaatcttggctcactgcaacctctgcctcccgggttcaagcgattcttgtgcgtcagccttcttgagtacctgggactacaggctcccagggtgatttgagagttgccaggagaggaaggccatttggcaagaatcctgacagacaaaagctggaggagggtagagcaagatggcagaatagaaagcgccaccgatcatactccgcccccacaaggacaccaagttaactacctacacagaagaaataccttcataagaatcaaaaatcagacacaccctgggccagaagagaacccacttccttgaaggaaaggatccagtcctggcagcattcatcgcctgctaactgaagatcccttgggccttgaataccaacagcaatacccagatttgatgaaaaagaaaatgtgtccaactgcatccagttgaaaacttcagttattaagggtattaagaatcaattgatagagcaatttccaggtattgaaccatggcttaatcaaatcatgcctaagaaagatcctgtcaaaatagtccgatgccatgaacatatagaaatccttacagtaaatggagaattactcttttttagacaaagagaagggcctttttatccaaccctaagattacttcacaaatatccttttatcctgccacaccagcaggttgataaaggagccatcaaatttgtactcagtggagcaaatatcatgtgtccaggcttaacttctcctggagctaagctttaccctgctgcagtagataccattgttgctatcatggcagaaggaaaacagcatgctctatgtgttggagtcatgaagatgtctgcagaagacattgagaaagtcaacaaaggaattggcattgaaaatatccattatttaaatgatgggctgtggcatatgaagacatataaatgagcctcagaaggaatgcacttgggctaaatatggatattgtgctgtatctgtgtttgtgtctgtgtgtgacagcatgaagataatgcctgtggttatgctgaataaattcaccagatgctaaaattctgttagcttcagaaattattttaagttttcttaaactcaagttttgggtagcaaacttggacattaatgatataagagtgaagagcaggacttggtcaatggattgccattttatggtagacctctagagaaactgtctagttaaatggggctagctagactaggaattttattctattactccaggggacccagcagtgctcattctcgtgtgtgtgtgtgtgtgtgtgtgtgtgtgtgtgtgtgtgtgtgtgtgttttgttgattgtttttttaaaaaaaacttcaatggaaaattctaaacatattaagaagtctggagaatagtataatggacctctccatatccatcacccagtttcagtttatggtcagtcttatttcatctatacctcaattatttctccccaccccccaattattttgaagcaaatcccagacatcctatcatttc

SEQ ID NO: 457843 - DNA, 1662 bp, Homo sapiens
taagatcctctttctctctcccccgcccctgccatcctgactccctaaggttttctatagtactatgctctcactcccaacttgaacacttctttaagctttccatccgtagtccttaattgggtttcagtccctccactcccattgttttttctccttacccctctttctcttttgccccctcccccaattctgtctccattcctagggttctaccaatcacatccgtgcactgtgatttagaggcatattctctgtagctgagaggggagccctgcgctcactgccatatgtttattagttatgaactgaataaaggaaggcttgacttcctgggtcatgggagtgaaggagtctgggtgacaggaagcaagcggcctgtcatgcctattgcctagctgccagattaaccttgccttgaaaataacgattgccccataggctattcagtgtaaggaagacaaaaattccttgggaacctactagtgggtttgccttccagatttggtagacgcaaaaagcaaagggggaacatgggcaaaggaagatttgatgaaaaagaaaatgtgtccaactgcatccagttgaaaacttcagttattaagggtattaagaatcaattgatagagcaatttccaggtattgaaccatggcttaatcaaatcatgcctaagaaagatcctgtcaaaatagtccgatgccatgaacatatagaaatccttacagtaaatggagaattactcttttttagacaaagagaagggcctttttatccaaccctaagattacttcacaaatatccttttatcctgccacaccagcaggttgataaaggagccatcaaatttgtactcagtggagcaaatatcatgtgtccaggcttaacttctcctggagctaagctttaccctgctgcagtagataccattgttgctatcatggcagaaggaaaacagcatgctctatgtgttggagtcatgaagatgtctgcagaagacattgagaaagtcaacaaaggaattggcattgaaaatatccattatttaaatgatgggctgtggcatatgaagacatataaatgagcctcagaaggaatgcacttgggctaaatatggatattgtgctgtatctgtgtttgtgtctgtgtgtgacagcatgaagataatgcctgtggttatgctgaataaattcaccagatgctaaaattctgttagcttcagaaattattttaagttttcttaaactcaagttttgggtagcaaacttggacattaatgatataagagtgaagagcaggacttggtcaatggattgccattttatggtagacctctagagaaactgtctagttaaatggggctagctagactaggaattttattctattactccaggggacccagcagtgctcattctcgtgtgtgtgtgtgtgtgtgtgtgtgtgtgtgtgtgtgtgtgtgtgtgttttgttgattgtttttttaaaaaaaacttcaatggaaaattctaaacatattaagaagtctggagaatagtataatggacctctccatatccatcacccagtttcagtttatggtcagtcttatttcatctatacctcaattatttctccccaccccccaattattttgaagcaaatcccagacatcctatcatttc

SEQ ID NO: 457844 - DNA, 854 bp, Homo sapiens
gagaagacacaagaggggttccaagtggcttaactagtaacatgatcattatttgacacccttcccttgatggggaggccccaaggcattttgataaatagttttcttagctgtgttctttcaggctatcatggcagaaggaaaacagcatgctctatgtgttggagtcatgaagatgtctgcagaagacattgagaaagtcaacaaaggaattggcattgaaaatatccattatttaaatgatgggctgtggcatatgaagacatataaatgagcctcagaaggaatgcacttgggctaaatatggatattgtgctgtatctgtgtttgtgtctgtgtgtgacagcatgaagataatgcctgtggttatgctgaataaattcaccagatgctaaaattctgttagcttcagaaattattttaagttttcttaaactcaagttttgggtagcaaacttggacattaatgatataagagtgaagagcaggacttggtcaatggattgccattttatggtagacctctagagaaactgtctagttaaatggggctagctagactaggaattttattctattactccaggggacccagcagtgctcattctcgtgtgtgtgtgtgtgtgtgtgtgtgtgtgtgtgtgtgtgtgtgtgtgttttgttgattgtttttttaaaaaaaacttcaatggaaaattctaaacatattaagaagtctggagaatagtataatggacctctccatatccatcacccagtttcagtttatggtcagtcttatttcatctatacctcaattatttctccccaccccccaattattttgaagcaaatcccagacatcctatcatttc

SEQ ID NO: 457845 - DNA, 398 bp, Homo sapiens
gattcttctcttcctgcaattgctctatcacttcttccctctcaagtcccgccctttcagctacctccaactgctgaggaaccggttgcctaaaaggagccggcaaaagcgcctacgtggagtccagaggagcggaagtagtcagatttgactgagagccgtaaagcgcggctggctctcgttttccggataacgactacagctccgactgtcagtgccggccttcctcgtgtgaggggatctgccggacccctgcaaattcaatttctttcccattccgggcccttccctatcgtcgcccccttcaccttggatcatgttcaagaagtaaggacatgctgtggcctccatcggctgctcacaaaggcggtggggtgggggtggggaagagggcgaga

SEQ ID NO: 457846 - DNA, 1084 bp, Homo sapiens
cagaatcttgctgtgtcgcccaggctggactgcagtggtgtaatcttggctcactgcaacctctgcctcccgggttcaagcgattcttgtgcgtcagccttcttgagtacctgggactacaggctcccagggtgatttgagagttgccaggagaggaaggccatttggcaagaatcctgacagacaaaagctggaggagggtagagcaagatggcagaatagaaagcgccaccgatcatactccgcccccacaaggacaccaagttaactacctacacagaagaaataccttcataagaatcaaaaatcagacacaccctgggccagaagagaacccacttccttgaaggaaaggatccagtcctggcagcattcatcgcctgctaactgaagatcccttgggccttgaataccaacagcaatacccagatttgatgaaaaagaaaatgtgtccaactgcatccagttgaaaacttcagttattaagggtattaagaatcaattgatagagcaatttccaggtattgaaccatggcttaatcaaatcatgcctaagaaagatcctgtcaaaatagtccgatgccatgaacatatagaaatccttacagtaaatggagaattactcttttttagacaaagagaagggcctttttatccaaccctaagattacttcacaaatatccttttatcctgccacaccagcaggttgataaaggagccatcaaatttgtactcagtggagcaaatatcatgtgtccaggcttaacttctcctggagctaagctttaccctgctgcagtagataccattgttgctatcatggcagaaggaaaacagcatgctctatgtgttggagtcatgaagatgtctgcagaagacattgagaaagtcaacaaaggaattggcattgaaaatatccattatttaaatgatgggctgtggcatatgaagacatataaatgagcctcagaaggaatgcacttgggctaaatatggatattgtgctgtatctgtgtttgtgtctgtgtgtgacagcatgaagataatgcctgtggttatgctgaataaattcaccagatgcta

SEQ ID NO: 457847 - DNA, 1442 bp, Homo sapiens
gattcttctcttcctgcaattgctctatcacttcttccctctcaagtcccgccctttcagctacctccaactgctgaggaaccggttgcctaaaaggagccggcaaaagcgcctacgtggagtccagaggagcggaagtagtcagatttgactgagagccgtaaagcgcggctggctctcgttttccggataacgactacagctccgactgtcagtgccggccttcctcgtgtgaggggatctgccggacccctgcaaattcaatttctttcccattccgggcccttccctatcgtcgcccccttcaccttggatcatgttcaagaaatttgatgaaaaagaaaatgtgtccaactgcatccagttgaaaacttcagttattaagggtattaagaatcaattgatagagcaatttccaggtattgaaccatggcttaatcaaatcatgcctaagaaagatcctgtcaaaatagtccgatgccatgaacatatagaaatccttacagtaaatggagaattactcttttttagacaaagagaagggcctttttatccaaccctaagattacttcacaaatatccttttatcctgccacaccagcaggttgataaaggagccatcaaatttgtactcagtggagcaaatatcatgtgtccaggcttaacttctcctggagctaagctttaccctgctgcagtagataccattgttgctatcatggcagaaggaaaacagcatgctctatgtgttggagtcatgaagatgtctgcagaagacattgagaaagtcaacaaaggaattggcattgaaaatatccattatttaaatgatgggctgtggcatatgaagacatataaatgagcctcagaaggaatgcacttgggctaaatatggatattgtgctgtatctgtgtttgtgtctgtgtgtgacagcatgaagataatgcctgtggttatgctgaataaattcaccagatgctaaaattctgttagcttcagaaattattttaagttttcttaaactcaagttttgggtagcaaacttggacattaatgatataagagtgaagagcaggacttggtcaatggattgccattttatggtagacctctagagaaactgtctagttaaatggggctagctagactaggaattttattctattactccaggggacccagcagtgctcattctcgtgtgtgtgtgtgtgtgtgtgtgtgtgtgtgtgtgtgtgtgtgtgtgttttgttgattgtttttttaaaaaaaacttcaatggaaaattctaaacatattaagaagtctggagaatagtataatggacctctccatatccatcacccagtttcagtttatggtcagtcttatttcatctatacctcaattatttctccccaccccccaattattttgaagcaaatcccagacatcctatcatttc

SEQ ID NO: 457848 - DNA, 952 bp, Homo sapiens
  misc_feature (898)..(898): n is a, c, g, or t
  misc_feature (904)..(904): n is a, c, g, or t
  misc_feature (934)..(934): n is a, c, g, or t
gattcttctcttcctgcaattgctctatcacttcttccctctcaagtcccgccctttcagctacctccaactgctgaggaaccggttgcctaaaaggagccggcaaaagcgcctacgtggagtccagaggagcggaagtagtcagatttgactgagagccgtaaagcgcggctggctctcgttttccggataacgactacagctccgactgtcagtgccggccttcctcgtgtgaggggatctgccggacccctgcaaattcaatttctttcccattccgggcccttccctatcgtcgcccccttcaccttggatcatgttcaagaaatttgatgaaaaagaaaatgtgtccaactgcatccagttgaaaacttcagttattaagggtattaagaatcaattgatagagcaatttccaggtattgaaccatggcttaatcaaatcatgcctaagaaagatcctgtcaaaatagtccgatgccatgaacatatagaaatccttacagtaaatggagaattactcttttttagacaaagagaagggcctttttatccaaccctaagattacttcacaaatatccttttatcctgccacaccagcaggttgataaaggagccatcaaatttgtactcagtggagcaaatatcatgtgtccaggcttaacttctcctggagctaagctttaccctgctgcagtagataccattgttgctatcatggcagaaggaaaacagcatgctctatgtgttggagtcatgaagatgtctgcagaagacattgagaaagtcaacaaaggaattggcattgaaaatatccattatttaaatgatgggctgtggcatatgaagacatataaatgagcctcagaaggaatgcacttgggctaaatggcggancgggtnggtcgggtgtgcagctgaaaaagcgcgggntgggaaatacccaggggg

SEQ ID NO: 457849 - DNA, 1308 bp, Homo sapiens
gattcttctcttcctgcaattgctctatcacttcttccctctcaagtcccgccctttcagctacctccaactgctgaggaaccggttgcctaaaaggagccggcaaaagcgcctacgtggagtccagaggagcggaagtagtcagatttgactgagagccgtaaagcgcggctggctctcgttttccggataacgactacagctccgactgtcagtgccggccttcctcgtgtgaggggatctgccggacccctgcaaattcaatttctttcccattccgggcccttccctatcgtcgcccccttcaccttggatcatgttcaagaaatttgatgaaaaagaaaatgtgtccaactgcatccagttgaaaacttcagttattaagggtattaagaatcaattgatagagcaatttccaggtattgaaccatggcttaatcaaatcatgcctaagaaagatcctgtcaaaatagtccgatgccatgaacatatagaaatccttacagtaaatggagaattactcttttttagacaaagagaagggcctttttatccaaccctaagattacttcacaaatgctatcatggcagaaggaaaacagcatgctctatgtgttggagtcatgaagatgtctgcagaagacattgagaaagtcaacaaaggaattggcattgaaaatatccattatttaaatgatgggctgtggcatatgaagacatataaatgagcctcagaaggaatgcacttgggctaaatatggatattgtgctgtatctgtgtttgtgtctgtgtgtgacagcatgaagataatgcctgtggttatgctgaataaattcaccagatgctaaaattctgttagcttcagaaattattttaagttttcttaaactcaagttttgggtagcaaacttggacattaatgatataagagtgaagagcaggacttggtcaatggattgccattttatggtagacctctagagaaactgtctagttaaatggggctagctagactaggaattttattctattactccaggggacccagcagtgctcattctcgtgtgtgtgtgtgtgtgtgtgtgtgtgtgtgtgtgtgtgtgtgtgtgttttgttgattgtttttttaaaaaaaacttcaatggaaaattctaaacatattaagaagtctggagaatagtataatggacctctccatatccatcacccagtttcagtttatggtcagtcttatttcatctatacctcaattatttctccccaccccccaattattttgaagcaaatcccagacatcctatcatttc

SEQ ID NO: 457850 - DNA, 926 bp, Homo sapiens
gcgggaggagcgggagaccgaggagcagcagaagaggaggaggagggcgccgaaggcgcgaaaaggcgcgcaggcgcgctgcgcggagcgggcccgccgccgcccacgtcaccgcgccgcgcgcacgtcacgccggcccgacgctcggccaggaaaaatcatttttcttctctgggaaggtgaacatttgtagcattgatttcccggatctggtaacatggcaaaagatgccggtctaattgaagccaacggagaactcaaggtcttcatagaccagaaccttagtcccgggaaaggcgtggtgtccctcgtggccgttcacccctccaccgtcaacccgctcgggaagcagctcttgccaaaaacctttggacagtccaatgtcaacattgcccagcaagtggtaattggtacgcctcagagaccggcagcgtcaaacaccctggtggtaggaagcccacacacccccagcactcactttgcctctcagaaccagccttccgactcctcaccttggtctgccgggaagcgcaacaggaaaggagagaagaatggcaagggcctacggcatttctccatgaaggtctgcgagaaggtgcagaggaaagggaccacttcctacaacgaagtggcagacgagctggttgcggagttcagtgctgccgacaaccacatcttaccaaacgagtcagcttatgaccagaaaaacataagacggcgcgtctacgatgccttaaacgtgctaatggccatgaacatcatctccaaggagaagaaggagatcaagtggattggtctgcccaccaactcggctcaggaatgtcagaacttagaggtggaaagacagaggagacttgaaagaataaaacagaaacagtctcaacttcaagaacttattctacaggtaagagaatacgtatctgtgg

SEQ ID NO: 457851 - DNA, 850 bp, Homo sapiens
gtctgtaaacatgtttaatgctgcttcttccatgaggtgggatgtgggtatttttaggacttttatcatcacataatcctttttatggatgtgattcttcagacttgtcagtttttcataacaatggaaacaaagctattaccatttcttacgaaataccgattttcatagtggcatgatgagacattttatacaagtacctcatgaaaggacatctaggtagttcccagttagaataaaaactgcagtgagcagctttacagctgaatttctcgccatttctgacttgtttccaagatacagaattacttcatcaaaaggcacattaacacatttttattgtagtgttaataaataccattaaaatgtattaaaatatgtacatatggttttatgttaattgaaaacatctttaaacattaggaacgtagtgagctctggttggtggtaggtttttgtggtgctgccagccctctgggttctcagtccccgctgccagattcgacccacgctctggactccatcctgtcctgccccgggctctcttttttcctgttgctggttatgagtgaaagtcccggagggagggatctaatggttttacagtttgttccctctggggcactgctcctgatggaatgatgagtgagggagaggcagcgtgtggctctgctcagcctcctgtttctgtcgttatgggttccaggagacagggccagaagagaaccagacagagatggagtaagtgccagagcgttggcgtgctgtagtgcagacactcagcctccccgttctgtttgtgtgactgacaaaacccacacctgtggggcacagcctgtcatttgaccac

SEQ ID NO: 457852 - DNA, 906 bp, Homo sapiens
gtctgtaaacatgtttaatgctgcttcttccatgaggtgggatgtgggtatttttaggacttttatcatcacataatcctttttatggatgtgattcttcagacttgtcagtttttcataacaatggaaacaaagctattaccatttcttacgaaataccgattttcatagtggcatgatgagacattttatacaagtacctcatgaaaggacatctaggtagttcccagttagaataaaaactgcagtgagcagctttacagctgaatttctcgccatttctgacttgtttccaagatacagaattacttcatcaaaaggcacattaacacatttttattgtagtgttaataaataccattaaaatgtattaaaatatgtacatatggttttatgttaattgaaaacatctttaaacattaggaacgtagtgagctctggttggtggtaggtttttgtggtgctgccagccctctgggttctcagtccccgctgccagattcgacccacgctctggactccatcctgtcctgccccgggctctcttttttcctgttgctggttatgagtgaaagtcccggagggagggatctaatggttttacagtttgttccctctggggcactgctcctgatggaatgatgagtgagggagaggcagcgtgtggctctgctcagcctcctgtttctgtcgttatgggttccaggagacagggccagaagagaaccagacagagatggagtaagtgccagagcgttggcgtgcgtcggcaaatcacttcccgccggtggggctgcaacccaccgggggcgcgtattagcaccctggggggggggcccgcaaaaggaaaccccccctcaagcaagttgccccacgctcaacccagagccccgcagcccagggccc

SEQ ID NO: 457853 - DNA, 2760 bp, Homo sapiens
gcgggaggagcgggagaccgaggagcagcagaagaggaggaggagggcgccgaaggcgcgaaaaggcgcgcaggcgcgctgcgcggagcgggcccgccgccgcccacgtcaccgcgccgcgcgcacgtcacgccggcccgacgctcggccagggtgagccccgcgtcccggcgccactcgcccgcgcctctccgcgccgccccgcgctccgcaccgcgccctctccgcgtccccgcccgcgcggccggaccgggcagccagaaaaatcatttttcttctctgggaaggtgaacatttgtagcattgatttcccggatctggtaacatggcaaaagatgccggtctaattgaagccaacggagaactcaaggtcttcatagaccagaaccttagtcccgggaaaggcgtggtgtccctcgtggccgttcacccctccaccgtcaacccgctcgggaagcagctcttgccaaaaacctttggacagtccaatgtcaacattgcccagcaagtggtaattggtacgcctcagagaccggcagcgtcaaacaccctggtggtaggaagcccacacacccccagcactcactttgcctctcagaaccagccttccgactcctcaccttggtctgccgggaagcgcaacaggaaaggagagaagaatggcaagggcctacggcatttctccatgaaggtctgcgagaaggtgcagaggaaagggaccacttcctacaacgaagtggcagacgagctggttgcggagttcagtgctgccgacaaccacatcttaccaaacgagtcagcttatgaccagaaaaacataagacggcgcgtctacgatgccttaaacgtgctaatggccatgaacatcatctccaaggagaagaaggagatcaagtggattggtctgcccaccaactcggctcaggaatgtcagaacttagaggtggaaagacagaggagacttgaaagaataaaacagaaacagtctcaacttcaagaacttattctacagcaaattgccttcaagaacctggtgcagagaaaccggcatgcggagcagcaggccagccggccaccgccacccaactcagtcatccacctgcccttcatcatcgtcaacaccagcaagaagacggtcatcgactgcagcatctccaatgacaaatttgagtatctgtttaattttgacaacacatttgaaatccacgatgacatagaagtgctgaagcggatgggcatggcttgcgggctggagtcggggagctgctctgccgaagaccttaaaatggccagaagtctggtccccaaggctctggagccatacgtgacagaaatggctcagggaactgttggaggcgtgttcatcacgacggcaggttccacgtctaacggcacaaggttctctgccagtgacctgaccaacggtgcagatgggatgctggccacaagctccaatgggtctcagtacagcggctccagggtggagactccggtgtcctacgtcggggaggacgacgaggaggacgatgacttcaacgagaatgacgaggacgactgacgtcctccccacttcagattcggcttcaggaaaacgtttagcgaaaagaaactttttttttaatgtgggttttctgtttccttttggcctactcccaagaagatattggtaagctattgaatttagatatgcacctctgataagcaaggattgtttcccgtaggattaggacgtgctgtggatgtgtgttttgataccagtgtgctgatgcagagcgtttatttacttgttaggattttgtgttttcatttgctatttttctttaagtgcagagttcatttttgcccctgaaaagtttttgctgagtttgctgaagaaattgtatttcaaccacatccatgaaaataaaacacctcctgttgtggatggtgagcccctgatgccgcttatttgccgtgagtttggacggcacccctgctggcggatagcaagactctgtggagtttgttcagtggtacggtgtccaagcaaacagcagaatgcaactttctaaacagccccaagcaaacagcagaattcaactttttaaacaataaacaccatcaaccttattgactttattgtcccttaaattatattgactgttgtgattccatcaagtttgtacactcttttctctccctgttttgcagcaacaaattgcgaagtgcttttgtttgtttgttttcgtttggttaaagcttattgccatgctggtgcggctatggagactgtctggaaggcttggaatggtttattgcttatggtaaaatttgcctgatttcttacaggcagcgtttggaaaccttttattatatagttgtttacatacttataagtctatcatttaaagacatgtactgaaacaaatgtatttgtttcataagcatcttcctgtaatctattataaaattgaaattaaatatagagaatgttttaacaattttttaactcaaaatttgtcaatcatttttaatagttctttttttataaaaagaaaaaggaatttaaggacaggcagtagtctcttttaaaatttattcacaaaacccattaactgcacagttgctattagctgcctgttctaaaacgatagtctttttattgaaacacaaataaacttttctgtaatattttatggtatataaagagactttaattgtttgacttgtttaacttggcactgttagtttttattaataaaacgcgcatgggcattttaa

SEQ ID NO: 457854 - DNA, 3083 bp, Homo sapiens
gcgggaggagcgggagaccgaggagcagcagaagaggaggaggagggcgccgaaggcgcgaaaaggcgcgcaggcgcgctgcgcggagcgggcccgccgccgcccacgtcaccgcgccgcgcgcacgtcacgccggcccgacgctcggccagggtgagccccgcgtcccggcgccactcggcccagggcagggaccccgccacggccgggaccgcccggcccggccccagcccgcgcctctccgcgccgccccgcgctccgcaccgcgccctctccgcgtccccgcccgcgcggccggaccgggcagccagaaaaatcatttttcttctctgggaaggtgaacatttgtagcattgatttcccggatctggtaacatggcaaaagatgccggtctaattgaagccaacggagaactcaaggtcttcatagaccagaaccttagtcccgggaaaggcgtggtgtccctcgtggccgttcacccctccaccgtcaacccgctcgggaagcagctcttgccaaaaacctttggacagtccaatgtcaacattgcccagcaagtggtaattggtacgcctcagagaccggcagcgtcaaacaccctggtggtaggaagcccacacacccccagcactcactttgcctctcagaaccagccttccgactcctcaccttggtctgccgggaagcgcaacaggaaaggagagaagaatggcaagggcctacggcatttctccatgaaggtctgcgagaaggtgcagaggaaagggaccacttcctacaacgaagtggcagacgagctggttgcggagttcagtgctgccgacaaccacatcttaccaaacgagtcagcttatgaccagaaaaacataagacggcgcgtctacgatgccttaaacgtgctaatggccatgaacatcatctccaaggagaagaaggagatcaagtggattggtctgcccaccaactcggctcaggaatgtcagaacttagaggtggaaagacagaggagacttgaaagaataaaacagaaacagtctcaacttcaagaacttattctacagcaaattgccttcaagaacctggtgcagagaaaccggcatgcggagcagcaggccagccggccaccgccacccaactcagtcatccacctgcccttcatcatcgtcaacaccagcaagaagacggtcatcgactgcagcatctccaatgacaaatttgagtatctgtttaattttgacaacacatttgaaatccacgatgacatagaagtgctgaagcggatgggcatggcttgcgggctggagtcggggagctgctctgccgaagaccttaaaatggccagaagtctggtccccaaggctctggagccatacgtgacagaaatggctcagggaactgttggaggcgtgttcatcacgacggcaggttccacgtctaacggcacaaggttctctgccagtgacctgaccaacggtgcagatgggatgctggccacaagctccaatgggtctcagtacagcggctccagggtggagactccggtgtcctacgtcggggaggacgacgaggaggacgatgacttcaacgagaatgacgaggacgactgacgtcctccccacttcagattcggcttcaggaaaacgtttagcgaaaagaaactttttttttaatgtgggttttctgtttccttttggcctactcccaagaagatattggtaagctattgaatttagatatgcacctctgataagcaaggattgtttcccgtaggattaggacgtgctgtggatgtgtgttttgataccagtgtgctgatgcagagcgtttatttacttgttaggattttgtgttttcatttgctatttttctttaagtgcagagttcatttttgcccctgaaaagtttttgctgagtttgctgaagaaattgtatttcaaccacatccatgaaaataaaacacctcctgttgtggatggtgagcccctgatgccgcttatttgccgtgagtttggacggcacccctgctggcggatagcaagactctgtggagtttgttcagtggtacggtgtccaagcaaacagcagaatgcaactttctaaacagccccaagcaaacagcagaattcaactttttaaacaataaacaccatcaaccttattgactttattgtcccttaaattatattgactgttgtgattccatcaagtttgtacactcttttctctccctgttttgcagcaacaaattgcgaagtgcttttgtttgtttgttttcgtttggttaaagcttattgccatgctggtgcggctatggagactgtctggaaggcttggaatggtttattgcttatggtaaaatttgcctgatttcttacaggcagcgtttggaaaccttttattatatagttgtttacatacttataagtctatcatttaaagacatgtactgaaacaaatgtatttgtttcataagcatcttcctgtaatctattataaaattgaaattaaatatagagaatgttttaacaattttttaactcaaaatttgtcaatcatttttaatagttctttttttataaaaagaaaaaggaatttaaggacaggcagtagtctcttttaaaatttattcacaaaacccattaactgcacagttgctattagctgcctgttctaaaacgatagtctttttattgaaacacaaataaacttttctgtaatattttatggtatataaagagactttaattgtttgacttgtttaacttggcactgttagtttttattaataaaacgcgcatgggcattttaacaaaaaaaagaacacacacaacaaaagggggggggccaaaaagatccccagggaccagttacgtgcacaggtttttgcacagggccctaaaggagcgaaaaggagagaggcggttacacgtcggctggcaaacgcactggcccgggagactcctcctgctggactatggcccccacaaaagcacggataattcacgtaggtacagcatgcgatcgtcgtctgatagcgcgccaggaaacggcagcagggacgcaacacaggacgaccagcaaa

SEQ ID NO: 457855 - DNA, 2836 bp, Homo sapiens
gcgggaggagcgggagaccgaggagcagcagaagaggaggaggagggcgccgaaggcgcgaaaaggcgcgcaggcgcgctgcgcggagcgggcccgccgccgcccacgtcaccgcgccgcgcgcacgtcacgccggcccgacgctcggccagggtgagccccgcgtcccggcgccactcggcccagggcagggaccccgccacggccgggaccgcccggcccggccccagcccgcgcctctccgcgccgccccgcgctccgcaccgcgccctctccgcgtccccgcccgcgcggccggaccgggcagccagaaaaatcatttttcttctctgggaaggtgaacatttgtagcattgatttcccggatctggtaacatggcaaaagatgccggtctaattgaagccaacggagaactcaaggtcttcatagaccagaaccttagtcccgggaaaggcgtggtgtccctcgtggccgttcacccctccaccgtcaacccgctcgggaagcagctcttgccaaaaacctttggacagtccaatgtcaacattgcccagcaagtggtaattggtacgcctcagagaccggcagcgtcaaacaccctggtggtaggaagcccacacacccccagcactcactttgcctctcagaaccagccttccgactcctcaccttggtctgccgggaagcgcaacaggaaaggagagaagaatggcaagggcctacggcatttctccatgaaggtctgcgagaaggtgcagaggaaagggaccacttcctacaacgaagtggcagacgagctggttgcggagttcagtgctgccgacaaccacatcttaccaaacgagtcagcttatgaccagaaaaacataagacggcgcgtctacgatgccttaaacgtgctaatggccatgaacatcatctccaaggagaagaaggagatcaagtggattggtctgcccaccaactcggctcaggaatgtcagaacttagaggtggaaagacagaggagacttgaaagaataaaacagaaacagtctcaacttcaagaacttattctacagcaaattgccttcaagaacctggtgcagagaaaccggcatgcggagcagcaggccagccggccaccgccacccaactcagtcatccacctgcccttcatcatcgtcaacaccagcaagaagacggtcatcgactgcagcatctccaatgacaaatttgagtatctgtttaattttgacaacacatttgaaatccacgatgacatagaagtgctgaagcggatgggcatggcttgcgggctggagtcggggagctgctctgccgaagaccttaaaatggccagaagtctggtccccaaggctctggagccatacgtgacagaaatggctcagggaactgttggaggcgtgttcatcacgacggcaggttccacgtctaacggcacaaggttctctgccagtgacctgaccaacggtgcagatgggatgctggccacaagctccaatgggtctcagtacagcggctccagggtggagactccggtgtcctacgtcggggaggacgacgaggaggacgatgacttcaacgagaatgacgaggacgactgacgtcctccccacttcagattcggcttcaggaaaacgtttagcgaaaagaaactttttttttaatgtgggttttctgtttccttttggcctactcccaagaagatattggtaagctattgaatttagatatgcacctctgataagcaaggattgtttcccgtaggattaggacgtgctgtggatgtgtgttttgataccagtgtgctgatgcagagcgtttatttacttgttaggattttgtgttttcatttgctatttttctttaagtgcagagttcatttttgcccctgaaaagtttttgctgagtttgctgaagaaattgtatttcaaccacatccatgaaaataaaacacctcctgttgtggatggtgagcccctgatgccgcttatttgccgtgagtttggacggcacccctgctggcggatagcaagactctgtggagtttgttcagtggtacggtgtccaagcaaacagcagaatgcaactttctaaacagccccaagcaaacagcagaattcaactttttaaacaataaacaccatcaaccttattgactttattgtcccttaaattatattgactgttgtgattccatcaagtttgtacactcttttctctccctgttttgcagcaacaaattgcgaagtgcttttgtttgtttgttttcgtttggttaaagcttattgccatgctggtgcggctatggagactgtctggaaggcttggaatggtttattgcttatggtaaaatttgcctgatttcttacaggcagcgtttggaaaccttttattatatagttgtttacatacttataagtctatcatttaaagacatgtactgaaacaaatgtatttgtttcataagcatcttcctgtaatctattataaaattgaaattaaatatagagaatgttttaacaattttttaactcaaaatttgtcaatcatttttaatagttctttttttataaaaagaaaaaggaatttaaggacaggcagtagtctcttttaaaatttattcacaaaacccattaactgcacagttgctattagctgcctgttctaaaacgatagtctttttattgaaacacaaataaacttttctgtaatattttatggtatataaagagactttaattgtttgacttgtttaacttggcactgttagtttttattaataaaacgcgcatgggcattttaaataaataaaaaaataaaagaaaaggg

SEQ ID NO: 457856 - DNA, 2907 bp, Homo sapiens
gtgtgtcggtggccggctggccctgctgctccgcatgccggttacactgcaccaggttcttgaaggcaattagctgtagaattaagttcttagaaattctcactgtctctgtcttattctatcaagtctcctctgtcttaccacctctcagttctgacgttcttgagccgagttggtgggcagaccacgccacttgatctccttcttctccttggctgattaattcttggccattagcgcgttgtacggcttcgtagacccgctgtcttatgtttgtctggtcttaagcctgttcgttgggaagatgtggttgtcggcagcactgaactccgcaaccagctcgtctgccacttcgttgtaggaagtggtccctttcctctgcaccttctcgcagaccttcatggagaaatgccgtaggcccttgccattcttctctcctttcctgtagcattgatttcccggatctggtaacatggcaaaagatgccggtctaattgaagccaacggagaactcaaggtcttcatagaccagaaccttagtcccgggaaaggcgtggtgtccctcgtggccgttcacccctccaccgtcaacccgctcgggaagcagctcttgccaaaaacctttggacagtccaatgtcaacattgcccagcaagtggtaattggtacgcctcagagaccggcagcgtcaaacaccctggtggtaggaagcccacacacccccagcactcactttgcctctcagaaccagccttccgactcctcaccttggtctgccgggaagcgcaacaggaaaggagagaagaatggcaagggcctacggcatttctccatgaaggtctgcgagaaggtgcagaggaaagggaccacttcctacaacgaagtggcagacgagctggttgcggagttcagtgctgccgacaaccacatcttaccaaacgagtcagcttatgaccagaaaaacataagacggcgcgtctacgatgccttaaacgtgctaatggccatgaacatcatctccaaggagaagaaggagatcaagtggattggtctgcccaccaactcggctcaggaatgtcagaacttagaggtggaaagacagaggagacttgaaagaataaaacagaaacagtctcaacttcaagaacttattctacagcaaattgccttcaagaacctggtgcagagaaaccggcatgcggagcagcaggccagccggccaccgccacccaactcagtcatccacctgcccttcatcatcgtcaacaccagcaagaagacggtcatcgactgcagcatctccaatgacaaatttgagtatctgtttaattttgacaacacatttgaaatccacgatgacatagaagtgctgaagcggatgggcatggcttgcgggctggagtcggggagctgctctgccgaagaccttaaaatggccagaagtctggtccccaaggctctggagccatacgtgacagaaatggctcagggaactgttggaggcgtgttcatcacgacggcaggttccacgtctaacggcacaaggttctctgccagtgacctgaccaacggtgcagatgggatgctggccacaagctccaatgggtctcagtacagcggctccagggtggagactccggtgtcctacgtcggggaggacgacgaggaggacgatgacttcaacgagaatgacgaggacgactgacgtcctccccacttcagattcggcttcaggaaaacgtttagcgaaaagaaactttttttttaatgtgggttttctgtttccttttggcctactcccaagaagatattggtaagctattgaatttagatatgcacctctgataagcaaggattgtttcccgtaggattaggacgtgctgtggatgtgtgttttgataccagtgtgctgatgcagagcgtttatttacttgttaggattttgtgttttcatttgctatttttctttaagtgcagagttcatttttgcccctgaaaagtttttgctgagtttgctgaagaaattgtatttcaaccacatccatgaaaataaaacacctcctgttgtggatggtgagcccctgatgccgcttatttgccgtgagtttggacggcacccctgctggcggatagcaagactctgtggagtttgttcagtggtacggtgtccaagcaaacagcagaatgcaactttctaaacagccccaagcaaacagcagaattcaactttttaaacaataaacaccatcaaccttattgactttattgtcccttaaattatattgactgttgtgattccatcaagtttgtacactcttttctctccctgttttgcagcaacaaattgcgaagtgcttttgtttgtttgttttcgtttggttaaagcttattgccatgctggtgcggctatggagactgtctggaaggcttggaatggtttattgcttatggtaaaatttgcctgatttcttacaggcagcgtttggaaaccttttattatatagttgtttacatacttataagtctatcatttaaagacatgtactgaaacaaatgtatttgtttcataagcatcttcctgtaatctattataaaattgaaattaaatatagagaatgttttaacaattttttaactcaaaatttgtcaatcatttttaatagttctttttttataaaaagaaaaaggaatttaaggacaggcagtagtctcttttaaaatttattcacaaaacccattaactgcacagttgctattagctgcctgttctaaaacgatagtctttttattgaaacacaaataaacttttctgtaatattttatggtatataaagagactttaattgtttgacttgtttaacttggcactgttagtttttattaataaaacgcgcatgggcattttaa

SEQ ID NO: 457857 - DNA, 2688 bp, Homo sapiens
gcgggaggagcgggagaccgaggagcagcagaagaggaggaggagggcgccgaaggcgcgaaaaggcgcgcaggcgcgctgcgcggagcgggcccgccgccgcccacgtcaccgcgccgcgcgcacgtcacgccggcccgacgctcggccagggtgagccccgcgtcccggcgccactcggcccagggcagggaccccgccacggccgggaccgcccggcccggccccagcccgcgcctctccgcgccgccccgcgctccgcaccgcgccctctccgcgtccccgcccgcgcggccggaccgggcagccagaaaaatcatttttcttctctgggaaggtgaacatttgtagcattgatttcccggatctggtaacatggcaaaagatgccggtctaattgaagccaacggagaactcaaggtcttcatagaccagaaccttagtcccgggaaaggcgtggtgtccctcgtggccgttcacccctccaccgtcaacccgctcgggaagcagctcttgccaaaaacctttggacagtccaatgtcaacattgcccagcaagtggaagcgcaacaggaaaggagagaagaatggcaagggcctacggcatttctccatgaaggtctgcgagaaggtgcagaggaaagggaccacttcctacaacgaagtggcagacgagctggttgcggagttcagtgctgccgacaaccacatcttaccaaacgagtcagcttatgaccagaaaaacataagacggcgcgtctacgatgccttaaacgtgctaatggccatgaacatcatctccaaggagaagaaggagatcaagtggattggtctgcccaccaactcggctcaggaatgtcagaacttagaggtggaaagacagaggagacttgaaagaataaaacagaaacagtctcaacttcaagaacttattctacagcaaattgccttcaagaacctggtgcagagaaaccggcatgcggagcagcaggccagccggccaccgccacccaactcagtcatccacctgcccttcatcatcgtcaacaccagcaagaagacggtcatcgactgcagcatctccaatgacaaatttgagtatctgtttaattttgacaacacatttgaaatccacgatgacatagaagtgctgaagcggatgggcatggcttgcgggctggagtcggggagctgctctgccgaagaccttaaaatggccagaagtctggtccccaaggctctggagccatacgtgacagaaatggctcagggaactgttggaggcgtgttcatcacgacggcaggttccacgtctaacggcacaaggttctctgccagtgacctgaccaacggtgcagatgggatgctggccacaagctccaatgggtctcagtacagcggctccagggtggagactccggtgtcctacgtcggggaggacgacgaggaggacgatgacttcaacgagaatgacgaggacgactgacgtcctccccacttcagattcggcttcaggaaaacgtttagcgaaaagaaactttttttttaatgtgggttttctgtttccttttggcctactcccaagaagatattggtaagctattgaatttagatatgcacctctgataagcaaggattgtttcccgtaggattaggacgtgctgtggatgtgtgttttgataccagtgtgctgatgcagagcgtttatttacttgttaggattttgtgttttcatttgctatttttctttaagtgcagagttcatttttgcccctgaaaagtttttgctgagtttgctgaagaaattgtatttcaaccacatccatgaaaataaaacacctcctgttgtggatggtgagcccctgatgccgcttatttgccgtgagtttggacggcacccctgctggcggatagcaagactctgtggagtttgttcagtggtacggtgtccaagcaaacagcagaatgcaactttctaaacagccccaagcaaacagcagaattcaactttttaaacaataaacaccatcaaccttattgactttattgtcccttaaattatattgactgttgtgattccatcaagtttgtacactcttttctctccctgttttgcagcaacaaattgcgaagtgcttttgtttgtttgttttcgtttggttaaagcttattgccatgctggtgcggctatggagactgtctggaaggcttggaatggtttattgcttatggtaaaatttgcctgatttcttacaggcagcgtttggaaaccttttattatatagttgtttacatacttataagtctatcatttaaagacatgtactgaaacaaatgtatttgtttcataagcatcttcctgtaatctattataaaattgaaattaaatatagagaatgttttaacaattttttaactcaaaatttgtcaatcatttttaatagttctttttttataaaaagaaaaaggaatttaaggacaggcagtagtctcttttaaaatttattcacaaaacccattaactgcacagttgctattagctgcctgttctaaaacgatagtctttttattgaaacacaaataaacttttctgtaatattttatggtatataaagagactttaattgtttgacttgtttaacttggcactgttagtttttattaataaaacgcgcatgggcattttaa

SEQ ID NO: 457858 - DNA, 2448 bp, Homo sapiens
gcgggaggagcgggagaccgaggagcagcagaagaggaggaggagggcgccgaaggcgcgaaaaggcgcgcaggcgcgctgcgcggagcgggcccgccgccgcccacgtcaccgcgccgcgcgcacgtcacgccggcccgacgctcggccagggtgagccccgcgtcccggcgccactcggcccagggcagggaccccgccacggccgggaccgcccggcccggccccagcccgcgcctctccgcgccgccccgcgctccgcaccgcgccctctccgcgtccccgcccgcgcggccggaccgggcagccagaaaaatcatttttcttctctgggaaggtgaacatttgtagcattgatttcccggatctggtaacatggcaaaagatgccggtctaattgaagccaacggagaactcaaggtcttcatagaccagaaccttagtcccgggaaaggcgtggtgtccctcgtggccgttcacccctccaccgtcaacccgctcgggaagcagctcttgccaaaaacctttggacagtccaatgtcaacattgcccagcaagtggtaattggtacgcctcagagaccggcagcgtcaaacaccctggtggtaggaagcccacacacccccagcactcactttgcctctcagaaccagccttccgactcctcaccttggtctgccgggaagcgcaacaggaaaggagagaagaatggcaagggcctacggcatttctccatgaaggtctgcgagaaggtgcagaggaaagggaccacttcctacaacgaagtggcagacgagctggttgcggagttcagtgctgccgacaaccacatcttaccaaacgagtcagcttatgaccagaaaaacataagacggcgcgtctacgatgccttaaacgtgctaatggccatgaacatcatctccaaggagaagaaggagatcaagtggattggtctgcccaccaactcggctcaggaatgtcagaacttagaggtggaaagacagaggagacttgaaagaataaaacagaaacagtctcaacttcaagaacttattctacagcaaattgccttcaagaacctggtgcagagaaaccggcatgcggagcagcaggccagccggccaccgccacccaactcagtcatccacctgcccttcatcatcgtcaacaccagcaagaagacggtcatcgactgcagcatctccaatgacaaatttgagtatctgtttaattttgacaacacatttgaaatccacgatgacatagaagtgctgaagcggatgggcatggcttgcgggctggagtcggggagctgctctgccgaagaccttaaaatggccagaagtctggtccccaaggctctggagccatacgtgacagaaatggctcagggaactgttggaggcgtgttcatcacgacggcaggttccacgtctaacggcacaaggttctctgccagtgacctgaccaacggtgcagatgggatgctggccacaagctccaatgggtctcagtacagcggctccagggtggagactccggtgtcctacgtcggggaggacgacgaggaggacgatgacttcaacgagaatgacgaggacgactgacgtcctccccacttcagattcggcttcaggaaaacgtttagcgaaaagaaactttttttttaatgtgggttttctgtttccttttggcctactcccaagaagatattggtaagctattgaatttagatatgcacctctgataagcaaggattgtttcccgtaggattaggacgtgctgtggatgtgtgttttgataccagtgtgctgatgcagagcgtttatttacttgttaggattttgtgttttcatttgctatttttctttaagtgcagagttcatttttgcccctgaaaagtttttgctgagtttgctgaagaaattgtatttcaaccacatccatgaaaataaaacacctcctgttgtggatggtgagcccctgatgccgcttatttgccgtgagtttggacggcacccctgctggcggatagcaagactctgtggagtttgttcagtggtacggtgtccaagcaaacagcagaatgcaactttctaaacagccccaagcaaacagcagaattcaactttttaaacaataaacaccatcaaccttattgactttattgtcccttaaattatattgactgttgtgattccatcaagtttgtacactcttttctctccctgttttgcagcaacaaattgcgaagtgcttttgtttgtttgttttcgtttggttaaagcttattgccatgctggtgcggctatggagactgtctggaaggcttggaatggtttatgctgtaatagtttatgctgtaatagtttatgctgtaatagtttatgctgtaatagtatatgctgaatagttatgctgtatcgtttatactgtatatcctttca

SEQ ID NO: 457859 - DNA, 2731 bp, Homo sapiens
gcgggaggagcgggagaccgaggagcagcagaagaggaggaggagggcgccgaaggcgcgaaaaggcgcgcaggcgcgctgcgcggagcgggcccgccgccgcccacgtcaccgcgccgcgcgcacgtcacgccggcccgacgctcggccagggtgagccccgcgtcccggcgccactcggcccagggcagggaccccgccacggccgggaccgcccggcccggccccagcccgcgcctctccgcgccgccccgcgctccgcaccgcgccctctccgcgtccccgcccgcgcggccggaccgggcagccagaaaaatcatttttcttctctgggaaggtgaacatttgtagcattgatttcccggatctggtaacatggcaaaagatgccggtctaattgaagccaacggagaactcaaggtcttcatagaccagaaccttagtcccgggaaaggcgtggtgtccctcgtggccgttcacccctccaccgtcaacccgctcgggaagcagctcttgccaaaaacctttggacagtccaatgtcaacattgcccagcaagtggtaattggtacgcctcagagaccggcagcgtcaaacaccctggtggtaggaagcccacacacccccagcactcactttgcctctcagaaccagccttccgactcctcaccttggtctgccgggaagcgcaacaggaaaggagagaagaatggcaagggcctacggcatttctccatgaaggtctgcgagaaggtgcagaggaaagggaccacttcctacaacgaagtggcagacgagctggttgcggagttcagtgctgccgacaaccacatcttaccaaacgagtcagcttatgaccagaaaaacataagacggcgcgtctacgatgccttaaacgtgctaatggccatgaacatcatctccaaggagaagaaggagatcaagtggattggtctgcccaccaactcggctcaggaatgtcagaacttagaggtggaaagacagaggagacttgaaagaataaaacagaaacagtctcaacttcaagaacttattctacagcaaattgccttcaagaacctggtgcagagaaaccggcatgcggagcagcaggccagccggccaccgccacccaactcagtcatccacctgcccttcatcatcgtcaacaccagcaagaagacggtcatcgactgcagcatctccaatgacaaatttgagtatctgtttaattttgacaacacatttgaaatccacgatgacatagaagtgctgaagcggatgggcatggcttgcgggctggagtcggggagctgctctgccgaagaccttaaaatggccagaagtctggtccccaaggctctggagccatacgtgacagtgacctgaccaacggtgcagatgggatgctggccacaagctccaatgggtctcagtacagcggctccagggtggagactccggtgtcctacgtcggggaggacgacgaggaggacgatgacttcaacgagaatgacgaggacgactgacgtcctccccacttcagattcggcttcaggaaaacgtttagcgaaaagaaactttttttttaatgtgggttttctgtttccttttggcctactcccaagaagatattggtaagctattgaatttagatatgcacctctgataagcaaggattgtttcccgtaggattaggacgtgctgtggatgtgtgttttgataccagtgtgctgatgcagagcgtttatttacttgttaggattttgtgttttcatttgctatttttctttaagtgcagagttcatttttgcccctgaaaagtttttgctgagtttgctgaagaaattgtatttcaaccacatccatgaaaataaaacacctcctgttgtggatggtgagcccctgatgccgcttatttgccgtgagtttggacggcacccctgctggcggatagcaagactctgtggagtttgttcagtggtacggtgtccaagcaaacagcagaatgcaactttctaaacagccccaagcaaacagcagaattcaactttttaaacaataaacaccatcaaccttattgactttattgtcccttaaattatattgactgttgtgattccatcaagtttgtacactcttttctctccctgttttgcagcaacaaattgcgaagtgcttttgtttgtttgttttcgtttggttaaagcttattgccatgctggtgcggctatggagactgtctggaaggcttggaatggtttattgcttatggtaaaatttgcctgatttcttacaggcagcgtttggaaaccttttattatatagttgtttacatacttataagtctatcatttaaagacatgtactgaaacaaatgtatttgtttcataagcatcttcctgtaatctattataaaattgaaattaaatatagagaatgttttaacaattttttaactcaaaatttgtcaatcatttttaatagttctttttttataaaaagaaaaaggaatttaaggacaggcagtagtctcttttaaaatttattcacaaaacccattaactgcacagttgctattagctgcctgttctaaaacgatagtctttttattgaaacacaaataaacttttctgtaatattttatggtatataaagagactttaattgtttgacttgtttaacttggcactgttagtttttattaataaaacgcgcatgggcattttaa

SEQ ID NO: 457860 - DNA, 2599 bp, Homo sapiens
gcgggaggagcgggagaccgaggagcagcagaagaggaggaggagggcgccgaaggcgcgaaaaggcgcgcaggcgcgctgcgcggagcgggcccgccgccgcccacgtcaccgcgccgcgcgcacgtcacgccggcccgacgctcggccagggtgagccccgcgtcccggcgccactcggcccagggcagggaccccgccacggccgggaccgcccggcccggccccagcccgcgcctctccgcgccgccccgcgctccgcaccgcgccctctccgcgtccccgcccgcgcggccggaccgggcagccagaaaaatcatttttcttctctgggaaggtgaacatttgtagcattgatttcccggatctggtaacatggcaaaagatgccggtctaattgaagccaacggagaactcaaggtcttcatagaccagaaccttagtcccgggaaaggcgtggtgtccctcgtggccgttcacccctccaccgtcaacccgctcgggaagcagctcttgccaaaaacctttggacagtccaatgtcaacattgcccagcaagtggtaattggtacgcctcagagaccggcagcgtcaaacaccctggtggtaggaagcccacacacccccagcactcactttgcctctcagaaccagccttccgactcctcaccttggtctgccgggaagcgcaacaggaaaggagagaagaatggcaagggcctacggcatttctccatgaaggtctgcccaccaactcggctcaggaatgtcagaacttagaggtggaaagacagaggagacttgaaagaataaaacagaaacagtctcaacttcaagaacttattctacagcaaattgccttcaagaacctggtgcagagaaaccggcatgcggagcagcaggccagccggccaccgccacccaactcagtcatccacctgcccttcatcatcgtcaacaccagcaagaagacggtcatcgactgcagcatctccaatgacaaatttgagtatctgtttaattttgacaacacatttgaaatccacgatgacatagaagtgctgaagcggatgggcatggcttgcgggctggagtcggggagctgctctgccgaagaccttaaaatggccagaagtctggtccccaaggctctggagccatacgtgacagaaatggctcagggaactgttggaggcgtgttcatcacgacggcaggttccacgtctaacggcacaaggttctctgccagtgacctgaccaacggtgcagatgggatgctggccacaagctccaatgggtctcagtacagcggctccagggtggagactccggtgtcctacgtcggggaggacgacgaggaggacgatgacttcaacgagaatgacgaggacgactgacgtcctccccacttcagattcggcttcaggaaaacgtttagcgaaaagaaactttttttttaatgtgggttttctgtttccttttggcctactcccaagaagatattggtaagctattgaatttagatatgcacctctgataagcaaggattgtttcccgtaggattaggacgtgctgtggatgtgtgttttgataccagtgtgctgatgcagagcgtttatttacttgttaggattttgtgttttcatttgctatttttctttaagtgcagagttcatttttgcccctgaaaagtttttgctgagtttgctgaagaaattgtatttcaaccacatccatgaaaataaaacacctcctgttgtggatggtgagcccctgatgccgcttatttgccgtgagtttggacggcacccctgctggcggatagcaagactctgtggagtttgttcagtggtacggtgtccaagcaaacagcagaatgcaactttctaaacagccccaagcaaacagcagaattcaactttttaaacaataaacaccatcaaccttattgactttattgtcccttaaattatattgactgttgtgattccatcaagtttgtacactcttttctctccctgttttgcagcaacaaattgcgaagtgcttttgtttgtttgttttcgtttggttaaagcttattgccatgctggtgcggctatggagactgtctggaaggcttggaatggtttattgcttatggtaaaatttgcctgatttcttacaggcagcgtttggaaaccttttattatatagttgtttacatacttataagtctatcatttaaagacatgtactgaaacaaatgtatttgtttcataagcatcttcctgtaatctattataaaattgaaattaaatatagagaatgttttaacaattttttaactcaaaatttgtcaatcatttttaatagttctttttttataaaaagaaaaaggaatttaaggacaggcagtagtctcttttaaaatttattcacaaaacccattaactgcacagttgctattagctgcctgttctaaaacgatagtctttttattgaaacacaaataaacttttctgtaatattttatggtatataaagagactttaattgtttgacttgtttaacttggcactgttagtttttattaataaaacgcgcatgggcattttaa

SEQ ID NO: 457861 - DNA, 2161 bp, Homo sapiens
tctgcgttccactttccagggtgggcaaagtccacggcacggcaccccctccaaggccatcaccctgtaggtgccatggtggtaggtggtcttagaggggtgaaggacagcaaggaatcgacttccaaaattggtgttttgttgagcgccgttgccgtggaggacacttttatcagggcacggatggctgtgcgcccgctttcccttagttctcccctcaggatcccgtttcctgagcgcttttctccctgggctgcagaggtcagcacccagcggccggcgctggcatttcagatgtccaggccaactcctcgctgtcacgtggacgcagggagggctgtgaggacccctcgagcacaggggctgcgttcttgtgccgccacgggccacctggctcctcttattttttttagcaaattgccttcaagaacctggtgcagagaaaccggcatgcggagcagcaggccagccggccaccgccacccaactcagtcatccacctgcccttcatcatcgtcaacaccagcaagaagacggtcatcgactgcagcatctccaatgacaaatttgagtatctgtttaattttgacaacacatttgaaatccacgatgacatagaagtgctgaagcggatgggcatggcttgcgggctggagtcggggagctgctctgccgaagaccttaaaatggccagaagtctggtccccaaggctctggagccatacgtgacagaaatggctcagggaactgttggaggcgtgttcatcacgacggcaggttccacgtctaacggcacaaggttctctgccagtgacctgaccaacggtgcagatgggatgctggccacaagctccaatgggtctcagtacagcggctccagggtggagactccggtgtcctacgtcggggaggacgacgaggaggacgatgacttcaacgagaatgacgaggacgactgacgtcctccccacttcagattcggcttcaggaaaacgtttagcgaaaagaaactttttttttaatgtgggttttctgtttccttttggcctactcccaagaagatattggtaagctattgaatttagatatgcacctctgataagcaaggattgtttcccgtaggattaggacgtgctgtggatgtgtgttttgataccagtgtgctgatgcagagcgtttatttacttgttaggattttgtgttttcatttgctatttttctttaagtgcagagttcatttttgcccctgaaaagtttttgctgagtttgctgaagaaattgtatttcaaccacatccatgaaaataaaacacctcctgttgtggatggtgagcccctgatgccgcttatttgccgtgagtttggacggcacccctgctggcggatagcaagactctgtggagtttgttcagtggtacggtgtccaagcaaacagcagaatgcaactttctaaacagccccaagcaaacagcagaattcaactttttaaacaataaacaccatcaaccttattgactttattgtcccttaaattatattgactgttgtgattccatcaagtttgtacactcttttctctccctgttttgcagcaacaaattgcgaagtgcttttgtttgtttgttttcgtttggttaaagcttattgccatgctggtgcggctatggagactgtctggaaggcttggaatggtttattgcttatggtaaaatttgcctgatttcttacaggcagcgtttggaaaccttttattatatagttgtttacatacttataagtctatcatttaaagacatgtactgaaacaaatgtatttgtttcataagcatcttcctgtaatctattataaaattgaaattaaatatagagaatgttttaacaattttttaactcaaaatttgtcaatcatttttaatagttctttttttataaaaagaaaaaggaatttaaggacaggcagtagtctcttttaaaatttattcacaaaacccattaactgcacagttgctattagctgcctgttctaaaacgatagtctttttattgaaacacaaataaacttttctgtaatattttatggtatataaagagactttaattgtttgacttgtttaacttggcactgttagtttttattaataaaacgcgcatgggcattttaa

SEQ ID NO: 457862 - DNA, 1521 bp, Homo sapiens
agcttttgttgaaggagctttttttctgttctggtgaattctttccttgggggccgtagggtcccagccactgacagcaggatggctttaagaaatggctcagggaactgttggaggcgtgttcatcacgacggcaggttccacgtctaacggcacaaggttctctgccagtgacctgaccaacggtgcagatgggatgctggccacaagctccaatgggtctcagtacagcggctccagggtggagactccggtgtcctacgtcggggaggacgacgaggaggacgatgacttcaacgagaatgacgaggacgactgacgtcctccccacttcagattcggcttcaggaaaacgtttagcgaaaagaaactttttttttaatgtgggttttctgtttccttttggcctactcccaagaagatattggtaagctattgaatttagatatgcacctctgataagcaaggattgtttcccgtaggattaggacgtgctgtggatgtgtgttttgataccagtgtgctgatgcagagcgtttatttacttgttaggattttgtgttttcatttgctatttttctttaagtgcagagttcatttttgcccctgaaaagtttttgctgagtttgctgaagaaattgtatttcaaccacatccatgaaaataaaacacctcctgttgtggatggtgagcccctgatgccgcttatttgccgtgagtttggacggcacccctgctggcggatagcaagactctgtggagtttgttcagtggtacggtgtccaagcaaacagcagaatgcaactttctaaacagccccaagcaaacagcagaattcaactttttaaacaataaacaccatcaaccttattgactttattgtcccttaaattatattgactgttgtgattccatcaagtttgtacactcttttctctccctgttttgcagcaacaaattgcgaagtgcttttgtttgtttgttttcgtttggttaaagcttattgccatgctggtgcggctatggagactgtctggaaggcttggaatggtttattgcttatggtaaaatttgcctgatttcttacaggcagcgtttggaaaccttttattatatagttgtttacatacttataagtctatcatttaaagacatgtactgaaacaaatgtatttgtttcataagcatcttcctgtaatctattataaaattgaaattaaatatagagaatgttttaacaattttttaactcaaaatttgtcaatcatttttaatagttctttttttataaaaagaaaaaggaatttaaggacaggcagtagtctcttttaaaatttattcacaaaacccattaactgcacagttgctattagctgcctgttctaaaacgatagtctttttattgaaacacaaataaacttttctgtaatattttatggtatataaagagactttaattgtttgacttgtttaacttggcactgttagtttttattaataaaacgcgcatgggcattttaa

SEQ ID NO: 457863 - DNA, 2216 bp, Homo sapiens
gtctgtaaacatgtttaatgctgcttcttccatgaggtgggatgtgggtatttttaggacttttatcatcacataatcctttttatggatgtgattcttcagacttgtcagtttttcataacaatggaaacaaagctattaccatttcttacgaaataccgattttcatagtggcatgatgagacattttatacaagtacctcatgaaaggacatctaggtagttcccagttagaataaaaactgcagtgagcagctttacagctgaatttctcgccatttctgacttgtttccaagatacagaattacttcatcaaaaggcacattaacacatttttattgtagtgttaataaataccattaaaatgtattaaaatatgtacatatggttttatgttaattgaaaacatctttaaacattaggaacgtagtgagctctggttggtggtaggtttttgtggtgctgccagccctctgggttctcagtccccgctgccagattcgacccacgctctggactccatcctgtcctgccccgggctctcttttttcctgttgctggttatgagtgaaagtcccggagggagggatctaatggttttacagtttgttccctctggggcactgctcctgatggaatgatgagtgagggagaggcagcgtgtggctctgctcagcctcctgtttctgtcgttatgggttccaggagacagggccagaagagaaccagacagagatggagtaagtgccagagcgttggcgtgctgtagtgcagacactcagcctccccgttctgtttgtgtgactgacggggaggctgggtgggccgcctgcactgacggcgccatccgcctcctgccttgcagtgacctgaccaacggtgcagatgggatgctggccacaagctccaatgggtctcagtacagcggctccagggtggagactccggtgtcctacgtcggggaggacgacgaggaggacgatgacttcaacgagaatgacgaggacgactgacgtcctccccacttcagattcggcttcaggaaaacgtttagcgaaaagaaactttttttttaatgtgggttttctgtttccttttggcctactcccaagaagatattggtaagctattgaatttagatatgcacctctgataagcaaggattgtttcccgtaggattaggacgtgctgtggatgtgtgttttgataccagtgtgctgatgcagagcgtttatttacttgttaggattttgtgttttcatttgctatttttctttaagtgcagagttcatttttgcccctgaaaagtttttgctgagtttgctgaagaaattgtatttcaaccacatccatgaaaataaaacacctcctgttgtggatggtgagcccctgatgccgcttatttgccgtgagtttggacggcacccctgctggcggatagcaagactctgtggagtttgttcagtggtacggtgtccaagcaaacagcagaatgcaactttctaaacagccccaagcaaacagcagaattcaactttttaaacaataaacaccatcaaccttattgactttattgtcccttaaattatattgactgttgtgattccatcaagtttgtacactcttttctctccctgttttgcagcaacaaattgcgaagtgcttttgtttgtttgttttcgtttggttaaagcttattgccatgctggtgcggctatggagactgtctggaaggcttggaatggtttattgcttatggtaaaatttgcctgatttcttacaggcagcgtttggaaaccttttattatatagttgtttacatacttataagtctatcatttaaagacatgtactgaaacaaatgtatttgtttcataagcatcttcctgtaatctattataaaattgaaattaaatatagagaatgttttaacaattttttaactcaaaatttgtcaatcatttttaatagttctttttttataaaaagaaaaaggaatttaaggacaggcagtagtctcttttaaaatttattcacaaaacccattaactgcacagttgctattagctgcctgttctaaaacgatagtctttttattgaaacacaaataaacttttctgtaatattttatggtatataaagagactttaattgtttgacttgtttaacttggcactgttagtttttattaataaaacgcgcatgggcattttaa

SEQ ID NO: 457864 - DNA, 1705 bp, Homo sapiens
acctgtcagagttaccggtcagccgggcgggcgccgccggggtctggggtggacgccgcgagcctgcacgttgcgccgggaccccggggctgtgcccaggtgggtggtggggcacccccctgcagcggcgggagggaggcgctgcgccctggctcctggggctcggccccaccctcggccgctgggcgggccgtcggggacctgggggtagtggtggtgaccctgcgggcccgcgggccacttttccgcagggggcatttccgtctggcgaggcgactgaaaatcctgagtgtgggagtcggtttggccagctccgctctcaggatggagggtgcctttgggaaggaagaaaaatcatttttcttctctgggaaggtgaacatttgtagcattgatttcccggatctggtaacatggcaaaagatgccggtctaattgaagccaacggagaactcaaggtcttcatagaccagaaccttagtcccgggaaaggcgtggtgtccctcgtggccgttcacccctccaccgtcaacccgctcgggaagcagctcttgccaaaaacctttggacagtccaatgtcaacattgcccagcaagtggtaattggtacgcctcagagaccggcagcgtcaaacaccctggtggtaggaagcccacacacccccagcactcactttgcctctcagaaccagccttccgactcctcaccttggtctgccgggaagcgcaacaggaaaggagagaagaatggcaagggcctacggcatttctccatgaaggtctgcgagaaggtgcagaggaaagggaccacttcctacaacgaagtggcagacgagctggttgcggagttcagtgctgccgacaaccacatcttaccaaacgagtcagcttatttgccgtgagtttggacggcacccctgctggcggatagcaagactctgtggagtttgttcagtggtacggtgtccaagcaaacagcagaatgcaactttctaaacagccccaagcaaacagcagaattcaactttttaaacaataaacaccatcaaccttattgactttattgtcccttaaattatattgactgttgtgattccatcaagtttgtacactcttttctctccctgttttgcagcaacaaattgcgaagtgcttttgtttgtttgttttcgtttggttaaagcttattgccatgctggtgcggctatggagactgtctggaaggcttggaatggtttattgcttatggtaaaatttgcctgatttcttacaggcagcgtttggaaaccttttattatatagttgtttacatacttataagtctatcatttaaagacatgtactgaaacaaatgtatttgtttcataagcatcttcctgtaatctattataaaattgaaattaaatatagagaatgttttaacaattttttaactcaaaatttgtcaatcatttttaatagttctttttttataaaaagaaaaaggaatttaaggacaggcagtagtctcttttaaaatttattcacaaaacccattaactgcacagttgctattagctgcctgttctaaaacgatagtctttttattgaaacacaaataaacttttctgtaatattttatggtatataaagagactttaattgtttgacttgtttaacttggcactgttagtttttattaataaaacgcgcatgggcattttaa

SEQ ID NO: 457865 - DNA, 2449 bp, Homo sapiens
gcgggaggagcgggagaccgaggagcagcagaagaggaggaggagggcgccgaaggcgcgaaaaggcgcgcaggcgcgctgcgcggagcgggcccgccgccgcccacgtcaccgcgccgcgcgcacgtcacgccggcccgacgctcggccagggtgagccccgcgtcccggcgccactcggcccagggcagggaccccgccacggccgggaccgcccggcccggccccagcccgcgcctctccgcgccgccccgcgctccgcaccgcgccctctccgcgtccccgcccgcgcggccggaccgggcagccagaaaaatcatttttcttctctgggaaggtgaacatttgtagcattgatttcccggatctggtaacatggcaaaagatgccggtctaattgaagccaacggagaactcaaggtcttcatagaccagaaccttagtcccgggaaaggcgtggtgtccctcgtggccgttcacccctccaccgtcaacccgctcgggaagcagctcttgccaaaaacctttggacagtccaatgtcaacattgcccagcaagtggtaattggtacgcctcagagaccggcagcgtcaaacaccctggtggtaggaagcccacacacccccagcactcactttgcctctcagaaccagccttccgactcctcaccttggtctgccgggaagcgcaacaggaaaggagagaagaatggcaagggcctacggcatttctccatgaaggtctgcgagaaggtgcagaggaaagggaccacttcctacaacgaagtggcagacgagctggttgcggagttcagtgctgccgacaaccacatcttaccaaacgagtcagcttatgaccagaaaaacataagacggcgcgtctacgatgccttaaacgtgctaatggccatgaacatcatctccaaggagaagaaggagatcaagtggattggtctgcccaccaactcggctcaggaatgtcagaacttagaggtggaaagacagaggagacttgaaagaataaaacagaaacagtctcaacttcaagaacttattctacagcaaattgccttcaagaacctggtgcagagaaaccggcatgcggagcagcaggccagccggccaccgccacccaactcagtcatccacctgcccttcatcatcgtcaacaccagcaagaagacggtcatcgactgcagcatctccaatgacaaatttgagtatctgtttaattttgacaacacatttgaaatccacgatgacatagaagtgctgaagcggatgggcatggcttgcgggctggagtcggggagctgctctgccgaagaccttaaaatggccagaagtctggtccccaaggctctggagccatacgtgacagaaatggctcagggaactgttggaggcgtgttcatcacgacggcaggttccacgtctaacggcacaaggttctctgccagaggtgacagtcgttgagggtgtgggagaggcgtcatctgggcctcccccggggtccaggggccaaggcagggcagccgtctcaggtgtggccatcaggtctgtggctgctctgacgtggcttgtctgtccaggcagtggggccccgctggctttccctgtgtggagagctgcttttcttagttggtttctgctcactaaaaactgaaagtaatacatggtggtttttttttcatagtatcacctaataagtaaagtaggaatgaaaaccacccaaatcctcctgtccccggcagcccaagtaacagcaagtatttccaggttttttttcccatttttcagaacgcgtctgcggtcacagcgcacgtatttttcagaacgcgtctgcggtctgggcgcaagtagttttcagaacgtgtctgcgatcacagcacacatttttcagaacgcatctgcggtcatggtgcatgtgtttttcagaatgcatctatggtcatagcgcatgtatttttcagaacgtctgccatcacggcgcacgtgtttttcagaacgcgtctgcggtctcggcgcacgtgctgcgatcacagtgcatgtatttttgcgaacgcgtctgtgattatggtacacgtatttttcagaacgcgtctgcaatcacagcgcacgtatttttcagaacgcgtctgtggtcacagcacacatattttgttccgtgcatttttcagcttacattttattgtatgaatatatattgtttctatgctattaaagggcctttatttaaataaatttgtatttaatctttgacctgcaatcccacagagtagaatggtgtccctaggtattgatcttagtgcttcaaagataaatataacttttatggtaaatattaacaaaacaatgattttattaacttttatattgcattgtgatacaatatatagtattactttatattaatcttaagtgttaataaaatctttaattagaaaaa

SEQ ID NO: 457866 - DNA, 602 bp, Homo sapiens
gcgggaggagcgggagaccgaggagcagcagaagaggaggaggagggcgccgaaggcgcgaaaaggcgcgcaggcgcgctgcgcggagcgggcccgccgccgcccacgtcaccgcgccgcgcgcacgtcacgccggcccgacgctcggccagggtgagccccgcgtcccggcgccactcggcccagggcagggaccccgccacggccgggaccgcccggcccggccccagcccgcgcctctccgcgccgccccgcgctccgcaccgcgccctctccgcgtccccgcccgcgcggccggaccgggcagccagaaaaatcatttttcttctctgggaaggtgaacatttgtagcattgatttcccggatctggtaacatggcaaaagatacttttaaagcgtctgaagcgggatgaaggtgaaagatggaaggatctgatctctgaagctgcggtcaccacccacaagttgtggccttggataccacactgcagttgggtggtgatggggtggtgccttctgactttttccttatctttaccgactgtgttaattgataattttaaataaacgccttaattaaattgaggtggagggtgttgca

SEQ ID NO: 457867 - DNA, 2810 bp, Homo sapiens
gcgggaggagcgggagaccgaggagcagcagaagaggaggaggagggcgccgaaggcgcgaaaaggcgcgcaggcgcgctgcgcggagcgggcccgccgccgcccacgtcaccgcgccgcgcgcacgtcacgccggcccgacgctcggccagggtgagccccgcgtcccggcgccactcggcccagggcagggaccccgccacggccgggaccgcccggcccggccccagcccgcgcctctccgcgccgccccgcgctccgcaccgcgccctctccgcgtccccgcccgcgcggccggaccgggcagccagaaaaatcatttttcttctctgggaaggtgaacatttgtagcattgatttcccggatctggtaacatggcaaaagatgccggtctaattgaagccaacggagaactcaaggtcttcatagaccagaaccttagtcccgggaaaggcgtggtgtccctcgtggccgttcacccctccaccgtcaacccgctcgggaagcagctcttgccaaaaacctttggacagtccaatgtcaacattgcccagcaagtggtaattggtacgcctcagagaccggcagcgtcaaacaccctggtggtaggaagcccacacacccccagcactcactttgcctctcagaaccagccttccgactcctcaccttggtctgccgggaagcgcaacaggaaaggagagaagaatggcaagggcctacggcatttctccatgaaggtctgcgagaaggtgcagaggaaagggaccacttcctacaacgaagtggcagacgagctggttgcggagttcagtgctgccgacaaccacatcttaccaaacgagtcagcttatgaccagaaaaacataagacggcgcgtctacgatgccttaaacgtgctaatggccatgaacatcatctccaaggagaagaaggagatcaagtggattggtctgcccaccaactcggctcaggaatgtcagaacttagaggtggaaagacagaggagacttgaaagaataaaacagaaacagtctcaacttcaagaacttattctacagcaaattgccttcaagaacctggtgcagagaaaccggcatgcggagcagcaggccagccggccaccgccacccaactcagtcatccacctgcccttcatcatcgtcaacaccagcaagaagacggtcatcgactgcagcatctccaatgacaaatttgagtatctgtttaattttgacaacacatttgaaatccacgatgacatagaagtgctgaagcggatgggcatggcttgcgggctggagtcggggagctgctctgccgaagaccttaaaatggccagaagtctggtccccaaggctctggagccatacgtgacagaaatggctcagggaactgttggaggcgtgttcatcacgacggcaggttccacgtctaacggcacaaggttctctgccagtgacctgaccaacggtgcagatgggatgctggccacaagctccaatgggtctcagtacagcggctccagggtggagactccggtgtcctacgtcggggaggacgacgaggaggacgatgacttcaacgagaatgacgaggacgactgacgtcctccccacttcagattcggcttcaggaaaacgtttagcgaaaagaaactttttttttaatgtgggttttctgtttccttttggcctactcccaagaagatattggtaagctattgaatttagatatgcacctctgataagcaaggattgtttcccgtaggattaggacgtgctgtggatgtgtgttttgataccagtgtgctgatgcagagcgtttatttacttgttaggattttgtgttttcatttgctatttttctttaagtgcagagttcatttttgcccctgaaaagtttttgctgagtttgctgaagaaattgtatttcaaccacatccatgaaaataaaacacctcctgttgtggatggtgagcccctgatgccgcttatttgccgtgagtttggacggcacccctgctggcggatagcaagactctgtggagtttgttcagtggtacggtgtccaagcaaacagcagaatgcaactttctaaacagccccaagcaaacagcagaattcaactttttaaacaataaacaccatcaaccttattgactttattgtcccttaaattatattgactgttgtgattccatcaagtttgtacactcttttctctccctgttttgcagcaacaaattgcgaagtgcttttgtttgtttgttttcgtttggttaaagcttattgccatgctggtgcggctatggagactgtctggaaggcttggaatggtttattgcttatggtaaaatttgcctgatttcttacaggcagcgtttggaaaccttttattatatagttgtttacatacttataagtctatcatttaaagacatgtactgaaacaaatgtatttgtttcataagcatcttcctgtaatctattataaaattgaaattaaatatagagaatgttttaacaattttttaactcaaaatttgtcaatcatttttaatagttctttttttataaaaagaaaaaggaatttaaggacaggcagtagtctcttttaaaatttattcacaaaacccattaactgcacagttgctattagctgcctgttctaaaacgatagtctttttattgaaacacaaataaacttttctgtaatattttatggtatataaagagactttaattgtttgacttgtttaacttggcactgttagtttttattaataaaacgcgcatgggcattttaa

SEQ ID NO: 457868 - DNA, 2598 bp, Homo sapiens
acctgtcagagttaccggtcagccgggcgggcgccgccggggtctggggtggacgccgcgagcctgcacgttgcgccgggaccccggggctgtgcccagaaaaatcatttttcttctctgggaaggtgaacatttgtagcattgatttcccggatctggtaacatggcaaaagatgccggtctaattgaagccaacggagaactcaaggtcttcatagaccagaaccttagtcccgggaaaggcgtggtgtccctcgtggccgttcacccctccaccgtcaacccgctcgggaagcagctcttgccaaaaacctttggacagtccaatgtcaacattgcccagcaagtggtaattggtacgcctcagagaccggcagcgtcaaacaccctggtggtaggaagcccacacacccccagcactcactttgcctctcagaaccagccttccgactcctcaccttggtctgccgggaagcgcaacaggaaaggagagaagaatggcaagggcctacggcatttctccatgaaggtctgcgagaaggtgcagaggaaagggaccacttcctacaacgaagtggcagacgagctggttgcggagttcagtgctgccgacaaccacatcttaccaaacgagtcagcttatgaccagaaaaacataagacggcgcgtctacgatgccttaaacgtgctaatggccatgaacatcatctccaaggagaagaaggagatcaagtggattggtctgcccaccaactcggctcaggaatgtcagaacttagaggtggaaagacagaggagacttgaaagaataaaacagaaacagtctcaacttcaagaacttattctacagcaaattgccttcaagaacctggtgcagagaaaccggcatgcggagcagcaggccagccggccaccgccacccaactcagtcatccacctgcccttcatcatcgtcaacaccagcaagaagacggtcatcgactgcagcatctccaatgacaaatttgagtatctgtttaattttgacaacacatttgaaatccacgatgacatagaagtgctgaagcggatgggcatggcttgcgggctggagtcggggagctgctctgccgaagaccttaaaatggccagaagtctggtccccaaggctctggagccatacgtgacagaaatggctcagggaactgttggaggcgtgttcatcacgacggcaggttccacgtctaacggcacaaggttctctgccagtgacctgaccaacggtgcagatgggatgctggccacaagctccaatgggtctcagtacagcggctccagggtggagactccggtgtcctacgtcggggaggacgacgaggaggacgatgacttcaacgagaatgacgaggacgactgacgtcctccccacttcagattcggcttcaggaaaacgtttagcgaaaagaaactttttttttaatgtgggttttctgtttccttttggcctactcccaagaagatattggtaagctattgaatttagatatgcacctctgataagcaaggattgtttcccgtaggattaggacgtgctgtggatgtgtgttttgataccagtgtgctgatgcagagcgtttatttacttgttaggattttgtgttttcatttgctatttttctttaagtgcagagttcatttttgcccctgaaaagtttttgctgagtttgctgaagaaattgtatttcaaccacatccatgaaaataaaacacctcctgttgtggatggtgagcccctgatgccgcttatttgccgtgagtttggacggcacccctgctggcggatagcaagactctgtggagtttgttcagtggtacggtgtccaagcaaacagcagaatgcaactttctaaacagccccaagcaaacagcagaattcaactttttaaacaataaacaccatcaaccttattgactttattgtcccttaaattatattgactgttgtgattccatcaagtttgtacactcttttctctccctgttttgcagcaacaaattgcgaagtgcttttgtttgtttgttttcgtttggttaaagcttattgccatgctggtgcggctatggagactgtctggaaggcttggaatggtttattgcttatggtaaaatttgcctgatttcttacaggcagcgtttggaaaccttttattatatagttgtttacatacttataagtctatcatttaaagacatgtactgaaacaaatgtatttgtttcataagcatcttcctgtaatctattataaaattgaaattaaatatagagaatgttttaacaattttttaactcaaaatttgtcaatcatttttaatagttctttttttataaaaagaaaaaggaatttaaggacaggcagtagtctcttttaaaatttattcacaaaacccattaactgcacagttgctattagctgcctgttctaaaacgatagtctttttattgaaacacaaataaacttttctgtaatattttatggtatataaagagactttaattgtttgacttgtttaacttggcactgttagtttttattaataaaacgcgcatgggcattttaa

SEQ ID NO: 457869 - DNA, 2528 bp, Homo sapiens
gcgggaggagcgggagaccgaggagcagcagaagaggaggaggagggcgccgaaggcgcgaaaaggcgcgcaggcgcgctgcgcggagcgggcccgccgccgcccacgtcaccgcgccgcgcgcacgtcacgccggcccgacgctcggccagggtgagccccgcgtcccggcgccactcggcccagggcagggaccccgccacggccgggaccgcccggcccggccccagcccgcgcctctccgcgccgccccgcgctccgcaccgcgccctctccgcgtccccgcccgcgcggccggaccgggcagccagaaaaatcatttttcttctctgggaaggtgaacatttgtagcattgatttcccggatctggtaacatggcaaaagatgccggtctaattgaagccaacggagaactcaaggtcttcatagaccagaaccttagtcccgggaaaggcgtggtgtccctcgtggccgttcacccctccaccgtcaacccgctcgggaagcagctcttgccaaaaacctttggacagtccaatgtcaacattgcccagcaagtggtaattggtacgcctcagagaccggcagcgtcaaacaccctggtggtaggaagcccacacacccccagcactcactttgcctctcagaaccagccttccgactcctcaccttggtctgccgggaagcgcaacaggaaaggagagaagaatggcaagggcctacggcatttctccatgaaggtctgcgagaaggtgcagaggaaagggaccacttcctacaacgaagtggcagacgagctggttgcggagttcagtgctgccgacaaccacatcttaccaaacgagtcagcttatgaccagaaaaacataagacggcgcgtctacgatgccttaaacgtgctaatggccatgaacatcatctccaaggagaagaaggagatcaagtggattggtctgcccaccaactcggctcaggaatgtcagaacttagaggtggaaagacagaggagacttgaaagaataaaacagaaacagtctcaacttcaagaacttattctacagcaaattgccttcaagaacctggtgcagagaaaccggcatgcggagcagcaggccagccggccaccgccacccaactcagtcatccacctgcccttcatcatcgtcaacaccagcaagaagacggtcatcgactgcagcatctccaatgacaaatttgagtatctgtttaattttgacaacacatttgaaatccacgatgacatagaagtgctgaagcggatgggcatggcttgcgggctggagtcggggagctgctctgccgaagaccttaaaatggccagaagtctggtccccaaggctctggagccatacgtgacagaaatggctcagggaactgttggaggcgtgttcatcacgacggcaggttccacgtctaacggcacaaggttctctgccagtgacctgaccaacggtgcagatgggatgctggccacaagctccaatgggtctcagtacagcggctccagggtggagactccggtgtcctacgtcggggaggacgacgaggaggacgatgacttcaacgagaatgacgaggacgactgacgtcctccccacttcagattcggcttcaggaaaacgtttagcgaaaagaaactttttttttaatgtgggttttctgtttccttttggcctactcccaagaagatattggtaagctattgaatttagatatgcacctctgataagcaaggattgtttcccgtaggattaggacgtgctgtggatgtgtgttttgataccagtgtgctgatgcagagcgtttatttacttgttaggattttgtgttttcatttgctatttttctttaagtgcagagttcatttttgcccctgaaaagtttttgctgagtttgctgaagaaattgtatttcaaccacatccatgaaaataaaacacctcctgttgtggatggtgagcccctgatgccgcttatttgccgtgagtttggacggcacccctgctggcggatagcaagactctgtggagtttgttcagtggtacggtgtccaagcaaacagcagaatgcaactttctaaacagccccaagcaaacagcagaattcaactttttaaacaataaacaccatcaaccttattgactttattgtcccttaaattatattgactgttgtgattccatcaagtttgtacactcttttctctccctgttttgcagcaacaaattgcgaagtgcttttgtttgtttgttttcgtttggttaaagcttattgccatgctggtgcggctatggagactgtctggaaggcttggaatggtttattgcttatggtaaaatttgcctgatttcttacaggcagcgtttggaaaccttttattatatagttgtttacatacttataagtctatcatttaaagacatgtactgaaacaaatgtatttgtttcataagcatcttcctgtaatctattataaaattgaaattaaatatagagaatgttttaac

SEQ ID NO: 457870 - DNA, 2971 bp, Homo sapiens
gcgggaggagcgggagaccgaggagcagcagaagaggaggaggagggcgccgaaggcgcgaaaaggcgcgcaggcgcgctgcgcggagcgggcccgccgccgcccacgtcaccgcgccgcgcgcacgtcacgccggcccgacgctcggccagggtgagccccgcgtcccggcgccactcggcccagggcagggaccccgccacggccgggaccgcccggcccggccccagcccgcgcctctccgcgccgccccgcgctccgcaccgcgccctctccgcgtccccgcccgcgcggccggaccgggcagccagaaaaatcatttttcttctctgggaaggtgaacatttgtagcattgatttcccggatctggtaacatggcaaaagatgccggtctaattgaagccaacggagaactcaaggtcttcatagaccagaaccttagtcccgggaaaggcgtggtgtccctcgtggccgttcacccctccaccgtcaacccgctcgggaagcagctcttgccaaaaacctttggacagtccaatgtcaacattgcccagcaagtggtaattggtacgcctcagagaccggcagcgtcaaacaccctggtggtaggaagcccacacacccccagcactcactttgcctctcagaaccagccttccgactcctcaccttggtctgccgggtgagcacttccctctggacccttagagttgtaggactgcttgcggttcgcacctccacgttctcctgggccacgtgtgtcacacagtcgtgcgatggggctcccacgcgcgttgacgccagcctccgaatcacactcacccatcatcgtggcctgcacaggaagcgcaacaggaaaggagagaagaatggcaagggcctacggcatttctccatgaaggtctgcgagaaggtgcagaggaaagggaccacttcctacaacgaagtggcagacgagctggttgcggagttcagtgctgccgacaaccacatcttaccaaacgagtcagcttatgaccagaaaaacataagacggcgcgtctacgatgccttaaacgtgctaatggccatgaacatcatctccaaggagaagaaggagatcaagtggattggtctgcccaccaactcggctcaggaatgtcagaacttagaggtggaaagacagaggagacttgaaagaataaaacagaaacagtctcaacttcaagaacttattctacagcaaattgccttcaagaacctggtgcagagaaaccggcatgcggagcagcaggccagccggccaccgccacccaactcagtcatccacctgcccttcatcatcgtcaacaccagcaagaagacggtcatcgactgcagcatctccaatgacaaatttgagtatctgtttaattttgacaacacatttgaaatccacgatgacatagaagtgctgaagcggatgggcatggcttgcgggctggagtcggggagctgctctgccgaagaccttaaaatggccagaagtctggtccccaaggctctggagccatacgtgacagaaatggctcagggaactgttggaggcgtgttcatcacgacggcaggttccacgtctaacggcacaaggttctctgccagtgacctgaccaacggtgcagatgggatgctggccacaagctccaatgggtctcagtacagcggctccagggtggagactccggtgtcctacgtcggggaggacgacgaggaggacgatgacttcaacgagaatgacgaggacgactgacgtcctccccacttcagattcggcttcaggaaaacgtttagcgaaaagaaactttttttttaatgtgggttttctgtttccttttggcctactcccaagaagatattggtaagctattgaatttagatatgcacctctgataagcaaggattgtttcccgtaggattaggacgtgctgtggatgtgtgttttgataccagtgtgctgatgcagagcgtttatttacttgttaggattttgtgttttcatttgctatttttctttaagtgcagagttcatttttgcccctgaaaagtttttgctgagtttgctgaagaaattgtatttcaaccacatccatgaaaataaaacacctcctgttgtggatggtgagcccctgatgccgcttatttgccgtgagtttggacggcacccctgctggcggatagcaagactctgtggagtttgttcagtggtacggtgtccaagcaaacagcagaatgcaactttctaaacagccccaagcaaacagcagaattcaactttttaaacaataaacaccatcaaccttattgactttattgtcccttaaattatattgactgttgtgattccatcaagtttgtacactcttttctctccctgttttgcagcaacaaattgcgaagtgcttttgtttgtttgttttcgtttggttaaagcttattgccatgctggtgcggctatggagactgtctggaaggcttggaatggtttattgcttatggtaaaatttgcctgatttcttacaggcagcgtttggaaaccttttattatatagttgtttacatacttataagtctatcatttaaagacatgtactgaaacaaatgtatttgtttcataagcatcttcctgtaatctattataaaattgaaattaaatatagagaatgttttaacaattttttaactcaaaatttgtcaatcatttttaatagttctttttttataaaaagaaaaaggaatttaaggacaggcagtagtctcttttaaaatttattcacaaaacccattaactgcacagttgctattagctgcctgttctaaaacgatagtctttttattgaaacacaaataaacttttctgtaatattttatggtatataaagagactttaattgtttgacttgtttaacttggcactgttagtttttattaataaaacgcgcatgggcattttaa

SEQ ID NO: 457871 - DNA, 2471 bp, Homo sapiens
gcgggaggagcgggagaccgaggagcagcagaagaggaggaggagggcgccgaaggcgcgaaaaggcgcgcaggcgcgctgcgcggagcgggcccgccgccgcccacgtcaccgcgccgcgcgcacgtcacgccggcccgacgctcggccagggtgagccccgcgtcccggcgccactcggcccagggcagggaccccgccacggccgggaccgcccggcccggccccagcccgcgcctctccgcgccgccccgcgctccgcaccgcgccctctccgcgtccccgcccgcgcggccggaccgggcagccagaaaaatcatttttcttctctgggaaggtgaacatttgtagcattgatttcccggatctggtaacatggcaaaagatgccggtctaattgaagccaacggagaactcaaggtcttcatagaccagaaccttagtcccgggaaaggcgtggtgtccctcgtggccgttcacccctccaccgtcaacccgctcgggaagcagctcttgccaaaaacctttggacagtccaatgtcaacattgcccagcaagtggtaattggtacgcctcagagaccggcagcgtcaaacaccctggtggtaggaagcccacacacccccagcactcactttgcctctcagaaccagccttccgactcctcaccttggtctgccgggaagcgcaacaggaaaggagagaagaatggcaagggcctacggcatttctccatgaaggtctgcgagaaggtgcagaggaaagggaccacttcctacaacgaagtggcagacgagctggttgcggagttcagtgctgccgacaaccacatcttaccaaacgagtcagcttatgaccagaaaaacataagacggcgcgtctacgatgccttaaacgtgctaatggccatgaacatcatctccaaggagaagaaggagatcaagtggattggtctgcccaccaactcggctcaggaatgtcagaacttagaggtggaaagacagaggagacttgaaagaataaaacagaaacagtctcaacttcaagaacttattctacagcaaattgccttcaagaacctggtgcagagaaaccggcatgcggagcagcaggccagccggccaccgccacccaactcagtcatccacctgcccttcatcatcgtcaacaccagcaagaagacggtcatcgactgcagcatctccaatgacaaatttgagtatctgtttaattttgacaacacatttgaaatccacgatgacatagaagtgctgaagcggatgggcatggcttgcgggctggagtcggggagctgctctgccgaagaccttaaaatggccagaagtctggtccccaaggctctggagccatacgtgacagaaatggctcagggaactgttggaggcgtgttcatcacgacggcaggttccacgtctaacggcacaaggttctctgccagtgacctgaccaacggtgcagatgggatgctggccacaagctccaatgggtctcagtacagcggctccagggtggagactccggtgtcctacgtcggggaggacgacgaggaggacgatgacttcaacgagaatgacgaggacgactgacgtcctccccacttcagattcggcttcaggaaaacgtttagcgaaaagaaactttttttttaatgtgggttttctgtttccttttggcctactcccaagaagatattggtaagctattgaatttagatatgcacctctgataagcaaggattgtttcccgtaggattaggacgtgctgtggatgtgtgttttgataccagtgtgctgatgcagagcgtttatttacttgttaggattttgtgttttcatttgctatttttctttaagtgcagagttcatttttgcccctgaaaagtttttgctgagtttgctgaagaaattgtatttcaaccacatccatgaaaataaaacacctcctgttgtggatggtgagcccctgatgccgcttatttgccgtgagtttggacggcacccctgctggcggatagcaagactctgtggagtttgttcagtggtacggtgtccaagcaaacagcagaatgcaactttctaaacagccccaagcaaacagcagaattcaactttttaaacaataaacaccatcaaccttattgactttattgtcccttaaattatattgactgttgtgattccatcaagtttgtacactcttttctctccctgttttgcagcaacaaattgcgaagtgcttttgtttgtttgttttcgtttggttaaagcttattgccatgctggtgcggctatggagactgtctggaaggcttggaatggtttattgcttatggtaaaatttgcctgatttcttacaggcagcgtttggaaaccttttattatatagttgtttacatacttataagcactatttgactttttaactttcgtgggcacacaaatggaggacc

SEQ ID NO: 457872 - DNA, 2432 bp, Homo sapiens
gcgggaggagcgggagaccgaggagcagcagaagaggaggaggagggcgccgaaggcgcgaaaaggcgcgcaggcgcgctgcgcggagcgggcccgccgccgcccacgtcaccgcgccgcgcgcacgtcacgccggcccgacgctcggccagggtgagccccgcgtcccggcgccactcggcccagggcagggaccccgccacggccgggaccgcccggcccggccccagcccgcgcctctccgcgccgccccgcgctccgcaccgcgccctctccgcgtccccgcccgcgcggccggaccgggcagccagaaaaatcatttttcttctctgggaaggtgaacatttgtagcattgatttcccggatctggtaacatggcaaaagatgccggtctaattgaagccaacggagaactcaaggtcttcatagaccagaaccttagtcccgggaaaggcgtggtgtccctcgtggccgttcacccctccaccgtcaacccgctcgggaagcagctcttgccaaaaacctttggacagtccaatgtcaacattgcccagcaagtggtaattggtacgcctcagagaccggcagcgtcaaacaccctggtggtaggaagcccacacacccccagcactcactttgcctctcagaaccagccttccgactcctcaccttggtctgccgggaagcgcaacaggaaaggagagaagaatggcaagggcctacggcatttctccatgaaggtctgcgagaaggtgcagaggaaagggaccacttcctacaacgaagtggcagacgagctggttgcggagttcagtgctgccgacaaccacatcttaccaaacgagtcagcttatgaccagaaaaacataagacggcgcgtctacgatgccttaaacgtgctaatggccatgaacatcatctccaaggagaagaaggagatcaagtggattggtctgcccaccaactcggctcaggaatgtcagaacttagaggtggaaagacagaggagacttgaaagaataaaacagaaacagtctcaacttcaagaacttattctacagcaaattgccttcaagaacctggtgcagagaaaccggcatgcggagcagcaggccagccggccaccgccacccaactcagtcatccacctgcccttcatcatcgtcaacaccagcaagaagacggtcatcgactgcagcatctccaatgacaaatttgagtatctgtttaattttgacaacacatttgaaatccacgatgacatagaagtgctgaagcggatgggcatggcttgcgggctggagtcggggagctgctctgccgaagaccttaaaatggccagaagtctggtccccaaggctctggagccatacgtgacagaaatggctcagggaactgttggaggcgtgttcatcacgacggcaggttccacgtctaacggcacaaggttctctgccagtgacctgaccaacggtgcagatgggatgctggccacaagctccaatgggtctcagtacagcggctccagggtggagactccggtgtcctacgtcggggaggacgacgaggaggacgatgacttcaacgagaatgacgaggacgactgacgtcctccccacttcagattcggcttcaggaaaacgtttagcgaaaagaaactttttttttaatgtgggttttctgtttccttttggcctactcccaagaagatattggtaagctattgaatttagatatgcacctctgataagcaaggattgtttcccgtaggattaggacgtgctgtggatgtgtgttttgataccagtgtgctgatgcagagcgtttatttacttgttaggattttgtgttttcatttgctatttttctttaagtgcagagttcatttttgcccctgaaaagtttttgctgagtttgctgaagaaattgtatttcaaccacatccatgaaaataaaacacctcctgttgtggatggtgagcccctgatgccgcttatttgccgtgagtttggacggcacccctgctggcggatagcaagactctgtggagtttgttcagtggtacggtgtccaagcaaacagcagaatgcaactttctaaacagccccaagcaaacagcagaattcaactttttaaacaataaacaccatcaaccttattgactttattgtcccttaaattatattgactgttgtgattccatcaagtttgtacactcttttctctccctgttttgcagcaacaaattgcgaagtgcttaggaaggtaggtgccgtaggttaagcttatggcatcgtggtgggtatgggactgttggaggttgaagggtatggtagggaagtggggtattacagggggtgtgacattgtatatggggatagatgtactttaacgttgggtgtgttagcactcagtttgaggatgatgtgcc

SEQ ID NO: 457873 - DNA, 2243 bp, Homo sapiens
  misc_feature (2236)..(2236): n is a, c, g, or t
gcgggaggagcgggagaccgaggagcagcagaagaggaggaggagggcgccgaaggcgcgaaaaggcgcgcaggcgcgctgcgcggagcgggcccgccgccgcccacgtcaccgcgccgcgcgcacgtcacgccggcccgacgctcggccagggtgagccccgcgtcccggcgccactcggcccagggcagggaccccgccacggccgggaccgcccggcccggccccagcccgcgcctctccgcgccgccccgcgctccgcaccgcgccctctccgcgtccccgcccgcgcggccggaccgggcagccagaaaaatcatttttcttctctgggaaggtgaacatttgtagcattgatttcccggatctggtaacatggcaaaagatgccggtctaattgaagccaacggagaactcaaggtcttcatagaccagaaccttagtcccgggaaaggcgtggtgtccctcgtggccgttcacccctccaccgtcaacccgctcgggaagcagctcttgccaaaaacctttggacagtccaatgtcaacattgcccagcaagtggtaattggtacgcctcagagaccggcagcgtcaaacaccctggtggtaggaagcccacacacccccagcactcactttgcctctcagaaccagccttccgactcctcaccttggtctgccgggaagcgcaacaggaaaggagagaagaatggcaagggcctacggcatttctccatgaaggtctgcgagaaggtgcagaggaaagggaccacttcctacaacgaagtggcagacgagctggttgcggagttcagtgctgccgacaaccacatcttaccaaacgagtcagcttatgaccagaaaaacataagacggcgcgtctacgatgccttaaacgtgctaatggccatgaacatcatctccaaggagaagaaggagatcaagtggattggtctgcccaccaactcggctcaggaatgtcagaacttagaggtggaaagacagaggagacttgaaagaataaaacagaaacagtctcaacttcaagaacttattctacagcaaattgccttcaagaacctggtgcagagaaaccggcatgcggagcagcaggccagccggccaccgccacccaactcagtcatccacctgcccttcatcatcgtcaacaccagcaagaagacggtcatcgactgcagcatctccaatgacaaatttgagtatctgtttaattttgacaacacatttgaaatccacgatgacatagaagtgctgaagcggatgggcatggcttgcgggctggagtcggggagctgctctgccgaagaccttaaaatggccagaagtctggtccccaaggctctggagccatacgtgacagaaatggctcagggaactgttggaggcgtgttcatcacgacggcaggttccacgtctaacggcacaaggttctctgccagtgacctgaccaacggtgcagatgggatgctggccacaagctccaatgggtctcagtacagcggctccagggtggagactccggtgtcctacgtcggggaggacgacgaggaggacgatgacttcaacgagaatgacgaggacgactgacgtcctccccacttcagattcggcttcaggaaaacgtttagcgaaaagaaactttttttttaatgtgggttttctgtttccttttggcctactcccaagaagatattggtaagctattgaatttagatatgcacctctgataagcaaggattgtttcccgtaggattaggacgtgctgtggatgtgtgttttgataccagtgtgctgatgcagagcgtttatttacttgttaggattttgtgttttcatttgctatttttctttaagtgcagagttcatttttgcccctgaaaagtttttgctgagtttgctgaagaaattgtatttcaaccacatccatgaaaataaaacacctcctgttgtggatggtgagcccctgatgccgcttatttgccgtgagtttggacggcacccctgctggcggatagcaagactctgtggagtttgttcagtggtacggtgtccaagcaaacagcagaatgcaactttctaaacagccccaagcaaacagcagaattcaactttttaaacaataaacaccatcaaccttattgactttattgtcccttaaattatattgactgttgtgattccatcaagtttgtacactcgactggtagcatgaagnttgtcgg

SEQ ID NO: 457874 - DNA, 1667 bp, Homo sapiens
gcgggaggagcgggagaccgaggagcagcagaagaggaggaggagggcgccgaaggcgcgaaaaggcgcgcaggcgcgctgcgcggagcgggcccgccgccgcccacgtcaccgcgccgcgcgcacgtcacgccggcccgacgctcggccagggtgagccccgcgtcccggcgccactcggcccagggcagggaccccgccacggccgggaccgcccggcccggccccagcccgcgcctctccgcgccgccccgcgctccgcaccgcgccctctccgcgtccccgcccgcgcggccggaccgggcagccagaaaaatcatttttcttctctgggaaggtgaacatttgtagcattgatttcccggatctggtaacatggcaaaagatgccggtctaattgaagccaacggagaactcaaggtcttcatagaccagaaccttagtcccgggaaaggcgtggtgtccctcgtggccgttcacccctccaccgtcaacccgctcgggaagcagctcttgccaaaaacctttggacagtccaatgtcaacattgcccagcaagtggtaattggtacgcctcagagaccggcagcgtcaaacaccctggtggtaggaagcccacacacccccagcactcactttgcctctcagaaccagccttccgactcctcaccttggtctgccgggaagcgcaacaggaaaggagagaagaatggcaagggcctacggcatttctccatgaaggtctgcgagaaggtgcagaggaaagggaccacttcctacaacgaagtggcagacgagctggttgcggagttcagtgctgccgacaaccacatcttaccaaacgagtcagcttatttgccgtgagtttggacggcacccctgctggcggatagcaagactctgtggagtttgttcagtggtacggtgtccaagcaaacagcagaatgcaactttctaaacagccccaagcaaacagcagaattcaactttttaaacaataaacaccatcaaccttattgactttattgtcccttaaattatattgactgttgtgattccatcaagtttgtacactcttttctctccctgttttgcagcaacaaattgcgaagtgcttttgtttgtttgttttcgtttggttaaagcttattgccatgctggtgcggctatggagactgtctggaaggcttggaatggtttattgcttatggtaaaatttgcctgatttcttacaggcagcgtttggaaaccttttattatatagttgtttacatacttataagtctatcatttaaagacatgtactgaaacaaatgtatttgtttcataagcatcttcctgtaatctattataaaattgaaattaaatatagagaatgttttaacaattttttaactcaaaatttgtcaatcatttttaatagttctttttttataaaaagaaaaaggaatttaaggacaggcagtagtctcttttaaaatttattcacaaaacccattaactgcacagttgctattagctgcctgttctaaaacgatagtctttttattgaaacacaaataaacttttctgtaatattttatggtatataaagagactttaattgtttgacttgtttaacttggcactgttagtttttattaataaaacgcgcatgggcattttaa

SEQ ID NO: 457875 - DNA, 1037 bp, Homo sapiens
gcgggaggagcgggagaccgaggagcagcagaagaggaggaggagggcgccgaaggcgcgaaaaggcgcgcaggcgcgctgcgcggagcgggcccgccgccgcccacgtcaccgcgccgcgcgcacgtcacgccggcccgacgctcggccagggtgagccccgcgtcccggcgccactcggcccagggcagggaccccgccacggccgggaccgcccggcccggccccagcccgcgcctctccgcgccgccccgcgctccgcaccgcgccctctccgcgtccccgcccgcgcggccggaccgggcagccagaaaaatcatttttcttctctgggaaggtgaacatttgtagcattgatttcccggatctggtaacatggcaaaagatgccggtctaattgaagccaacggagaactcaaggtcttcatagaccagaaccttagtcccgggaaaggcgtggtgtccctcgtggccgttcacccctccaccgtcaacccgctcgggaagcagctcttgccaaaaacctttggacagtccaatgtcaacattgcccagcaagtggtaattggtacgcctcagagaccggcagcgtcaaacaccctggtggtaggaagcccacacacccccagcactcactttgcctctcagaaccagccttccgactcctcaccttggtctgccgggaagcgcaacaggaaaggagagaagaatggcaagggcctacggcatttctccatgaaggtctgcgagaaggtgcagaggaaagggaccacttcctacaacgaagtggcagacgagctggttgcggagttcagtgctgccgacaaccacatcttaccaaacgagtcagcttatgaccagaaaaacataagacggcgcgtctacgatgccttaaacgtgctaatggccatgaacatcatctccaaggagaagaaggagatcaagtggattggtctgcccaccaactcggctcaggaatgtcagaacttagaggtggaaagacaactgttttaataaaagatttacattccaaaaaa

SEQ ID NO: 457876 - DNA, 958 bp, Homo sapiens
gtgtgtcggtggccggctggccctgctgctccgcatgccggttacactgcaccaggttcttgaaggcaattagctgtagaattaagttcttagaaattctcactgtctctgtcttattctatcaagtctcctctgtcttaccacctctcagttctgacgttcttgagccgagttggtgggcagaccacgccacttgatctccttcttctccttggctgattaattcttggccattagcgcgttgtacggcttcgtagacccgctgtcttatgtttgtctggtcttaagcctgttcgttgggaagatgtggttgtcggcagcactgaactccgcaaccagctcgtctgccacttcgttgtaggaagtggtccctttcctctgcaccttctcgcagaccttcatggagaaatgccgtaggcccttgccattcttctctcctttcctgtagcattgatttcccggatctggtaacatggcaaaagatgccggtctaattgaagccaacggagaactcaaggtcttcatagaccagaaccttagtcccgggaaaggcgtggtgtccctcgtggccgttcacccctccaccgtcaacccgctcgggaagcagctcttgccaaaaacctttggacagtccaatgtcaacattgcccagcaagtggtaagcctcccgcaggagcggacagccgggatctcggtgtgaggtcgggatcggatgagccgtgtggttggggatgttcccaggtgtgcctggatttgggctccagttgcagcatggggcctttccctcatcagggagcccgtggccagtgctagattttccatagccctctgcagctgcccacgtgttgttgtgggagaggtgatggcgcccacagcactcctgtgtgccccagcccatgccatccttccagtaactggagggtggtgggtggggccgcggccccaaccagaggcagct

SEQ ID NO: 457877 - DNA, 1698 bp, Homo sapiens
cacttatctgatacgataatcaaaatgtcatatctaatctctactcatctcacgatttggtacatatcaatataatcattatatcaggcagtaaggacttggactcctctgtccagcttttaacaatctaagttacgccctcttctgggtcacgctagaatcagatctgctctccagcatcttctgtttcctggcaagtgtttcctgctactttggattggccacgatgggctggagctgccttgtgacaggagcaggagggcttctgggtcagaggatcgtccgcctgttggtggaagagaaggaactgaaggagatcagggccttggacaaggccttcagaccagaattgagagaggaattttctaagctccagaacaggaccaagctgactgtacttgaaggagacattctggatgagccattcctgaaaagagcctgccaggacgtctcggtcgtcatccacaccgcctgtatcattgatgtctttggtgtcactcacagagagtccatcatgaatgtcaatgtgaaaggtacccagctactgttggaggcctgtgtccaagccagtgtgccagtcttcatctacaccagtagcatagaggtagccgggcccaactcctacaaggaaatcatccagaacggccacgaagaagagcctctggaaaacacatggcccactccatacccgtacagcaaaaagcttgctgagaaggctgtgctggcggctaatgggtggaatctaaaagaggcccattcctttctgccagtataaatgaggccctgaacaacaatgggatcctgtcaagtgttggaaagttctctacagtcaacccagtctatgttggcaacgtggcctgggcccacattctggccttgagggctctgcgggaccccaagaaggccccaagtgtccgaggtcaattctattacatctcagatgacacgcctcaccaaagctatgataaccttaattacatcctgagcaaagagtttggcctccgccttgattccagatggagccttcctttaaccctgatgtactggattggcttcctgctggaagtagtgagcttcctactcagcccaatttactcctatcaaccccccttcaaccgccacacagtcacattatcaaatagtgtgttcaccttctcttacaagaaggctcagcgagatctggcgtataagccactctacagctgggaggaagccaagcagaaaaccgtggagtgggttggttcccttgtggaccggcacaaggagaccctgaagtccaagactcagtgatttaaggatgacagagatgtgcatgtgggtattgttaggaaatgtcatcaaactccacccacctggcttcatacagaaggcaacaggggcacaagcccaggtcctgctgcctctctttcacacaatgcccaacttactgtcttcttcatgtcatcaaaatctgcacagtcactggcccaaccagaactttctgtcctaatcatacaccagaagacaaacaatatgatttgctgttaccaaatctcagtggctgattctgaacaattgtggtctctcttaacttgaggttctcttttgactaatagagctccatttcccctcttaaatgagaaagcatttcttttctctttaatctcctattccttcacacagttcaacataaagagcaataaatgttttaatgcttaa

SEQ ID NO: 457878 - DNA, 1754 bp, Homo sapiens
cacttatctgatacgataatcaaaatgtcatatctaatctctactcatctcacgatttggtacatatcaatataatcattatatcaggcagtaaggacttggactcctctgtccagcttttaacaatctaagttacgccctcttctgggtcacgctagaatcagatctgctctccagcatcttctgtttcctggcaagtgtttcctgctactttggattggccacgatgggctggagctgccttgtgacaggagcaggagggcttctgggtcagaggatcgtccgcctgttggtggaagagaaggaactgaaggagatcagggccttggacaaggccttcagaccagaattgagagaggaattttctaagctccagaacaggaccaagctgactgtacttgaaggagacattctggatgagccattcctgaaaagagcctgccaggacgtctcggtcgtcatccacaccgcctgtatcattgatgtctttggtgtcactcacagagagtccatcatgaatgtcaatgtgaaaggtacccagctactgttggaggcctgtgtccaagccagtgtgccagtcttcatctacaccagtagcatagaggtagccgggcccaactcctacaaggaaatcatccagaacggccacgaagaagagcctctggaaaacacatggcccactccatacccgtacagcaaaaagcttgctgagaaggctgtgctggcggctaatgggtggaatctaaaaaaatggtgataccttgtacacttgtgcgttaagacccacatatatctatggggaaggaggcccattcctttctgccagtataaatgaggccctgaacaacaatgggatcctgtcaagtgttggaaagttctctacagtcaacccagtctatgttggcaacgtggcctgggcccacattctggccttgagggctctgcgggaccccaagaaggccccaagtgtccgaggtcaattctattacatctcagatgacacgcctcaccaaagctatgataaccttaattacatcctgagcaaagagtttggcctccgccttgattccagatggagccttcctttaaccctgatgtactggattggcttcctgctggaagtagtgagcttcctactcagcccaatttactcctatcaaccccccttcaaccgccacacagtcacattatcaaatagtgtgttcaccttctcttacaagaaggctcagcgagatctggcgtataagccactctacagctgggaggaagccaagcagaaaaccgtggagtgggttggttcccttgtggaccggcacaaggagaccctgaagtccaagactcagtgatttaaggatgacagagatgtgcatgtgggtattgttaggaaatgtcatcaaactccacccacctggcttcatacagaaggcaacaggggcacaagcccaggtcctgctgcctctctttcacacaatgcccaacttactgtcttcttcatgtcatcaaaatctgcacagtcactggcccaaccagaactttctgtcctaatcatacaccagaagacaaacaatatgatttgctgttaccaaatctcagtggctgattctgaacaattgtggtctctcttaacttgaggttctcttttgactaatagagctccatttcccctcttaaatgagaaagcatttcttttctctttaatctcctattccttcacacagttcaacataaagagcaataaatgttttaatgcttaa

SEQ ID NO: 457879 - DNA, 1644 bp, Homo sapiens
cacttatctgatacgataatcaaaatgtcatatctaatctctactcatctcacgatttggtacatatcaatataatcattatatcaggcagtaaggacttggactcctctgtccagcttttaacaatctaagttacgccctcttctgggtcacgctagaatcagatctgctctccagcatcttctgtttcctggcaagtgtttcctgctactttggattggccacgatgggctggagctgccttgtgacaggagcaggagggcttctgggtcagaggatcgtccgcctgttggtggaagagaaggaactgaaggagatcagggccttggacaaggccttcagaccagaattgagagaggaattttctaagctccagaacaggaccaagctgactgtacttgaaggagacattctggatgagccattcctgaaaagagcctgccaggacgtctcggtcgtcatccacaccgcctgtatcattgatgtctttggtgtcactcacagagagtccatcatgaatgtcaatgtgaaaggtacccagctactgttggaggcctgtgtccaagccagtgtgccagtcttcatctacaccagtagcatagaggtagccgggcccaactcctacaaggaaatcatccagaacggccacgaagaagagcctctggaaaacacatggcccactccatacccgtacagcaaaaagcttgctgagaaggctgtgctggcggctaatgggtggaatctaaaagaggcccattcctttctgccagtataaatgaggccctgaacaacaatgggatcctgtcaagtgttggaaagttctctacagtcaacccagtctatgttggcaacgtggcctgggcccacattctggccttgagggctctgcgggaccccaagaaggccccaagtgtccgaggtcaattctattacatctcagatgacacgcctcaccaaagctatgataaccttaattacatcctgagcaaagagtttggcctccgccttgattccagatggagccttcctttaaccctgatgtactggattggcttcctgctggaagtagtgagcttcctactcagcccaatttactcctatcaaccccccttcaaccgccacacagtcacattatcaaatagtgtgttcaccttctcttacaagaaggctcagcgagatctggcgtataagccactctacagctgggaggaagccaagcagaaaaccgtggagtgggttggttcccttgtggaccggcacaaggagaccctgaagtccaagactcagtgatttaaggatgacagagatgtgcatgtgggtattgttaggaaatgtcatcaaactccacccacctggcttcatacagaaggcaacaggggcacaagcccaggtcctgctgcctctctttcacacaatgcccaacttactgtcttcttcatgtcatcgaagacaaacaatatgatttgctgttaccaaatctcagtggctgattctgaacaattgtggtctctcttaacttgaggttctcttttgactaatagagctccatttcccctcttaaatgagaaagcatttcttttctctttaatctcctattccttcacacagttcaacataaagagcaataaatgttttaatgcttaa

SEQ ID NO: 457880 - DNA, 1934 bp, Homo sapiens
  misc_feature (1720)..(1720): n is a, c, g, or t
  misc_feature (1725)..(1725): n is a, c, g, or t
  misc_feature (1772)..(1772): n is a, c, g, or t
  misc_feature (1777)..(1777): n is a, c, g, or t
  misc_feature (1798)..(1798): n is a, c, g, or t
  misc_feature (1807)..(1807): n is a, c, g, or t
  misc_feature (1819)..(1819): n is a, c, g, or t
  misc_feature (1824)..(1825): n is a, c, g, or t
  misc_feature (1829)..(1829): n is a, c, g, or t
  misc_feature (1832)..(1832): n is a, c, g, or t
  misc_feature (1836)..(1836): n is a, c, g, or t
  misc_feature (1852)..(1852): n is a, c, g, or t
  misc_feature (1859)..(1859): n is a, c, g, or t
  misc_feature (1865)..(1865): n is a, c, g, or t
  misc_feature (1870)..(1870): n is a, c, g, or t
cacttatctgatacgataatcaaaatgtcatatctaatctctactcatctcacgatttggtacatatcaatataatcattatatcaggcagtaaggacttggactcctctgtccagcttttaacaatctaagttacgccctcttctgggtcacgctagaatcagatctgctctccagcatcttctgtttcctggcaagtgtttcctgctactttggattggccacgatgggctggagctgccttgtgacaggagcaggagggcttctgggtcagaggatcgtccgcctgttggtggaagagaaggaactgaaggagatcagggccttggacaaggccttcagaccagaattgagagaggaattttctaagctccagaacaggaccaagctgactgtacttgaaggagacattctggatgagccattcctgaaaagagcctgccaggacgtctcggtcgtcatccacaccgcctgtatcattgatgtctttggtgtcactcacagagagtccatcatgaatgtcaatgtgaaaggtacccagctactgttggaggcctgtgtccaagccagtgtgccagtcttcatctacaccagtagcatagaggtagccgggcccaactcctacaaggaaatcatccagaacggccacgaagaagagcctctggaaaacacatggcccactccatacccgtacagcaaaaagcttgctgagaaggctgtgctggcggctaatgggtggaatctaaaagaggcccattcctttctgccagtataaatgaggccctgaacaacaatgggatcctgtcaagtgttggaaagttctctacagtcaacccagtctatgttggcaacgtggcctgggcccacattctggccttgagggctctgcgggaccccaagaaggccccaagtgtccgaggtcaattctattacatctcagatgacacgcctcaccaaagctatgataaccttaattacatcctgagcaaagagtttggcctccgccttgattccagatggagccttcctttaaccctgatgtactggattggcttcctgctggaagtagtgagcttcctactcagcccaatttactcctatcaaccccccttcaaccgccacacagtcacattatcaaatagtgtgttcaccttctcttacaagaaggctcagcgagatctggcgtataagccactctacagctgggaggaagccaagcagaaaaccgtggagtgggttggttcccttgtggaccggcacaaggagaccctgaagtccaagactcagtgatttaaggatgacagagatgtgcatgtgggtattgttaggaaatgtcatcaaactccacccacctggcttcatacagaaggcaacaggggcacaagcccaggtcctgctgcctctctttcacacaatgcccaacttactgtcttcttcatgtcatcaaaatctgcacagtcactggcccaaccagaactttctgtcctaatcatacaccagaagacaaacaatatgatttgctgttaccaaatctcagtggctgattctgaacaattgtggtctctcttaacttgaggttctcttttgactaatagagctccatttcccctcttaaatgagaaagcatttcttttctctttaatctcctattccttcacacagttcaacataaagagcaataaatgttttaatgcttaaaacaaaaaaaaaaaaaaaaaanaaaanaaaaaaaaaaaaaaaaaaaaaaaaaaaaaaaaaaaaaaaaaaaaaanaacanaccaaaaaaaaaaaaactcgnggggggccngtacccatttgncctanngggngcngttnacattaattggccggngtttaanacgggngactnggaaaaccttggcttgacccaacttaaatggctttgagcctttaccaacagttgggcaacctta

SEQ ID NO: 457881 - DNA, 1644 bp, Homo sapiens
cacttatctgatacgataatcaaaatgtcatatctaatctctactcatctcacgatttggtacatatcaatataatcattatatcaggcagtaaggacttggactcctctgtccagcttttaacaatctaagttacgccctcttctgggtcacgctagaatcagatctgctctccagcatcttctgtttcctggcaagtgtttcctgctactttggattggccacgatgggctggagctgccttgtgacaggagcaggagggcttctgggtcagaggatcgtccgcctgttggtggaagagaaggaactgaaggagatcagggccttggacaaggccttcagaccagaattgagagaggaattttctaagctccagaacaggaccaagctgactgtacttgaaggagacattctggatgagccattcctgaaaagagcctgccaggacgtctcggtcgtcatccacaccgcctgtatcattgatgtctttggtgtcactcacagagagtccatcatgaatgtcaatgtgaaaggtacccagctactgttggaggcctgtgtccaagccagtgtgccagtcttcatctacaccagtagcatagaggtagccgggcccaactcctacaaggaaatcatccagaacggccacgaagaagagcctctggaaaacacatggcccactccatacccgtacagcaaaaagcttgctgagaaggctgtgctggcggctaatgggtggaatctaaaagaggcccattcctttctgccagtataaatgaggccctgaacaacaatgggatcctgtcaagtgttggaaagttctctacagtcaacccagtctatgttggcaacgtggcctgggcccacattctggccttgagggctctgcgggaccccaagaaggccccaagtgtccgaggtcaattctattacatctcagatgacacgcctcaccaaagctatgataaccttaattacatcctgagcaaagagtttggcctccgccttgattccagatggagccttcctttaaccctgatgtactggattggcttcctgctggaagtagtgagcttcctactcagcccaatttactcctatcaaccccccttcaaccgccacacagtcacattatcaaatagtgtgttcaccttctcttacaagaaggctcagcgagatctggcgtataagccactctacagctgggaggaagccaagcagtccaagactcagtgatttaaggatgacagagatgtgcatgtgggtattgttaggaaatgtcatcaaactccacccacctggcttcatacagaaggcaacaggggcacaagcccaggtcctgctgcctctctttcacacaatgcccaacttactgtcttcttcatgtcatcaaaatctgcacagtcactggcccaaccagaactttctgtcctaatcatacaccagaagacaaacaatatgatttgctgttaccaaatctcagtggctgattctgaacaattgtggtctctcttaacttgaggttctcttttgactaatagagctccatttcccctcttaaatgagaaagcatttcttttctctttaatctcctattccttcacacagttcaacataaagagcaataaatgttttaatgcttaa

SEQ ID NO: 457882 - DNA, 1700 bp, Homo sapiens
cacttatctgatacgataatcaaaatgtcatatctaatctctactcatctcacgatttggtacatatcaatataatcattatatcaggcagtaaggacttggactcctctgtccagcttttaacaatctaagttacgccctcttctgggtcacgctagaatcagatctgctctccagcatcttctgtttcctggcaagtgtttcctgctactttggattggccacgatgggctggagctgccttgtgacaggagcaggagggcttctgggtcagaggatcgtccgcctgttggtggaagagaaggaactgaaggagatcagggccttggacaaggccttcagaccagaattgagagaggaattttctaagctccagaacaggaccaagctgactgtacttgaaggagacattctggatgagccattcctgaaaagagcctgccaggacgtctcggtcgtcatccacaccgcctgtatcattgatgtctttggtgtcactcacagagagtccatcatgaatgtcaatgtgaaaggtacccagctactgttggaggcctgtgtccaagccagtgtgccagtcttcatctacaccagtagcatagaggtagccgggcccaactcctacaaggaaatcatccagaacggccacgaagaagagcctctggaaaacacatggcccactccatacccgtacagcaaaaagcttgctgagaaggctgtgctggcggctaatgggtggaatctaaaaaaatggtgataccttgtacacttgtgcgttaagacccacatatatctatggggaaggaggcccattcctttctgccagtataaatgaggccctgaacaacaatgggatcctgtcaagtgttggaaagttctctacagtcaacccagtctatgttggcaacgtggcctgggcccacattctggccttgagggctctgcgggaccccaagaaggccccaagtgtccgaggtcaattctattacatctcagatgacacgcctcaccaaagctatgataaccttaattacatcctgagcaaagagtttggcctccgccttgattccagatggagccttcctttaaccctgatgtactggattggcttcctgctggaagtagtgagcttcctactcagcccaatttactcctatcaaccccccttcaaccgccacacagtcacattatcaaatagtgtgttcaccttctcttacaagaaggctcagcgagatctggcgtataagccactctacagctgggaggaagccaagcagtccaagactcagtgatttaaggatgacagagatgtgcatgtgggtattgttaggaaatgtcatcaaactccacccacctggcttcatacagaaggcaacaggggcacaagcccaggtcctgctgcctctctttcacacaatgcccaacttactgtcttcttcatgtcatcaaaatctgcacagtcactggcccaaccagaactttctgtcctaatcatacaccagaagacaaacaatatgatttgctgttaccaaatctcagtggctgattctgaacaattgtggtctctcttaacttgaggttctcttttgactaatagagctccatttcccctcttaaatgagaaagcatttcttttctctttaatctcctattccttcacacagttcaacataaagagcaataaatgttttaatgcttaa

SEQ ID NO: 457883 - DNA, 1701 bp, Homo sapiens
cacttatctgatacgataatcaaaatgtcatatctaatctctactcatctcacgatttggtacatatcaatataatcattatatcaggcagtaaggacttggactcctctgtccagcttttaacaatctaagttacgccctcttctgggtcacgctagaatcagatctgctctccagcatcttctgtttcctggcaagtgtttcctgctactttggattggccacgatgggctggagctgccttgtgacaggagcaggagggcttctgggtcagaggatcgtccgcctgttggtggaagagaaggaactgaaggagatcagggccttggacaaggccttcagaccagaattgagagaggaattttctaagctccagaacaggaccaagctgactgtacttgaaggagacattctggatgagccattcctgaaaagagcctgccaggacgtctcggtcgtcatccacaccgcctgtatcattgatgtctttggtgtcactcacagagagtccatcatgaatgtcaatgtgaaaggtacccagctactgttggaggcctgtgtccaagccagtgtgccagtcttcatctacaccagtagcatagaggtagccgggcccaactcctacaaggaaatcatccagaacggccacgaagaagagcctctggaaaacacatggcccactccatacccgtacagcaaaaagcttgctgagaaggctgtgctggcggctaatgggtggaatctaaaaaaatggtgataccttgtacacttgtgcgttaagacccacatatatctatggggaaggaggcccattcctttctgccagtataaatgaggccctgaacaacaatgggatcctgtcaagtgttgattctggccttgagggctctgcgggaccccaagaaggccccaagtgtccgaggtcaattctattacatctcagatgacacgcctcaccaaagctatgataaccttaattacatcctgagcaaagagtttggcctccgccttgattccagatggagccttcctttaaccctgatgtactggattggcttcctgctggaagtagtgagcttcctactcagcccaatttactcctatcaaccccccttcaaccgccacacagtcacattatcaaatagtgtgttcaccttctcttacaagaaggctcagcgagatctggcgtataagccactctacagctgggaggaagccaagcagaaaaccgtggagtgggttggttcccttgtggaccggcacaaggagaccctgaagtccaagactcagtgatttaaggatgacagagatgtgcatgtgggtattgttaggaaatgtcatcaaactccacccacctggcttcatacagaaggcaacaggggcacaagcccaggtcctgctgcctctctttcacacaatgcccaacttactgtcttcttcatgtcatcaaaatctgcacagtcactggcccaaccagaactttctgtcctaatcatacaccagaagacaaacaatatgatttgctgttaccaaatctcagtggctgattctgaacaattgtggtctctcttaacttgaggttctcttttgactaatagagctccatttcccctcttaaatgagaaagcatttcttttctctttaatctcctattccttcacacagttcaacataaagagcaataaatgttttaatgcttaa

SEQ ID NO: 457884 - DNA, 839 bp, Homo sapiens
  misc_feature (755)..(755): n is a, c, g, or t
  misc_feature (775)..(775): n is a, c, g, or t
  misc_feature (781)..(781): n is a, c, g, or t
cacttatctgatacgataatcaaaatgtcatatctaatctctactcatctcacgatttggtacatatcaatataatcattatatcaggcagtaaggacttggactcctctgtccagcttttaacaatctaagttacgccctcttctgggtcacgctagaatcagatctgctctccagcatcttctgtttcctggcaagtgtttcctgctactttggattggccacgatgggctggagctgccttgtgacaggagcaggagggcttctgggtcagaggatcgtccgcctgttggtggaagagaaggaactgaaggagatcagggccttggacaaggccttcagaccagaattgagagaggaattttctaagctccagaacaggaccaagctgactgtacttgaaggagacattctggatgagccattcctgaaaagagcctgccaggacgtctcggtcgtcatccacaccgcctgtatcattgatgtctttggtgtcactcacagagagtccatcatgaatgtcaatgtgaaaggtacccagctactgttggaggcctgtgtccaagccagtgtgccagtcttcatctacaccagtagcatagaggtagccgggcccaactcctacaaggaaatcatccagaacggccacgaagaagagcctctggaaaacacatggcccactccatacccgtacagcaaaaagcttgctgagaaggctgtgctggcggctaatgggtggaatctaaaaggggccntttccttttgccgttaaatnaggccngacacaaagggatccctcaaggggggaaagcttcccccaccacccttttgggacggga

SEQ ID NO: 457885 - DNA, 843 bp, Homo sapiens
cacttatctgatacgataatcaaaatgtcatatctaatctctactcatctcacgatttggtacatatcaatataatcattatatcaggcagtaaggacttggactcctctgtccagcttttaacaatctaagttacgccctcttctgggtcacgctagaatcagatctgctctccagcatcttctgtttcctggcaagtgtttcctgctactttggattggccacgatgggctggagctgccttgtgacaggagcaggagggcttctgggtcagaggatcgtccgcctgttggtggaagagaaggaactgaaggagatcagggccttggacaaggccttcagaccagaattgagagaggaattttctaagctccagaacaggaccaagctgactgtacttgaaggagacattctggatgagccattcctgaaaagagcctgccaggacgtctcggtcgtcatccacaccgcctgtatcattgatgtctttggtgtcactcacagagagtccatcatgaatgtcaatgtgaaaggtacccagctactgttggaggcctgtgtccaagccagtgtgccagtcttcatctacaccagtagcatagaggtagccgggcccaactcctacaaggaaatcatccagaacggccacgaagaagagcctctggaaaacacatggcccactccatacccgtacagcaaaaagcttgctgagaaggctgtgctggcggctaatgggtggaatctaaaagggccctcctttttggccggtaaataaaggcctgacacaatggggatcctccaagattggaaagactcctcacccacccacctttgttgaacgga

SEQ ID NO: 457886 - DNA, 833 bp, Homo sapiens
cacttatctgatacgataatcaaaatgtcatatctaatctctactcatctcacgatttggtacatatcaatataatcattatatcaggcagtaaggacttggactcctctgtccagcttttaacaatctaagttacgccctcttctgggtcacgctagaatcagatctgctctccagcatcttctgtttcctggcaagtgtttcctgctactttggattggccacgatgggctggagctgccttgtgacaggagcaggagggcttctgggtcagaggatcgtccgcctgttggtggaagagaaggaactgaaggagatcagggccttggacaaggccttcagaccagaattgagagaggaattttctaagctccagaacaggaccaagctgactgtacttgaaggagacattctggatgagccattcctgaaaagagcctgccaggacgtctcggtcgtcatccacaccgcctgtatcattgatgtctttggtgtcactcacagagagtccatcatgaatgtcaatgtgaaaggtacccagctactgttggaggcctgtgtccaagccagtgtgccagtcttcatctacaccagtagcatagaggtagccgggcccaactcctacaaggaaatcatccagaacggccacgaagaagagcctctggaaaacacatggcccactccatacccgtacagcaaaaagcttgctgagaaggctgtgctggcggctaatgggtggaatctaaaatccttttgccacttaataggcgccaccacaaggggcctgtcaggggggaagattttcctcaacccaccatgttgaaggggcctga

SEQ ID NO: 457887 - DNA, 1700 bp, Homo sapiens
cacttatctgatacgataatcaaaatgtcatatctaatctctactcatctcacgatttggtacatatcaatataatcattatatcaggcagtaaggacttggactcctctgtccagcttttaacaatctaagttacgccctcttctgggtcacgctagaatcagatctgctctccagcatcttctgtttcctggcaagtgtttcctgctactttggattggccacgatgggctggagctgccttgtgacaggagcaggagggcttctgggtcagaggatcgtccgcctgttggtggaagagaaggaactgaaggagatcagggccttggacaaggccttcagaccagaattgagagaggaattttctaagctccagaacaggaccaagctgactgtacttgaaggagacattctggatgagccattcctggtctttggtgtcactcacagagagtccatcatgaatgtcaatgtgaaaggtacccagctactgttggaggcctgtgtccaagccagtgtgccagtcttcatctacaccagtagcatagaggtagccgggcccaactcctacaaggaaatcatccagaacggccacgaagaagagcctctggaaaacacatggcccactccatacccgtacagcaaaaagcttgctgagaaggctgtgctggcggctaatgggtggaatctaaaaaaatggtgataccttgtacacttgtgcgttaagacccacatatatctatggggaaggaggcccattcctttctgccagtataaatgaggccctgaacaacaatgggatcctgtcaagtgttggaaagttctctacagtcaacccagtctatgttggcaacgtggcctgggcccacattctggccttgagggctctgcgggaccccaagaaggccccaagtgtccgaggtcaattctattacatctcagatgacacgcctcaccaaagctatgataaccttaattacatcctgagcaaagagtttggcctccgccttgattccagatggagccttcctttaaccctgatgtactggattggcttcctgctggaagtagtgagcttcctactcagcccaatttactcctatcaaccccccttcaaccgccacacagtcacattatcaaatagtgtgttcaccttctcttacaagaaggctcagcgagatctggcgtataagccactctacagctgggaggaagccaagcagaaaaccgtggagtgggttggttcccttgtggaccggcacaaggagaccctgaagtccaagactcagtgatttaaggatgacagagatgtgcatgtgggtattgttaggaaatgtcatcaaactccacccacctggcttcatacagaaggcaacaggggcacaagcccaggtcctgctgcctctctttcacacaatgcccaacttactgtcttcttcatgtcatcaaaatctgcacagtcactggcccaaccagaactttctgtcctaatcatacaccagaagacaaacaatatgatttgctgttaccaaatctcagtggctgattctgaacaattgtggtctctcttaacttgaggttctcttttgactaatagagctccatttcccctcttaaatgagaaagcatttcttttctctttaatctcctattccttcacacagttcaacataaagagcaataaatgttttaatgcttaa

SEQ ID NO: 457888 - DNA, 1678 bp, Homo sapiens
ccccgggctgtacgaattcggctcgagctcctctgttcagcttttaacaatctattttacgccctcttctgggtcacgctagaatcagatctgctctccagcatcttctgtttcctggcaagtgtttcctgctactttggattggccacgatgggctggagctgccttgtgacaggagcaggagggcttctgggtcagaggatcgtccgcctgttggtggaagagaaggaactgaaggagatcagggccttggacaaggccttcagaccagaattgagagaggaattttctaagctccagaacaggaccaagctgactgtacttgaaggagacattctggatgagccattcctgaaaagagcctgccaggacgtctcggtcgtcatccacaccgcctgtatcattgatgtctttggtgtcactcacagagagtccatcatgaatgtcaatgtgaaaggtacccagctactgttggaggcctgtgtccaagccagtgtgccagtcttcatctacaccagtagcatagaggtagccgggcccaactcctacaaggaaatcatccagaacggccacgaagaagagcctctggaaaacacatggcccactccatacccgtacagcaaaaagcttgctgagaaggctgtgctggcggctaatgggtggaatctaaaaaaatggtgataccttgtacacttgtgcgttaagacccacatatatctatggggaaggaggcccattcctttctgccagtataaatgaggccctgaacaacaatgggatcctgtcaagtgttggaaagttctctacagtcaacccagtctatgttggcaacgtggcctgggcccacattctggccttgagggctctgcgggaccccaagaaggccccaagtgtccgaggtcaattctattacatctcagatgacacgcctcaccaaagctatgataaccttaattacatcctgagcaaagagtttggcctccgccttgattccagatggagccttcctttaaccctgatgtactggattggcttcctgctggaagtagtgagcttcctactcagcccaatttactcctatcaaccccccttcaaccgccacacagtcacattatcaaatagtgtgttcaccttctcttacaagaaggctcagcgagatctggcgtataagccactctacagctgggaggaagccaagcagaaaaccgtggagtgggttggttcccttgtggaccggcacaaggagaccctgaagtccaagactcagtgatttaaggatgacagagatgtgcatgtgggtattgttaggaaatgtcatcaaactccacccacctggcttcatacagaaggcaacaggggcacaagcccaggtcctgctgcctctctttcacacaatgcccaacttactgtcttcttcatgtcatcaaaatctgcacagtcactggcccaaccagaactttctgtcctaatcatacaccagaagacaaacaatatgatttgctgttaccaaatctcagtggctgattctgaacaattgtggtctctcttaacttgaggttctcttttgactaatagagctccatttcccctcttaaatgagaaagcatttcttttctctttaatctcctattccttcacacagttcaacataaagagcaataaatgttttaatgcttaa

SEQ ID NO: 457889 - DNA, 1828 bp, Homo sapiens
cacttatctgatacgataatcaaaatgtcatatctaatctctactcatctcacgatttggtacatatcaatataatcattatatcaggcagtaaggacttggactcctctgtccagcttttaacaatctaagttacggttagagctttctccttttctttcaactactcctggcagttgtggggtcatggaatttttgtaaaaaatggggtggaggaaaataaggcatctgctgagtgtataaccattttacctcttgtttttagccctcttctgggtcacgctagaatcagatctgctctccagcatcttctgtttcctggcaagtgtttcctgctactttggattggccacgatgggctggagctgccttgtgacaggagcaggagggcttctgggtcagaggatcgtccgcctgttggtggaagagaaggaactgaaggagatcagggccttggacaaggccttcagaccagaattgagagaggaattttctaagctccagaacaggaccaagctgactgtacttgaaggagacattctggatgagccattcctggtctttggtgtcactcacagagagtccatcatgaatgtcaatgtgaaaggtacccagctactgttggaggcctgtgtccaagccagtgtgccagtcttcatctacaccagtagcatagaggtagccgggcccaactcctacaaggaaatcatccagaacggccacgaagaagagcctctggaaaacacatggcccactccatacccgtacagcaaaaagcttgctgagaaggctgtgctggcggctaatgggtggaatctaaaaaaatggtgataccttgtacacttgtgcgttaagacccacatatatctatggggaaggaggcccattcctttctgccagtataaatgaggccctgaacaacaatgggatcctgtcaagtgttggaaagttctctacagtcaacccagtctatgttggcaacgtggcctgggcccacattctggccttgagggctctgcgggaccccaagaaggccccaagtgtccgaggtcaattctattacatctcagatgacacgcctcaccaaagctatgataaccttaattacatcctgagcaaagagtttggcctccgccttgattccagatggagccttcctttaaccctgatgtactggattggcttcctgctggaagtagtgagcttcctactcagcccaatttactcctatcaaccccccttcaaccgccacacagtcacattatcaaatagtgtgttcaccttctcttacaagaaggctcagcgagatctggcgtataagccactctacagctgggaggaagccaagcagaaaaccgtggagtgggttggttcccttgtggaccggcacaaggagaccctgaagtccaagactcagtgatttaaggatgacagagatgtgcatgtgggtattgttaggaaatgtcatcaaactccacccacctggcttcatacagaaggcaacaggggcacaagcccaggtcctgctgcctctctttcacacaatgcccaacttactgtcttcttcatgtcatcaaaatctgcacagtcactggcccaaccagaactttctgtcctaatcatacaccagaagacaaacaatatgatttgctgttaccaaatctcagtggctgattctgaacaattgtggtctctcttaacttgaggttctcttttgactaatagagctccatttcccctcttaaatgagaaagcatttcttttctctttaatctcctattccttcacacagttcaacataaagagcaataaatgttttaatgcttaa

SEQ ID NO: 457890 - DNA, 2117 bp, Homo sapiens
cacttatctgatacgataatcaaaatgtcatatctaatctctactcatctcacgatttggtacatatcaatataatcattatatcaggcagtaaggacttggactcctctgtccagcttttaacaatctaagttacgccctcttctgggtcacgctagaatcagatctgctctccagcatcttctgtttcctggcaagtgtttcctgctactttggattggccacgatgggctggagctgccttgtgacaggagcaggagggcttctgggtcagaggatcgtccgcctgttggtggaagagaaggaactgaaggagatcagggccttggacaaggccttcagaccagaattgagagaggaattttctaagctccagaacaggaccaagctgactgtacttgaaggagacattctggatgagccattcctggtctttggtgtcactcacagagagtccatcatgaatgtcaatgtgaaaggtacagtagcctggggaggagataaaacaagttggttaaatgaggatcagaaagaaggacaagaaagggaagagaagtcactccattgaacacctgctgagctcttggccaagtgcctttgctgatcactactgactggggagttcaaggctggtaacctcagttttttagatgagaaaactagggctgagagacagcaagtaacttgtccaaggccccaaaagtaagtaagtaagtaggagagttagactttaaactcactcctgtgtgactccaaaggctgtggaagctctttctactgtggccccaatcccccgggccagaatcagaccttccaggtgccaccatagtcatcattttgaaccttgtgtgtaggctgatgagaacattcagagtctttctgcccacctcaaagaagtcctctcaagagaactagcaaagctggttcacagaggtctgtcaggacagaattatccagcacatgccttcccataatattttcttaacaaaaagagtttcccagtgtccagaatacaatctcttcagctcaccacagggtctactattacagagccatttcctgccaggtgcccaaagtgcaccctcatttgatccacattttttaaaggaatcttgccatgcagtctcaccctctgattcccagagcccagtctcttcaaaacacagctccccactgctggcctgaccctccacattcagactacccaaactccttttataaagcaactaattgcttttgagtctccagcactgtctaaaaaaacaaacaaaaaaaaaacctttccagtttctacatagccatacccctaagtaccgctatagttcaaggagtgtgctaagagtgaatagttttttgttttaattttgactttccacagctcccaaaaacaagggataagaaatgacaaggggagtgttagaggcgtctgtttcttaaaaccattatcactcccgggcttagaaaatacttcacaatgatggccatttcatgaggctgtctctccagaaactcaaattgcacagagactttaaaagtggctaagaatacaaaataagtaaataatacctccatgagctttgcttccacacagctcaggtgatgctgacaggtcttcccagcgcaggtgttatcagcagagggcacactccctccccagtcctccaccaggctccacaggaaatgccagggcaggatttaaaggaaggtttatcacccccactttatataactgggtaacagagtcatagccagaattggaagcagcttttccagggaacacacaatcaggaaaggagtgtgggtttccagcatctccccacaacccactgtttgctcgatgactccagggatggtctttgtgacaaagttttattaatccattgcaaaatgagaaaaataccagcaattctatgtatatctaagagtgtatattgcctatattcaactgtgaatttgtgtgtgtaacacaaattcttccactgccctttcttgcctaaggactgattgggactgttcatattctcagagtatagcctcctgattttttagattttaaatgatctgtctttaattgtattgatgacaaatcatactttttcaatatccttacttggcaa

SEQ ID NO: 457891 - DNA, 1957 bp, Homo sapiens
cacttatctgatacgataatcaaaatgtcatatctaatctctactcatctcacgatttggtacatatcaatataatcattatatcaggcagtaaggacttggactcctctgtccagcttttaacaatctaagttacggttagagctttctccttttctttcaactactcctggcagttgtggggtcatggaatttttgtaaaaaatggggtggaggaaaataaggcatctgctgagtgtataaccattttacctcttgtttttagccctcttctgggtcacgctagaatcagatctgctctccagcatcttctgtttcctggcaagtgtttcctgctactttggattggccacgatgggctggagctgccttgtgacaggagcaggagggcttctgggtcagaggatcgtccgcctgttggtggaagagaaggaactgaaggagatcagggccttggacaaggccttcagaccagaattgagagaggaattttctaatccatggaaactcaccggggaagagtcattttctatcggctttggacttctgctatgaaatggcaattcctttgagccagtctgtctaaagtcggcagcaaaggagaagcagatgaagggagtagaaaagagctccagaacaggaccaagctgactgtacttgaaggagacattctggatgagccattcctgaaaagagcctgccaggacgtctcggtcgtcatccacaccgcctgtatcattgatgtctttggtgtcactcacagagagtccatcatgaatgtcaatgtgaaaggtacccagctactgttggaggcctgtgtccaagccagtgtgccagtcttcatctacaccagtagcatagaggtagccgggcccaactcctacaaggaaatcatccagaacggccacgaagaagagcctctggaaaacacatggcccactccatacccgtacagcaaaaagcttgctgagaaggctgtgctggcggctaatgggtggaatctaaaagaggcccattcctttctgccagtataaatgaggccctgaacaacaatgggatcctgtcaagtgttggaaagttctctacagtcaacccagtctatgttggcaacgtggcctgggcccacattctggccttgagggctctgcgggaccccaagaaggccccaagtgtccgaggtcaattctattacatctcagatgacacgcctcaccaaagctatgataaccttaattacatcctgagcaaagagtttggcctccgccttgattccagatggagccttcctttaaccctgatgtactggattggcttcctgctggaagtagtgagcttcctactcagcccaatttactcctatcaaccccccttcaaccgccacacagtcacattatcaaatagtgtgttcaccttctcttacaagaaggctcagcgagatctggcgtataagccactctacagctgggaggaagccaagcagaaaaccgtggagtgggttggttcccttgtggaccggcacaaggagaccctgaagtccaagactcagtgatttaaggatgacagagatgtgcatgtgggtattgttaggaaatgtcatcaaactccacccacctggcttcatacagaaggcaacaggggcacaagcccaggtcctgctgcctctctttcacacaatgcccaacttactgtcttcttcatgtcatcaaaatctgcacagtcactggcccaaccagaactttctgtcctaatcatacaccagaagacaaacaatatgatttgctgttaccaaatctcagtggctgattctgaacaattgtggtctctcttaacttgaggttctcttttgactaatagagctccatttcccctcttaaatgagaaagcatttcttttctctttaatctcctattccttcacacagttcaacataaagagcaataaatgttttaatgcttaa

SEQ ID NO: 457892 - DNA, 2356 bp, Homo sapiens
cacttatctgatacgataatcaaaatgtcatatctaatctctactcatctcacgatttggtacatatcaatataatcattatatcaggcagtaaggacttggactcctctgtccagcttttaacaatctaagttacgccctcttctgggtcacgctagaatcagatctgctctccagcatcttctgtttcctggcaagtgtttcctgctactttggattggccacgatgggctggagctgccttgtgacaggagcaggagggcttctgggtcagaggatcgtccgcctgttggtggaagagaaggaactgaaggagatcagggccttggacaaggccttcagaccagaattgagagaggaattttctaatccatggaaactcaccggggaagagtcattttctatcggctttggacttctgctatgaaatggcaattcctttgagccagtctgtctaaagtcggcagcaaaggagaagcagatgaagggagtagaaaagagctccagaacaggaccaagctgactgtacttgaaggagacattctggatgagccattcctgaaaagagcctgccaggacgtctcggtcgtcatccacaccgcctgtatcattgatgtctttggtgtcactcacagagagtccatcatgaatgtcaatgtgaaaggtacagtagcctggggaggagataaaacaagttggttaaatgaggatcagaaagaaggacaagaaagggaagagaagtcactccattgaacacctgctgagctcttggccaagtgcctttgctgatcactactgactggggagttcaaggctggtaacctcagttttttagatgagaaaactagggctgagagacagcaagtaacttgtccaaggccccaaaagtaagtaagtaagtaggagagttagactttaaactcactcctgtgtgactccaaaggctgtggaagctctttctactgtggccccaatcccccgggccagaatcagaccttccaggtgccaccatagtcatcattttgaaccttgtgtgtaggctgatgagaacattcagagtctttctgcccacctcaaagaagtcctctcaagagaactagcaaagctggttcacagaggtctgtcaggacagaattatccagcacatgccttcccataatattttcttaacaaaaagagtttcccagtgtccagaatacaatctcttcagctcaccacagggtctactattacagagccatttcctgccaggtgcccaaagtgcaccctcatttgatccacattttttaaaggaatcttgccatgcagtctcaccctctgattcccagagcccagtctcttcaaaacacagctccccactgctggcctgaccctccacattcagactacccaaactccttttataaagcaactaattgcttttgagtctccagcactgtctaaaaaaacaaacaaaaaaaaaacctttccagtttctacatagccatacccctaagtaccgctatagttcaaggagtgtgctaagagtgaatagttttttgttttaattttgactttccacagctcccaaaaacaagggataagaaatgacaaggggagtgttagaggcgtctgtttcttaaaaccattatcactcccgggcttagaaaatacttcacaatgatggccatttcatgaggctgtctctccagaaactcaaattgcacagagactttaaaagtggctaagaatacaaaataagtaaataaaaatgatcctttgcctaggaaattccttccttcttcgagggaagacactccagatacctccatgagctttgcttccacacagctcaggtgatgctgacaggtcttcccagcgcaggtgttatcagcagagggcacactccctccccagtcctccaccaggctccacaggaaatgccagggcaggatttaaaggaaggtttatcacccccactttatataactgggtaacagagtcatagccagaattggaagcagcttttccagggaacacacaatcaggaaaggagtgtgggtttccagcatctccccacaacccactgtttgctcgatgactccagggatggtctttgtgacaaagttttattaatccattgcaaaatgagaaaaataccagcaattctatgtatatctaagagtgtatattgcctatattcaactgtgaatttgtgtgtgtaacacaaattcttccactgccctttcttgcctaaggactgattgggactgttcatattctcagagtatagcctcctgattttttagattttaaatgatctgtctttaattgtattgatgacaaatcatactttttcaatatccttacttggcaa

SEQ ID NO: 457893 - DNA, 2171 bp, Homo sapiens
cacttatctgatacgataatcaaaatgtcatatctaatctctactcatctcacgatttggtacatatcaatataatcattatatcaggcagtaaggacttggactcctctgtccagcttttaacaatctaagttacgccctcttctgggtcacgctagaatcagatctgctctccagcatcttctgtttcctggcaagtgtttcctgctactttggattggccacgatgggctggagctgccttgtgacaggagcaggagggcttctgggtcagaggatcgtccgcctgttggtggaagagaaggaactgaaggagatcagggccttggacaaggccttcagaccagaattgagagaggaattttctaagctccagaacaggaccaagctgactgtacttgaaggagacattctggatgagccattcctgaaaagagcctgccaggacgtctcggtcgtcatccacaccgcctgtatcattgatgtctttggtgtcactcacagagagtccatcatgaatgtcaatgtgaaaggtacagtagcctggggaggagattcactccattgaacacctgctgagctcttggccaagtgcctttgctgatcactactgactggggagttcaaggctggtaacctcagttttttagatgagaaaactagggctgagagacagcaagtaacttgtccaaggccccaaaagtaagtaagtaagtaggagagttagactttaaactcactcctgtgtgactccaaaggctgtggaagctctttctactgtggccccaatcccccgggccagaatcagaccttccaggtgccaccatagtcatcattttgaaccttgtgtgtaggctgatgagaacattcagagtctttctgcccacctcaaagaagtcctctcaagagaactagcaaagctggttcacagaggtctgtcaggacagaattatccagcacatgccttcccataatattttcttaacaaaaagagtttcccagtgtccagaatacaatctcttcagctcaccacagggtctactattacagagccatttcctgccaggtgcccaaagtgcaccctcatttgatccacattttttaaaggaatcttgccatgcagtctcaccctctgattcccagagcccagtctcttcaaaacacagctccccactgctggcctgaccctccacattcagactacccaaactccttttataaagcaactaattgcttttgagtctccagcactgtctaaaaaaacaaacaaaaaaaaaacctttccagtttctacatagccatacccctaagtaccgctatagttcaaggagtgtgctaagagtgaatagttttttgttttaattttgactttccacagctcccaaaaacaagggataagaaatgacaaggggagtgttagaggcgtctgtttcttaaaaccattatcactcccgggcttagaaaatacttcacaatgatggccatttcatgaggctgtctctccagaaactcaaattgcacagagactttaaaagtggctaagaatacaaaataagtaaataaaaatgatcctttgcctaggaaattccttccttcttcgagggaagacactccagatacctccatgagctttgcttccacacagctcaggtgatgctgacaggtcttcccagcgcaggtgttatcagcagagggcacactccctccccagtcctccaccaggctccacaggaaatgccagggcaggatttaaaggaaggtttatcacccccactttatataactgggtaacagagtcatagccagaattggaagcagcttttccagggaacacacaatcaggaaaggagtgtgggtttccagcatctccccacaacccactgtttgctcgatgactccagggatggtctttgtgacaaagttttattaatccattgcaaaatgagaaaaataccagcaattctatgtatatctaagagtgtatattgcctatattcaactgtgaatttgtgtgtgtaacacaaattcttccactgccctttcttgcctaaggactgattgggactgttcatattctcagagtatagcctcctgattttttagattttaaatgatctgtctttaattgtattgatgacaaatcatactttttcaatatccttacttggcaa

SEQ ID NO: 457894 - DNA, 1227 bp, Homo sapiens
cacttatctgatacgataatcaaaatgtcatatctaatctctactcatctcacgatttggtacatatcaatataatcattatatcaggcagtaaggacttggactcctctgtccagcttttaacaatctaagttacgccctcttctgggtcacgctagaatcagatctgctctccagcatcttctgtttcctggcaagtgtttcctgctactttggattggccacgatgggctggagctgccttgtgacaggaagcccagtctcttcaaaacacagctccccactgctggcctgaccctccacattcagactacccaaactccttttataaagcaactaattgcttttgagtctccagcactgtctaaaaaaacaaacaaaaaaaaaacctttccagtttctacatagccatacccctaagtaccgctatagttcaaggagtgtgctaagagtgaatagttttttgttttaattttgactttccacagctcccaaaaacaagggataagaaatgacaaggggagtgttagaggcgtctgtttcttaaaaccattatcactcccgggcttagaaaatacttcacaatgatggccatttcatgaggctgtctctccagaaactcaaattgcacagagactttaaaagtggctaagaatacaaaataagtaaataatacctccatgagctttgcttccacacagctcaggtgatgctgacaggtcttcccagcgcaggtgttatcagcagagggcacactccctccccagtcctccaccaggctccacaggaaatgccagggcaggatttaaaggaaggtttatcacccccactttatataactgggtaacagagtcatagccagaattggaagcagcttttccagggaacacacaatcaggaaaggagtgtgggtttccagcatctccccacaacccactgtttgctcgatgactccagggatggtctttgtgacaaagttttattaatccattgcaaaatgagaaaaataccagcaattctatgtatatctaagagtgtatattgcctatattcaactgtgaatttgtgtgtgtaacacaaattcttccactgccctttcttgcctaaggactgattgggactgttcatattctcagagtatagcctcctgattttttagattttaaatgatctgtctttaattgtattgatgacaaatcatactttttcaatatccttacttggcaa

SEQ ID NO: 457895 - DNA, 778 bp, Homo sapiens
cacttatctgatacgataatcaaaatgtcatatctaatctctactcatctcacgatttggtacatatcaatataatcattatatcaggcagtaaggacttggactcctctgtccagcttttaacaatctaagttacgccctcttctgggtcacgctagaatcagatctgctctccagcatcttctgtttcctggcaagtgtttcctgctactttggattggccacgatgggctggagctgccttgtgacaggagcaggagggcttctgggtcagaggatcgtccgcctgttggtggaagagaaggaactgaaggagatcagggccttggacaaggccttcagaccagaattgagagaggaattttctagttccaaaccagaccaagctgactgactttgaagggaacatcctgggtaggcccttcccgaaaaaaaccccccagaaccttttggttgtaacaaacccgccgggtatatggtggttttggggggaccccacagaaggccccctttaaatgcaattgggaaagggccccctctcttttggggaggccttttcaaacaacaggggccccttttttttttccccccgaggttaaagggggcccggccccccccccctcagggaaaatttccccaaacgcccccaaaaaaaaccctttggaaaaaaaaaggcctacttttaccccccaaaaaaaaaactttttaaaaaatgtcccccccccttattgggggagaaaaaaaaaagggggcctcccccctccgggggggaaaaccc

SEQ ID NO: 457896 - DNA, 721 bp, Homo sapiens
agaacaggaccaagctgactgtacttgaaggagacattctggatgagccattcctgaaaagagcctgccaggacgtctcggtcgtcatccacaccgcctgtatcattgatgtctttggtgtcactcacagagagtccatcatgaatgtcaatgtgaaaggtacagtagcctggggaggagataaaacaagttggttaaatgaggatcagaaagaaggacaagaaagggaagagaagtcactccattgaacacctgctgagctcttggccaagtgcctttgctgatcactactgactggggagttcaaggctggtaacctcagttttttagatgagaaaactagggctgagagacagcaagtaacttgtccaaggccccaaaagtaagtaagtaagtaggagagttagactttaaactcactcctgtgtgactccaaaggctgtggaagctctttctactgtggccccaatcaaaagtcaactaaactccaacttcaaattcacgatatccagctactccttggctccccgggccagaatcagaccttccaggtgccaccatagtcatcattttgaaccttgtgtgtaggctgatgagaacattcagagtctttctgcccacctcaaagaagtcctctcaagagaactagcaaagctggttcacagaggtctgtcaggacagaattatccagcacatgccttcccataatattttcttaaca

SEQ ID NO: 457897 - DNA, 1869 bp, Homo sapiens
  misc_feature (1707)..(1707): n is a, c, g, or t
  misc_feature (1712)..(1712): n is a, c, g, or t
  misc_feature (1733)..(1733): n is a, c, g, or t
  misc_feature (1742)..(1742): n is a, c, g, or t
  misc_feature (1754)..(1754): n is a, c, g, or t
  misc_feature (1759)..(1760): n is a, c, g, or t
  misc_feature (1764)..(1764): n is a, c, g, or t
  misc_feature (1767)..(1767): n is a, c, g, or t
  misc_feature (1771)..(1771): n is a, c, g, or t
  misc_feature (1787)..(1787): n is a, c, g, or t
  misc_feature (1794)..(1794): n is a, c, g, or t
  misc_feature (1800)..(1800): n is a, c, g, or t
  misc_feature (1805)..(1805): n is a, c, g, or t
cacttatctgatacgataatcaaaatgtcatatctaatctctactcatctcacgatttggtacatatcaatataatcattatatcaggcagtaaggacttggactcctctgtccagcttttaacaatctaagttacgccctcttctgggtcacgctagaatcagatctgctctccagcatcttctgtttcctggcaagtgtttcctgctactttggattggccacgatgggctggagctgccttgtgacaggagcaggagggcttctgggtcagaggatcgtccgcctgttggtggaagagaaggaactgaaggagatcagggccttggacaaggccttcagaccagaattgagagaggaattttctaagctccagaacaggaccaagctgactgtacttgaaggagacattctggatgagccattcctgaaaagagcctgccaggacgtctcggtcgtcatccacaccgcctgtatcattgatgtctttggtgtcactcacagagagtccatcatgaatgtcaatgtgaaaggtacccagctactgttggaggcctgtgtccaagccagtgtgccagtcttcatctacaccagtagcatagaggtagccgggcccaactcctacaaggaaatcatccagaacggccacgaagaagagcctctggaaaacacatggcccactccatacccgtacagcaaaaagcttgctgagaaggctgtgctggcggctaatgggtggaatctaaaagaggcccattcctttctgccagtataaatgaggccctgaacaacaatgggatcctgtcaagtgttggaaagttctctacagtcaacccagtctatgttggcaacgtggcctgggcccacattctggccttgagggctctgcgggaccccaagaaggccccaagtgtccgaggtcaattctattacatctcagatgacacgcctcaccaaagctatgataaccttaattacatcctgagcaaagagtttggcctccgccttgattccagatggagccttcctttaaccctgatgtactggattggcttcctgctggaagtagtgagcttcctactcagcccaatttactcctatcaaccccccttcaaccgccacacagtcacattatcaaatagtgtgttcaccttctcttacaagaaggctcagcgagatctggcgtataagccactctacagctgggaggaagccaagcagaaaaccgtggagtgggttggttcccttgtggaccggcacaaggagaccctgaagtccaagactcagtgatttaaggatgacagagatgtgcatgtgggtattgttaggaaatgtcatcaaactccacccacctggcttcatacagaaggcaacaggggcacaagcccaggtcctgctgcctctctttcacacaatgcccaacttactgtcttcttcatgtcatcaaaatctgcacagtcactggcccaaccagaactttctgtcctaatcatacaccagaagacaaacaatatgatttgctgttaccaaatctcagtggctgattctgaacaattgtggtctctcttaacttgaggttctcttttgactaatagagctccatttcccctcttaaatgagaaagcatttcttttctctttaatctcctattccttcacacagttcaacataaagagcaataaatgttttaatgcttaaaaaaaaaanaacanaccaaaaaaaaaaaaactcgnggggggccngtacccatttgncctanngggngcngttnacattaattggccggngtttaanacgggngactnggaaaaccttggcttgacccaacttaaatggctttgagcctttaccaacagttgggcaacctta

SEQ ID NO: 457898 - DNA, 1642 bp, Homo sapiens
cacttatctgatacgataatcaaaatgtcatatctaatctctactcatctcacgatttggtacatatcaatataatcattatatcaggcagtaaggacttggactcctctgtccagcttttaacaatctaagttacgccctcttctgggtcacgctagaatcagatctgctctccagcatcttctgtttcctggcaagtgtttcctgctactttggattggccacgatgggctggagctgccttgtgacaggagcaggagggcttctgggtcagaggatcgtccgcctgttggtggaagagaaggaactgaaggagatcagggccttggacaaggccttcagaccagaattgagagaggaattttctaagctccagaacaggaccaagctgactgtacttgaaggagacattctggatgagccattcctgaaaagagcctgccaggacgtctcggtcgtcatccacaccgcctgtatcattgatgtctttggtgtcactcacagagagtccatcatgaatgtcaatgtgaaaggtacccagctactgttggaggcctgtgtccaagccagtgtgccagtcttcatctacaccagtagcatagaggtagccgggcccaactcctacaaggaaatcatccagaacggccacgaagaagagcctctggaaaacacatggcccactccatacccgtacagcaaaaagcttgctgagaaggctgtgctggcggctaatgggtggaatctaaaagaggcccattcctttctgccagtataaatgaggccctgaacaacaatgggatcctgtcaagtgttggaaagttctctacagtcaacccagtctatgttggcaacgtggcctgggcccacattctggccttgagggctctgcgggaccccaagaaggccccaagtgtccgaggtcaattctattacatctcagatgacacgcctcaccaaagctatgataaccttaattacatcctgagcaaagagtttggcctccgccttgattccagatggagccttcctttaaccctgatgtactggattggcttcctgctggaagtagtgagcttcctactcagcccaatttactcctatcaaccccccttcaaccgccacacagtcacattatcaaatagtgtgttcaccttctcttacaagaaggctcagcgagatctggcgtataagccactctacagctgggaggaagccaagcagaaaaccgtggagtgggttggttcccttgtggaccggcacaaggagaccctgaagtccaagactcagtgatttaaggatgacagagatgtgcatgtgggtattgttaggaaatgtcatcaaactccacccacctggcttcatacagaaggcaacaggggcacaagcccaggtcctgctgcctctctttcacacaatgcccaacttactgtcttcttcatgtcatcaaaatctgcacagtcactggcccaaccagaactttctgtcctaatcatacaccagaagacaaacaatatgatttgctgttaccaaatctaatagagctccatttcccctcttaaatgagaaagcatttcttttctctttaatctcctattccttcacacagttcaacataaagagcaataaatgttttaatgcttaa

SEQ ID NO: 457899 - DNA, 1645 bp, Homo sapiens
cacttatctgatacgataatcaaaatgtcatatctaatctctactcatctcacgatttggtacatatcaatataatcattatatcaggcagtaaggacttggactcctctgtccagcttttaacaatctaagttacgccctcttctgggtcacgctagaatcagatctgctctccagcatcttctgtttcctggcaagtgtttcctgctactttggattggccacgatgggctggagctgccttgtgacaggagcaggagggcttctgggtcagaggatcgtccgcctgttggtggaagagaaggaactgaaggagatcagggccttggacaaggccttcagaccagaattgagagaggaattttctaagctccagaacaggaccaagctgactgtacttgaaggagacattctggatgagccattcctgaaaagagcctgccaggacgtctcggtcgtcatccacaccgcctgtatcattgatgtctttggtgtcactcacagagagtccatcatgaatgtcaatgtgaaaggtacccagctactgttggaggcctgtgtccaagccagtgtgccagtcttcatctacaccagtagcatagaggtagccgggcccaactcctacaaggaaatcatccagaacggccacgaagaagagcctctggaaaacacatggcccactccatacccgtacagcaaaaagcttgctgagaaggctgtgctggcggctaatgggtggaatctaaaagaggcccattcctttctgccagtataaatgaggccctgaacaacaatgggatcctgtcaagtgttggaaagttctctacagtcaacccagtctatgttggcaacgtggcctgggcccacattctggccttgagggctctgcgggaccccaagaaggccccaagtgtccgaggtcaattctattacatctcagatgacacgcctcaccaaagctatgataaccttaattacatcctgagcaaagagtttggcctccgccttgattccagatggagccttcctttaaccctgatgtactggattggcttcctgctggaagtagtgagcttcctactcagcccaatttactcctatcaaccccccttcaaccgccacacagtcacattatcaaatagtgtgttcaccttctcttacaagaaggctcagcgagatctggcgtataagccactctacagctgggaggaagccaagcagaaaaccgtggagtgggttggttcccttgtggaccggcacaaggagaccctgaagtccaagactcagtgatttaaggatgacagagatgtgcatgtgggtattgttaggaaatgtcatcaaactccacccacctggcttcatacagaaggcaacaggggcacaagcccaggtcctgctgcctctctttcacacaatgcccaacttactgtcttcttcatgtcatcaaaatctgcacagtcactggcccaaccagaactttctgtcctaatcatacaccagaagacaaacaatatgatttgctgttaccaaatctcagtggctgattctgaacaattgtggtctctcttaacttgaggttctcttttgaatctcctattccttcacacagttcaacataaagagcaataaatgttttaatgcttaa

SEQ ID NO: 457900 - DNA, 1694 bp, Homo sapiens
cgaattcggccattatggccgggggaggcagtaaggacttggactcctctgtccagcttttaacaatctaagttacgccctcttctgggtcacgctagaatcagatctgctctccagcatcttctgtttcctggcaagtgtttcctgctactttggattggccacgatgggctggagctgccttgtgacaggagcaggagggcttctgggtcagaggatcgtccgcctgttggtggaagagaaggaactgaaggagatcagggccttggacaaggccttcagaccagaattgagagaggaattttctaagctccagaacaggaccaagctgactgtacttgaaggagacattctggatgagccattcctgaaaagagcctgccaggacgtctcggtcgtcatccacaccgcctgtatcattgatgtctttggtgtcactcacagagagtccatcatgaatgtcaatgtgaaaggtacccagctactgttggaggcctgtgtccaagccagtgtgccagtcttcatctacaccagtagcatagaggtagccgggcccaactcctacaaggaaatcatccagaacggccacgaagaagagcctctggaaaacacatggcccactccatacccgtacagcaaaaagcttgctgagaaggctgtgctggcggctaatgggtggaatctaaaaaaatggtgataccttgtacacttgtgcgttaagacccacatatatctatggggaaggaggcccattcctttctgccagtataaatgaggccctgaacaacaatgggatcctgtcaagtgttggaaagttctctacagtcaacccagtctatgttggcaacgtggcctgggcccacattctggccttgagggctctgcgggaccccaagaaggccccaagtgtccgaggtcaattctattacatctcagatgacacgcctcaccaaagctatgataaccttaattacatcctgagcaaagagtttggcctccgccttgattccagatggagccttcctttaaccctgatgtactggattggcttcctgctggaagtagtgagcttcctactcagcccaatttactcctatcaaccccccttcaaccgccacacagtcacattatcaaatagtgtgttcaccttctcttacaagaaggctcagcgagatctggcgtataagccactctacagctgggaggaagccaagcagaaaaccgtggagtgggttggttcccttgtggaccggcacaaggagaccctgaagtccaagactcagtgatttaaggatgacagagatgtgcatgtgggtattgttaggaaatgtcatcaaactccacccacctggcttcatacagaaggcaacaggggcacaagcccaggtcctgctgcctctctttcacacaatgcccaacttactgtcttcttcatgtcatcaaaatctgcacagtcactggcccaaccagaactttctgtcctaatcatacaccagaagacaaacaatatgatttgctgttaccaaatctcagtggctgattctgaacaattgtggtctctcttaacttgaggttctcttttgactaatagagctccatttcccctcttaaatgagaaagcatttcttttctctttaatctcctattccttcacacagttcaacataaagagcaataaatgttttaatgcttaa

SEQ ID NO: 457901 - DNA, 828 bp, Homo sapiens
  misc_feature (780)..(780): n is a, c, g, or t
  misc_feature (806)..(806): n is a, c, g, or t
cacttatctgatacgataatcaaaatgtcatatctaatctctactcatctcacgatttggtacatatcaatataatcattatatcaggcagtaaggacttggactcctctgtccagcttttaacaatctaagttacgccctcttctgggtcacgctagaatcagatctgctctccagcatcttctgtttcctggcaagtgtttcctgctactttggattggccacgatgggctggagctgccttgtgacaggagcaggagggcttctgggtcagaggatcgtccgcctgttggtggaagagaaggaactgaaggagatcagggccttggacaaggccttcagaccagaattgagagaggaattttctaagctccagaacaggaccaagctgactgtacttgaaggagacattctggatgagccattcctgaaaagagcctgccaggacgtctcggtcgtcatccacaccgcctgtatcattgatgtctttggtgtcactcacagagagtccatcatgaatgtcaatgtgaaaggtacccagctactgttggaggcctgtgtccaagccagtgtgccagtcttcatctacaccagtagcatagaggtagccgggcccaactcctacaaggaaatcatccagaacggccacgaagaagagcctctggaaaacacatggcccactccatacccgtacagcaaaaagcttgctgagaaggctgtgctggcggctaatgggtggaatctaaaaccattcctttctgcgttaatgaggcctgacancatggatctggcaggttggaagtctntcagcaccagcatgtgcacgga

SEQ ID NO: 457902 - DNA, 867 bp, Homo sapiens
  misc_feature (829)..(829): n is a, c, g, or t
cacttatctgatacgataatcaaaatgtcatatctaatctctactcatctcacgatttggtacatatcaatataatcattatatcaggcagtaaggacttggactcctctgtccagcttttaacaatctaagttacgccctcttctgggtcacgctagaatcagatctgctctccagcatcttctgtttcctggcaagtgtttcctgctactttggattggccacgatgggctggagctgccttgtgacaggagcaggagggcttctgggtcagaggatcgtccgcctgttggtggaagagaaggaactgaaggagatcagggccttggacaaggccttcagaccagaattgagagaggaattttctaagctccagaacaggaccaagctgactgtacttgaaggagacattctggatgagccattcctgaaaagagcctgccaggacgtctcggtcgtcatccacaccgcctgtatcattgatgtctttggtgtcactcacagagagtccatcatgaatgtcaatgtgaaaggtacccagctactgttggaggcctgtgtccaagccagtgtgccagtcttcatctacaccagtagcatagaggtagccgggcccaactcctacaaggaaatcatccagaacggccacgaagaagagcctctggaaaacacatggcccactccatacccgtacagcaaaaagcttgctgagaaggctgtgctggcggctaatgggtggaatctaaaaaaatggtgataccttgtacacttgtgcgttaagacccacatatatctatggggaagggggccccccctcttcccgctaaanccttttggggaggggcgggccccaacttgcttagggtg

SEQ ID NO: 457903 - DNA, 839 bp, Homo sapiens
cacttatctgatacgataatcaaaatgtcatatctaatctctactcatctcacgatttggtacatatcaatataatcattatatcaggcagtaaggacttggactcctctgtccagcttttaacaatctaagttacgccctcttctgggtcacgctagaatcagatctgctctccagcatcttctgtttcctggcaagtgtttcctgctactttggattggccacgatgggctggagctgccttgtgacaggagcaggagggcttctgggtcagaggatcgtccgcctgttggtggaagagaaggaactgaaggagatcagggccttggacaaggccttcagaccagaattgagagaggaattttctaagctccagaacaggaccaagctgactgtacttgaaggagacattctggatgagccattcctgaaaagagcctgccaggacgtctcggtcgtcatccacaccgcctgtatcattgatgtctttggtgtcactcacagagagtccatcatgaatgtcaatgtgaaaggtacccagctactgttggaggcctgtgtccaagccagtgtgccagtcttcatctacaccagtagcatagaggtagccgggcccaactcctacaaggaaatcatccagaacggccacgaagaagagcctctggaaaacacatggcccactccatacccgtacagcaaaaagcttgctgagaaggctgtgctggcggctaatgggtggaatctaaaaagggggcccatttctttctgtcagtttaatgagggcctgacaacatggggacctggacagggtgggaaggtctctcatgaacccaccccta

SEQ ID NO: 457904 - DNA, 1777 bp, Homo sapiens
cacttatctgatacgataatcaaaatgtcatatctaatctctactcatctcacgatttggtacatatcaatataatcattatatcaggcagtaaggacttggactcctctgtccagcttttaacaatctaagttacggttagagctttctccttttctttcaactactcctggcagttgtggggtcatggaatttttgtaaaaaatggggtggaggccctcttctgggtcacgctagaatcagatctgctctccagcatcttctgtttcctggcaagtgtttcctgctactttggattggccacgatgggctggagctgccttgtgacaggagcaggagggcttctgggtcagaggatcgtccgcctgttggtggaagagaaggaactgaaggagatcagggccttggacaaggccttcagaccagaattgagagaggaattttctaagctccagaacaggaccaagctgactgtacttgaaggagacattctggatgagccattcctgaaaagagcctgccaggacgtctcggtcgtcatccacaccgcctgtatcattgatgtctttggtgtcactcacagagagtccatcatgaatgtcaatgtgaaaggtacccagctactgttggaggcctgtgtccaagccagtgtgccagtcttcatctacaccagtagcatagaggtagccgggcccaactcctacaaggaaatcatccagaacggccacgaagaagagcctctggaaaacacatggcccactccatacccgtacagcaaaaagcttgctgagaaggctgtgctggcggctaatgggtggaatctaaaagaggcccattcctttctgccagtataaatgaggccctgaacaacaatgggatcctgtcaagtgttggaaagttctctacagtcaacccagtctatgttggcaacgtggcctgggcccacattctggccttgagggctctgcgggaccccaagaaggccccaagtgtccgaggtcaattctattacatctcagatgacacgcctcaccaaagctatgataaccttaattacatcctgagcaaagagtttggcctccgccttgattccagatggagccttcctttaaccctgatgtactggattggcttcctgctggaagtagtgagcttcctactcagcccaatttactcctatcaaccccccttcaaccgccacacagtcacattatcaaatagtgtgttcaccttctcttacaagaaggctcagcgagatctggcgtataagccactctacagctgggaggaagccaagcagaaaaccgtggagtgggttggttcccttgtggaccggcacaaggagaccctgaagtccaagactcagtgatttaaggatgacagagatgtgcatgtgggtattgttaggaaatgtcatcaaactccacccacctggcttcatacagaaggcaacaggggcacaagcccaggtcctgctgcctctctttcacacaatgcccaacttactgtcttcttcatgtcatcaaaatctgcacagtcactggcccaaccagaactttctgtcctaatcatacaccagaagacaaacaatatgatttgctgttaccaaatctcagtggctgattctgaacaattgtggtctctcttaacttgaggttctcttttgactaatagagctccatttcccctcttaaatgagaaagcatttcttttctctttaatctcctattccttcacacagttcaacataaagagcaataaatgttttaatgcttaa

SEQ ID NO: 457905 - DNA, 1700 bp, Homo sapiens
cacttatctgatacgataatcaaaatgtcatatctaatctctactcatctcacgatttggtacatatcaatataatcattatatcaggcagtaaggacttggactcctctgtccagcttttaacaatctaagttacgccctcttctgggtcacgctagaatcagatctgctctccagcatcttctgtttcctggcaagtgtttcctgctactttggattggccacgatgggctggagctgccttgtgacaggagcaggagggcttctgggtcagaggatcgtccgcctgttggtggaagagaaggaactgaaggagatcagggccttggacaaggccttcagaccagaattgagagaggaattttctaagctccagaacaggaccaagctgactgtacttgaaggagacattctggatgagccattcctgaaaagagcctgccaggacgtctcggtcgtcatccacaccgcctgtatcattgatgtctttggtgtcactcacagagagtccatcatgaatgtcaatgtgaaaggtacccagctactgttggaggcctgtgtccaagccagtgtgccagtcttcatctacaccagtagcatagaggtagccgggcccaactcctacaaggaaatcatccagaacggccacgaagaagagcctgctgtgctggcggctaatgggtggaatctaaaaaaatggtgataccttgtacacttgtgcgttaagacccacatatatctatggggaaggaggcccattcctttctgccagtataaatgaggccctgaacaacaatgggatcctgtcaagtgttggaaagttctctacagtcaacccagtctatgttggcaacgtggcctgggcccacattctggccttgagggctctgcgggaccccaagaaggccccaagtgtccgaggtcaattctattacatctcagatgacacgcctcaccaaagctatgataaccttaattacatcctgagcaaagagtttggcctccgccttgattccagatggagccttcctttaaccctgatgtactggattggcttcctgctggaagtagtgagcttcctactcagcccaatttactcctatcaaccccccttcaaccgccacacagtcacattatcaaatagtgtgttcaccttctcttacaagaaggctcagcgagatctggcgtataagccactctacagctgggaggaagccaagcagaaaaccgtggagtgggttggttcccttgtggaccggcacaaggagaccctgaagtccaagactcagtgatttaaggatgacagagatgtgcatgtgggtattgttaggaaatgtcatcaaactccacccacctggcttcatacagaaggcaacaggggcacaagcccaggtcctgctgcctctctttcacacaatgcccaacttactgtcttcttcatgtcatcaaaatctgcacagtcactggcccaaccagaactttctgtcctaatcatacaccagaagacaaacaatatgatttgctgttaccaaatctcagtggctgattctgaacaattgtggtctctcttaacttgaggttctcttttgactaatagagctccatttcccctcttaaatgagaaagcatttcttttctctttaatctcctattccttcacacagttcaacataaagagcaataaatgttttaatgcttaa

SEQ ID NO: 457906 - DNA, 2171 bp, Homo sapiens
cacttatctgatacgataatcaaaatgtcatatctaatctctactcatctcacgatttggtacatatcaatataatcattatatcaggcagtaaggacttggactcctctgtccagcttttaacaatctaagttacgccctcttctgggtcacgctagaatcagatctgctctccagcatcttctgtttcctggcaagtgtttcctgctactttggattggccacgatgggctggagctgccttgtgacaggagcaggagggcttctgggtcagaggatcgtccgcctgttggtggaagagaaggaactgaaggagatcagggccttggacaaggccttcagaccagaattgagagaggaattttctaagctccagaacaggaccaagctgactgtacttgaaggagacattctggatgagccattcctggtctttggtgtcactcacagagagtccatcatgaatgtcaatgtgaaaggtacagtagcctggggaggagataaaacaagttggttaaatgaggatcagaaagaaggacaagaaagggaagagaagtcactccattgaacacctgctgagctcttggccaagtgcctttgctgatcactactgactggggagttcaaggctggtaacctcagttttttagatgagaaaactagggctgagagacagcaagtaacttgtccaaggccccaaaagtaagtaagtaagtaggagagttagactttaaactcactcctgtgtgactccaaaggctgtggaagctctttctactgtggccccaatcccccgggccagaatcagaccttccaggtgccaccatagtcatcattttgaaccttgtgtgtaggctgatgagaacattcagagtctttctgcccacctcaaagaagtcctctcaagagaactagcaaagctggttcacagaggtctgtcaggacagaattatccagcacatgccttcccataatattttcttaacaaaaagagtttcccagtgtccagaatacaatctcttcagctcaccacagggtctactattacagagccatttcctgccaggtgcccaaagtgcaccctcatttgatccacattttttaaaggaatcttgccatgcagtctcaccctctgattcccagagcccagtctcttcaaaacacagctccccactgctggcctgaccctccacattcagactacccaaactccttttataaagcaactaattgcttttgagtctccagcactgtctaaaaaaacaaacaaaaaaaaaacctttccagtttctacatagccatacccctaagtaccgctatagttcaaggagtgtgctaagagtgaatagttttttgttttaattttgactttccacagctcccaaaaacaagggataagaaatgacaaggggagtgttagaggcgtctgtttcttaaaaccattatcactcccgggcttagaaaatacttcacaatgatggccatttcatgaggctgtctctccagaaactcaaattgcacagagactttaaaagtggctaagaatacaaaataagtaaataaaaatgatcctttgcctaggaaattccttccttcttcgagggaagacactccagatacctccatgagctttgcttccacacagctcaggtgatgctgacaggtcttcccagcgcaggtgttatcagcagagggcacactccctccccagtcctccaccaggctccacaggaaatgccagggcaggatttaaaggaaggtttatcacccccactttatataactgggtaacagagtcatagccagaattggaagcagcttttccagggaacacacaatcaggaaaggagtgtgggtttccagcatctccccacaacccactgtttgctcgatgactccagggatggtctttgtgacaaagttttattaatccattgcaaaatgagaaaaataccagcaattctatgtatatctaagagtgtatattgcctatattcaactgtgaatttgtgtgtgtaacacaaattcttccactgccctttcttgcctaaggactgattgggactgttcatattctcagagtatagcctcctgattttttagattttaaatgatctgtctttaattgtattgatgacaaatcatactttttcaatatccttacttggcaa

SEQ ID NO: 457907 - DNA, 2225 bp, Homo sapiens
cacttatctgatacgataatcaaaatgtcatatctaatctctactcatctcacgatttggtacatatcaatataatcattatatcaggcagtaaggacttggactcctctgtccagcttttaacaatctaagttacgccctcttctgggtcacgctagaatcagatctgctctccagcatcttctgtttcctggcaagtgtttcctgctactttggattggccacgatgggctggagctgccttgtgacaggagcaggagggcttctgggtcagaggatcgtccgcctgttggtggaagagaaggaactgaaggagatcagggccttggacaaggccttcagaccagaattgagagaggaattttctaagctccagaacaggaccaagctgactgtacttgaaggagacattctggatgagccattcctgaaaagagcctgccaggacgtctcggtcgtcatccacaccgcctgtatcattgatgtctttggtgtcactcacagagagtccatcatgaatgtcaatgtgaaaggtacagtagcctggggaggagataaaacaagttggttaaatgaggatcagaaagaaggacaagaaagggaagagaagtcactccattgaacacctgctgagctcttggccaagtgcctttgctgatcactactgactggggagttcaaggctggtaacctcagttttttagatgagaaaactagggctgagagacagcaagtaacttgtccaaggccccaaaagtaagtaagtaagtaggagagttagactttaaactcactcctgtgtgactccaaaggctgtggaagctctttctactgtggccccaatcccccgggccagaatcagaccttccaggtgccaccatagtcatcattttgaaccttgtgtgtaggctgatgagaacattcagagtctttctgcccacctcaaagaagtcctctcaagagaactagcaaagctggttcacagaggtctgtcaggacagaattatccagcacatgccttcccataatattttcttaacaaaaagagtttcccagtgtccagaatacaatctcttcagctcaccacagggtctactattacagagccatttcctgccaggtgcccaaagtgcaccctcatttgatccacattttttaaaggaatcttgccatgcagtctcaccctctgattcccagagcccagtctcttcaaaacacagctccccactgctggcctgaccctccacattcagactacccaaactccttttataaagcaactaattgcttttgagtctccagcactgtctaaaaaaacaaacaaaaaaaaaacctttccagtttctacatagccatacccctaagtaccgctatagttcaaggagtgtgctaagagtgaatagttttttgttttaattttgactttccacagctcccaaaaacaagggataagaaatgacaaggggagtgttagaggcgtctgtttcttaaaaccattatcactcccgggcttagaaaatacttcacaatgatggccatttcatgaggctgtctctccagaaactcaaattgcacagagactttaaaagtggctaagaatacaaaataagtaaataaaaatgatcctttgcctaggaaattccttccttcttcgagggaagacactccagatacctccatgagctttgcttccacacagctcaggtgatgctgacaggtcttcccagcgcaggtgttatcagcagagggcacactccctccccagtcctccaccaggctccacaggaaatgccagggcaggatttaaaggaaggtttatcacccccactttatataactgggtaacagagtcatagccagaattggaagcagcttttccagggaacacacaatcaggaaaggagtgtgggtttccagcatctccccacaacccactgtttgctcgatgactccagggatggtctttgtgacaaagttttattaatccattgcaaaatgagaaaaataccagcaattctatgtatatctaagagtgtatattgcctatattcaactgtgaatttgtgtgtgtaacacaaattcttccactgccctttcttgcctaaggactgattgggactgttcatattctcagagtatagcctcctgattttttagattttaaatgatctgtctttaattgtattgatgacaaatcatactttttcaatatccttacttggcaa

SEQ ID NO: 457908 - DNA, 658 bp, Homo sapiens
cacttatctgatacgataatcaaaatgtcatatctaatctctactcatctcacgatttggtacatatcaatataatcattatatcaggcagtaaggacttggactcctctgtccagcttttaacaatctaagttacgccctcttctgggtcacgctagaatcagatctgctctccagcatcttctgtttcctggcaagtgtttcctgctactttggattggccacgatgggctggagctgccttgtgacaggagcaggagggcttctgggtcagaggatcgtccgcctgttggtggaagagaaggaactgaaggagatcagggccttggacaaggccttcagaccagaattgagagaggaattttctaggcttcatacagaaggcaacaggggcacaagcccaggtcctgctgcctctctttcacacaatgcccaacttactgtcttcttcatgtcatcgaagacaaacaatatgatttgctgttaccaaatctcagtggctgattctgaacaattgtggtctctcttaacttgaggttctcttttgactaatagagctccatttcccctcttaaatgagaaagcatttcttttctctttaatctcctattccttcacacagttcaacataaagagcaataaatgttttaatgcttaa

SEQ ID NO: 457909 - DNA, 4382 bp, Homo sapiens
ctcgtaccaagcgtgtcgtagtggggctgttggggccccacagaaagtcagcggaacgtgaaatgggaaaggaatcatgcgactctgtaataagaagctgacagaaccatgaaggatcagggactgaaagcattagataagttgttagtgggatgcaggttccacaggcaagcggaacgattcaagcgaattagtaaagtttctgcccggatcttgaaagccgcttccgttgctcagcggaagtgtcggtcgcaagaggacagacgcctcgaagaatccgctatcggctgtctgcacaaccggaatcatgtcgagtttggcggtgagagacccggcaatggatcgatcactgcgttccgtgttcgtggggaacattccatatgaggcaactgaggagcagttaaaggacattttctcggaggttggttctgttgtcagtttccggctggtatacgatagagagacgggaaaacccaagggctatggcttctgcgaataccaagaccaggagaccgcgcttagtgccatgcggaacctcaatgggcgggagttcagtgggagagcgcttcgggtggacaatgctgccagtgaaaagaataaggaggagttaaagagccttgggcctgcagcgcccattattgactcaccctatggggatcccatcgatccagaagatgcccctgaatcgattaccagagcagtagccagtctccccccggagcagatgtttgagctgatgaagcagatgaagctctgtgtccaaaacagccaccaggaagctcgaaacatgttacttcaaaatccacaactggcttatgcactgttgcaggcacaagtagtgatgagaatcatggatccagagattgctctgaaaattctgcatcggaagatacatgtcacaccactgatcccaggcaaatctcagtctgtgtctgtctctggccctggccctggccctggccctgggctctgcccaggacctaatgttctgctgaaccagcagaatcctccagctcctcagcctcagcatttggctagaagacctgtgaaggacattcctcctctgatgcagactcctatccagggtggaattccagctccagggccaataccagctgcagttcccggagctggtcctggttccttaactcctggaggagcaatgcagccccaacttggaatgccaggggttggcccagtgcctttagagcggggacaagtgcagatgtcagatcctagagctcctatacctcgcggacccgtgactcctggtggtctgcctcctcgaggactgttaggagatgctccaaatgacccacgtggagggactttgctttcagtcactggagaagtggagcccagaggttatctgggtccaccccatcagggtccccccatgcatcatgcctctggtcatgacactcgtggcccttcctcacatgagatgaggggagggccattaggagatcccagactgctaattggagagcccagaggccccatgatagatcaaaggggtctacctatggatggtagaggtggtagagattctcgagcgatggagactcgtgccatggaaactgaggtcttagagacacgtgtaatggagaggagaggaatggagacctgtgcgatggaaaccagagggatggaagcaaggggcatggatgcaagaggattggagatgaggggccctgtccccagttcaagaggccctatgactggtggaattcagggtcctggtcccattaatataggggcaggtggccctcctcagggacccagacaggtcccaggcatttcaggggtggggaatcctggagctggtatgcagggtacaggcatacaaggaacaggcatgcagggagcaggcatacaaggaggagggatgcagggggcaggcatacaaggagtcagtatacaaggaggaggtatacaaggaggaggtatacagggggcaagcaagcaaggtggaagccagcctagcagttttagtcctgggcagagccaggtcactccacaggatcaggagaaggcagctttgatcatgcaggttcttcaactgactgcagatcagattgccatgctgccccctgagcaaaggcagagtatcctgattttaaaggaacaaatccagaaatccactggagcgtcttgaaaggttttagaaaatatttggctgtagtctcaaattttattctgtagcatggagaatgggtgcaaaaagctgacttctgtatccccacacttggattagggtttccctcctcctagaacctaatcttattttttgttctttttctttctttctgttttccttttttttttaattgagggtggggggaggagggagtgcgtctgttcactttaagttactttaaaataactctgaacatgattatattatgccaaataagattacaaagaataagcagcaatattgaagcatctacagtatgttaactacattttttaaatgtcgagtaaaacttcgtgaaaactgctcataaagactaaaagttgacctgttaaaacgttaatgtactaagatagttttaagatttttggttgtataacaaaataaaagtttacccaaaagtataagatacattttttggtaaaccatttaaaatacaaaatcctattttggaggcaataggataagcattgtcttagtgttttagaattatttttgaaacagagttaacaggataaggttacacttgtattagaattgtttttttctaaagttatgttacctgaaaaatcaaggagtgcacctgatttactgttgcttcatttatcccatccttcagagaccagcaaggttctgccaggccccaagcatctgagcatgatgattttgctgtgacaattctaagatcaaccaggttacttaagtccgctctgatgaaacccagtctctcaataccttcctatttctcaatagtctttaagccctaaatctgagtcagtaattctctaaaaatccttcccaaaaatcagtgtctagggactggttgatctagatgagttataaatggtatttgacttttcataagtagtggaaggtttcactaagtaaagatctgagtttcttggtatctgacgtttgtatacagatggtgtccatttgctcaaccagacaggagttaacttgtattagaattgttttttctaaagttatgttacctgagaaattaaggactgcacctggtttaatgttgcttcacttatcccaccctacagagaccagcaaggttctgccaggcctcgagcatccaagcatgattttgctgtgacaaatctaaaatcaaccaggctacttaagtctgctctgatgaaacccaataatctctcaataccttcctatttctcaatagtctttaaaccctaaatctgagtcagtaattctcttacatccttcccaaaaatcagtgtctagggactagttgatctggatgagttatacatgatatttgacttttcataagtagtggaaggtttcactaagtaaaactctcagtttcttggtatctggctttcttatacagatggtgtccatttgctccaccagacaggagttaaaaacctttaaagagcatttaacatgccttttagttttcttatttcataatctacttttctatcattaatcatcttaccaggaataatcaaggcccaggtaggtagaagtttttatatagcctgaatactcacttgacttactgctcattttactttttgcatggaatacagccatttagtcctaatatacataccaatgagacaattaaaaattggttggaagatggagcttatcacattgtgctactacgactttattttttcttgaaaataaagccttgaggatgtgaacataaatgttggtatcataaaacaagtagtaataaaagcataaattatcaaatatcaggtgatcttactatggagaagaaaaaccaatatctagttacagatgaaaaaatgtttaatacaaagagctgaaaatgtagaaattgagttatcttccctttgcaaaatttttacactttaaattagtaattctttgtttgcaaggttttcatccctatgctgttgttttctactacctgttttactcttgttcatactgctactttcccatgtttcctatatgcctcccctatattggagaggataactcgcgtttacatatgtgatagttatgcttaatactaattcacagagttggctcgatcattttgagattctagttgctttatctcaaagctttcactgaagggctgtaactgaaaattattaaatgttagtctttagtcaaatctctgcattgtttcatgcagaaaataaagatacaattaaggctgaaaaaaaaatct

SEQ ID NO: 457910 - DNA, 4319 bp, Homo sapiens
ctcgtaccaagcgtgtcgtagtggggctgttggggccccacagaaagtcagcggaacgtgaaatgggaaaggaatcatgcgactctgtaataagaagctgacagaaccatgaaggatcagggactgaaagcattagataagttgttagtgggatgcaggttccacaggcaagcggaacgattcaagcgaattagtaaagtttctgcccggatcttgaaagccgcttccgttgctcagcggaagtgtcggtcgcaagaggacagacgcctcgaagaatccgctatcggctgtctgcacaaccggaatcatgtcgagtttggcggtgagagacccggcaatggatcgatcactgcgttccgtgttcgtggggaacattccatatgaggcaactgaggagcagttaaaggacattttctcggaggttggttctgttgtcagtttccggctggtatacgatagagagacgggaaaacccaagggctatggcttctgcgaataccaagaccaggagaccgcgcttagtgccatgcggaacctcaatgggcgggagttcagtgggagagcgcttcgggtggacaatgctgccagtgaaaagaataaggaggagttaaagagccttgggcctgcagcgcccattattgactcaccctatggggatcccatcgatccagaagatgcccctgaatcgattaccagagcagtagccagtctccccccggagcagatgtttgagctgatgaagcagatgaagctctgtgtccaaaacagccaccaggaagctcgaaacatgttacttcaaaatccacaactggcttatgcactgttgcaggcacaagtagtgatgagaatcatggatccagagattgctctgaaaattctgcatcggaagatacatgtcacaccactgatcccaggacctaatgttctgctgaaccagcagaatcctccagctcctcagcctcagcatttggctagaagacctgtgaaggacattcctcctctgatgcagactcctatccagggtggaattccagctccagggccaataccagctgcagttcccggagctggtcctggttccttaactcctggaggagcaatgcagccccaacttggaatgccaggggttggcccagtgcctttagagcggggacaagtgcagatgtcagatcctagagctcctatacctcgcggacccgtgactcctggtggtctgcctcctcgaggactgttaggagatgctccaaatgacccacgtggagggactttgctttcagtcactggagaagtggagcccagaggttatctgggtccaccccatcagggtccccccatgcatcatgcctctggtcatgacactcgtggcccttcctcacatgagatgaggggagggccattaggagatcccagactgctaattggagagcccagaggccccatgatagatcaaaggggtctacctatggatggtagaggtggtagagattctcgagcgatggagactcgtgccatggaaactgaggtcttagagacacgtgtaatggagaggagaggaatggagacctgtgcgatggaaaccagagggatggaagcaaggggcatggatgcaagaggattggagatgaggggccctgtccccagttcaagaggccctatgactggtggaattcagggtcctggtcccattaatataggggcaggtggccctcctcagggacccagacaggtcccaggcatttcaggggtggggaatcctggagctggtatgcagggtacaggcatacaaggaacaggcatgcagggagcaggcatacaaggaggagggatgcagggggcaggcatacaaggagtcagtatacaaggaggaggtatacaaggaggaggtatacagggggcaagcaagcaaggtggaagccagcctagcagttttagtcctgggcagagccaggtcactccacaggatcaggagaaggcagctttgatcatgcaggttcttcaactgactgcagatcagattgccatgctgccccctgagcaaaggcagagtatcctgattttaaaggaacaaatccagaaatccactggagcgtcttgaaaggttttagaaaatatttggctgtagtctcaaattttattctgtagcatggagaatgggtgcaaaaagctgacttctgtatccccacacttggattagggtttccctcctcctagaacctaatcttattttttgttctttttctttctttctgttttccttttttttttaattgagggtggggggaggagggagtgcgtctgttcactttaagttactttaaaataactctgaacatgattatattatgccaaataagattacaaagaataagcagcaatattgaagcatctacagtatgttaactacattttttaaatgtcgagtaaaacttcgtgaaaactgctcataaagactaaaagttgacctgttaaaacgttaatgtactaagatagttttaagatttttggttgtataacaaaataaaagtttacccaaaagtataagatacattttttggtaaaccatttaaaatacaaaatcctattttggaggcaataggataagcattgtcttagtgttttagaattatttttgaaacagagttaacaggataaggttacacttgtattagaattgtttttttctaaagttatgttacctgaaaaatcaaggagtgcacctgatttactgttgcttcatttatcccatccttcagagaccagcaaggttctgccaggccccaagcatctgagcatgatgattttgctgtgacaattctaagatcaaccaggttacttaagtccgctctgatgaaacccagtctctcaataccttcctatttctcaatagtctttaagccctaaatctgagtcagtaattctctaaaaatccttcccaaaaatcagtgtctagggactggttgatctagatgagttataaatggtatttgacttttcataagtagtggaaggtttcactaagtaaagatctgagtttcttggtatctgacgtttgtatacagatggtgtccatttgctcaaccagacaggagttaacttgtattagaattgttttttctaaagttatgttacctgagaaattaaggactgcacctggtttaatgttgcttcacttatcccaccctacagagaccagcaaggttctgccaggcctcgagcatccaagcatgattttgctgtgacaaatctaaaatcaaccaggctacttaagtctgctctgatgaaacccaataatctctcaataccttcctatttctcaatagtctttaaaccctaaatctgagtcagtaattctcttacatccttcccaaaaatcagtgtctagggactagttgatctggatgagttatacatgatatttgacttttcataagtagtggaaggtttcactaagtaaaactctcagtttcttggtatctggctttcttatacagatggtgtccatttgctccaccagacaggagttaaaaacctttaaagagcatttaacatgccttttagttttcttatttcataatctacttttctatcattaatcatcttaccaggaataatcaaggcccaggtaggtagaagtttttatatagcctgaatactcacttgacttactgctcattttactttttgcatggaatacagccatttagtcctaatatacataccaatgagacaattaaaaattggttggaagatggagcttatcacattgtgctactacgactttattttttcttgaaaataaagccttgaggatgtgaacataaatgttggtatcataaaacaagtagtaataaaagcataaattatcaaatatcaggtgatcttactatggagaagaaaaaccaatatctagttacagatgaaaaaatgtttaatacaaagagctgaaaatgtagaaattgagttatcttccctttgcaaaatttttacactttaaattagtaattctttgtttgcaaggttttcatccctatgctgttgttttctactacctgttttactcttgttcatactgctactttcccatgtttcctatatgcctcccctatattggagaggataactcgcgtttacatatgtgatagttatgcttaatactaattcacagagttggctcgatcattttgagattctagttgctttatctcaaagctttcactgaagggctgtaactgaaaattattaaatgttagtctttagtcaaatctctgcattgtttcatgcagaaaataaagatacaattaaggctgaaaaaaaaatct

SEQ ID NO: 457911 - DNA, 3513 bp, Homo sapiens
ctcgtaccaagcgtgtcgtagtggggctgttggggccccacagaaagtcagcggaacgtgaaatgggaaaggaatcatgcgactctgtaataagaagctgacagaaccatgaaggatcagggactgaaagcattagataagttgttagtgggatgcaggttccacaggcaagcggaacgattcaagcgaattagtaaagtttctgcccggatcttgaaagccgcttccgttgctcagcggaagtgtcggtcgcaagaggacagacgcctcgaagaatccgctatcggctgtctgcacaaccggaatcatgtcgagtttggcggtgagagacccggcaatggatcgatcactgcgttccgtgttcgtggggaacattccatatgaggcaactgaggagcagttaaaggacattttctcggaggttggttctgttgtcagtttccggctggtatacgatagagagacgggaaaacccaagggctatggcttctgcgaataccaagaccaggagaccgcgcttagtgccatgcggaacctcaatgggcgggagttcagtgggagagcgcttcgggtggacaatgctgccagtgaaaagaataaggaggagttaaagagccttgggcctgcagcgcccattattgactcaccctatggggatcccatcgatccagaagatgcccctgaatcgattaccagagcagtagccagtctccccccggagcagatgtttgagctgatgaagcagatgaagctctgtgtccaaaacagccaccaggaagctcgaaacatgttacttcaaaatccacaactggcttatgcactgttgcaggcacaagtagtgatgagaatcatggatccagagattgctctgaaaattctgcatcggaagatacatgtcacaccactgatcccaggcaaatctcagtctgtgtctgtctctggccctggccctggccctggccctgggctctgcccaggacctaatgttctgctgaaccagcagaatcctccagctcctcagcctcagcatttggctagaagacctgtgaaggacattcctcctctgatgcagactcctatccagggtggaattccagctccagggccaataccagctgcagttcccggagctggtcctggttccttaactcctggaggagcaatgcagccccaacttggaatgccaggggttggcccagtgcctttagagcggggacaagtgcagatgtcagatcctagagctcctatacctcgcggacccgtgactcctggtggtctgcctcctcgaggactgttaggagatgctccaaatgacccacgtggagggactttgctttcagtcactggagaagtggagcccagaggttatctgggtccaccccatcagggtccccccatgcatcatgcctctggtcatgacactcgtggcccttcctcacatgagatgaggggagggccattaggagatcccagactgctaattggagagcccagaggccccatgatagatcaaaggggtctacctatggatggtagaggtggtagagattctcgagcgatggagactcgtgccatggaaactgaggtcttagagacacgtgtaatggagaggagaggaatggagacctgtgcgatggaaaccagagggatggaagcaaggggcatggatgcaagaggattggagatgaggggccctgtccccagttcaagaggccctatgactggtggaattcagggtcctggtcccattaatataggggcaggtggccctcctcagggacccagacaggtcccaggcatttcaggggtggggaatcctggagctggtatgcagggtacaggcatacaaggaacaggcatgcagggagcaggcatacaaggaggagggatgcagggggcaggcatacaaggagtcagtatacaaggaggaggtatacaaggaggaggtatacagggggcaagcaagcaaggtggaagccagcctagcagttttagtcctgggcagagccaggtcactccacaggatcaggagaaggcagctttgatcatgcaggttcttcaactgactgcagatcagattgccatgctgccccctgagcaaaggcagagtatcctgattttaaaggaacaaatccagaaatccactggagcgtcttgaaaggttttagaaaatatttggctgtagtctcaaattttattctgtagcatggagaatgggtgcaaaaagctgacttctgtatccccacacttggattagggtttccctcctcctagaacctaatcttattttttgttctttttctttctttctgttttccttttttttttaattgagggtggggggaggagggagtgcgtctgttcactttaagttactttaaaataactctgaacatgattatattatgccaaataagattacaaagaataagcagcaatattgaagcatctacagtatgttaactacattttttaaatgtcgagtaaaacttcgtgaaaactgctcataaagactaaaagttgacctgttaaaacgttaatgtactaagatagttttaagatttttggttgtataacaaaataaaagtttacccaaaagtataagatacattttttggtaaaccatttaaaatacaaaatcctattttggaggcaataggataagcattgtcttagtgttttagaattatttttgaaacagagttaacaggataaggttacacttgtattagaattgtttttttctaaagttatgttacctgaaaaatcaaggagtgcacctgatttactgttgcttcatttatcccatccttcagagaccagcaaggttctgccaggccccaagcatctgagcatgatgattttgctgtgacaattctaagatcaaccaggttacttaagtccgctctgatgaaacccagtctctcaataccttcctatttctcaatagtctttaagccctaaatctgagtcagtaattctctaaaaatccttcccaaaaatcagtgtctagggactggttgatctagatgagttataaatggtatttgacttttcataagtagtggaaggtttcactaagtaaagatctgagtttcttggtatctgacgtttgtatacagatggtgtccatttgctcaaccagacaggagttaacttgtattagaattgttttttctaaagttatgttacctgagaaattaaggactgcacctggtttaatgttgcttcacttatcccaccctacagagaccagcaaggttctgccaggcctcgagcatccaagcatgattttgctgtgacaaatctaaaatcaaccaggctacttaagtctgctctgatgaaacccaataatctctcaataccttcctatttctcaatagtctttaaaccctaaatctgagtcagtaattctcttacatccttcccaaaaatcagtgtctagggactagttgatctggatgagttatacatgatatttgactcagatttagggtttaaagactattgaga

SEQ ID NO: 457912 - DNA, 2602 bp, Homo sapiens
ctcgtaccaagcgtgtcgtagtggggctgttggggccccacagaaagtcagcggaacgtgaaatgggaaaggaatcatgcgactctgtaataagaagctgacagaaccatgaaggatcagggactgaaagcattagataagttgttagtgggatgcaggttccacaggcaagcggaacgattcaagcgaattagtaaagtttctgcccggatcttgaaagccgcttccgttgctcagcggaagtgtcggtcgcaagaggacagacgcctcgaagaatccgctatcggctgtctgcacaaccggaatcatgtcgagtttggcggtgagagacccggcaatggatcgatcactgcgttccgtgttcgtggggaacattccatatgaggcaactgaggagcagttaaaggacattttctcggaggttggttctgttgtcagtttccggctggtatacgatagagagacgggaaaacccaagggctatggcttctgcgaataccaagaccaggagaccgcgcttagtgccatgcggaacctcaatgggcgggagttcagtgggagagcgcttcgggtggacaatgctgccagtgaaaagaataaggaggagttaaagagccttgggcctgcagcgcccattattgactcaccctatggggatcccatcgatccagaagatgcccctgaatcgattaccagagcagtagccagtctccccccggagcagatgtttgagctgatgaagcagatgaagctctgtgtccaaaacagccaccaggaagctcgaaacatgttacttcaaaatccacaactggcttatgcactgttgcaggcacaagtagtgatgagaatcatggatccagagattgctctgaaaattctgcatcggaagatacatgtcacaccactgatcccaggcaaatctcagtctgtgtctgtctctggccctggccctggccctggccctgggctctgcccaggacctaatgttctgctgaaccagcagaatcctccagctcctcagcctcagcatttggctagaagacctgtgaaggacattcctcctctgatgcagactcctatccagggtggaattccagctccagggccaataccagctgcagttcccggagctggtcctggttccttaactcctggaggagcaatgcagccccaacttggaatgccaggggttggcccagtgcctttagagcggggacaagtgcagatgtcagatcctagagctcctatacctcgcggacccgtgactcctggtggtctgcctcctcgaggactgttaggagatgctccaaatgacccacgtggagggactttgctttcagtcactggagaagtggagcccagaggttatctgggtccaccccatcagggtccccccatgcatcatgcctctggtcatgacactcgtggcccttcctcacatgagatgaggggagggccattaggagatcccagactgctaattggagagcccagaggccccatgatagatcaaaggggtctacctatggatggtagaggtggtagagattctcgagcgatggagactcgtgccatggaaactgaggtcttagagacacgtgtaatggagaggagaggaatggagacctgtgcgatggaaaccagagggatggaagcaaggggcatggatgcaagaggattggagatgaggggccctgtccccagttcaagaggccctatgactggtggaattcagggtcctggtcccattaatataggggcaggtggccctcctcagggacccagacaggtcccaggcatttcaggggtggggaatcctggagctggtatgcagggtacaggcatacaaggaacaggcatgcagggagcaggcatacaaggaggagggatgcagggggcaggcatacaaggagtcagtatacaaggaggaggtatacaaggaggaggtatacagggggcaagcaagcaaggtggaagccagcctagcagttttagtcctgggcagagccaggtcactccacaggatcaggagaaggcagctttgatcatgcaggttcttcaactgactgcagatcagattgccatgctgccccctgagcaaaggcagagtatcctgattttaaaggaacaaatccagaaatccactggagcgtcttgaaaggttttagaaaatatttggctgtagtctcaaattttattctgtagcatggagaatgggtgcaaaaagctgacttctgtatccccacacttggattagggtttccctcctcctagaacctaatcttattttttgttctttttctttctttctgttttccttttttttttaattgagggtggggggaggagggagtgcgtctgttcactttaagttactttaaaataactctgaacatgattatattatgccaaataagattacaaagaataagcagcaatattgaagcatctacagtatgttaactacattttttaaatgtcgagtaaaacttcgtgaaaactgctcataaagactaaaagttgacctgttaaaacgttaatgtactaagatagttttaagatttttggttgtataacaaaataaaagtttacccaaaagtat

SEQ ID NO: 457913 - DNA, 3200 bp, Homo sapiens
ctcgtaccaagcgtgtcgtagtggggctgttggggccccacagaaagtcagcggaacgtgaaatgggaaaggaatcatgcgactctgtaataagaagctgacagaaccatgaaggatcagggactgaaagcattagataagttgttagtgggatgcaggttccacaggcaagcggaacgattcaagcgaattagtaaagtttctgcccggatcttgaaagccgcttccgttgctcagcggaagtgtcggtcgcaagaggacagacgcctcgaagaatccgctatcggctgtctgcacaaccggaatcatgtcgagtttggcggtgagagacccggcaatggatcgatcactgcgttccgtgttcgtggggaacattccatatgaggcaactgaggagcagttaaaggacattttctcggaggttggttctgttgtcagtttccggctggtatacgatagagagacgggaaaacccaagggctatggcttctgcgaataccaagaccaggagaccgcgcttagtgccatgcggaacctcaatgggcgggagttcagtgggagagcgcttcgggtggacaatgctgccagtgaaaagaataaggaggagttaaagagccttgggcctgcagcgcccattattgactcaccctatggggatcccatcgatccagaagatgcccctgaatcgattaccagagcagtagccagtctccccccggagcagatgtttgagctgatgaagcagatgaagctctgtgtccaaaacagccaccaggaagctcgaaacatgttacttcaaaatccacaactggcttatgcactgttgcaggtcactccacaggatcaggagaaggcagctttgatcatgcaggttcttcaactgactgcagatcagattgccatgctgccccctgagcaaaggcagagtatcctgattttaaaggaacaaatccagaaatccactggagcgtcttgaaaggttttagaaaatatttggctgtagtctcaaattttattctgtagcatggagaatgggtgcaaaaagctgacttctgtatccccacacttggattagggtttccctcctcctagaacctaatcttattttttgttctttttctttctttctgttttccttttttttttaattgagggtggggggaggagggagtgcgtctgttcactttaagttactttaaaataactctgaacatgattatattatgccaaataagattacaaagaataagcagcaatattgaagcatctacagtatgttaactacattttttaaatgtcgagtaaaacttcgtgaaaactgctcataaagactaaaagttgacctgttaaaacgttaatgtactaagatagttttaagatttttggttgtataacaaaataaaagtttacccaaaagtataagatacattttttggtaaaccatttaaaatacaaaatcctattttggaggcaataggataagcattgtcttagtgttttagaattatttttgaaacagagttaacaggataaggttacacttgtattagaattgtttttttctaaagttatgttacctgaaaaatcaaggagtgcacctgatttactgttgcttcatttatcccatccttcagagaccagcaaggttctgccaggccccaagcatctgagcatgatgattttgctgtgacaattctaagatcaaccaggttacttaagtccgctctgatgaaacccagtctctcaataccttcctatttctcaatagtctttaagccctaaatctgagtcagtaattctctaaaaatccttcccaaaaatcagtgtctagggactggttgatctagatgagttataaatggtatttgacttttcataagtagtggaaggtttcactaagtaaagatctgagtttcttggtatctgacgtttgtatacagatggtgtccatttgctcaaccagacaggagttaacttgtattagaattgttttttctaaagttatgttacctgagaaattaaggactgcacctggtttaatgttgcttcacttatcccaccctacagagaccagcaaggttctgccaggcctcgagcatccaagcatgattttgctgtgacaaatctaaaatcaaccaggctacttaagtctgctctgatgaaacccaataatctctcaataccttcctatttctcaatagtctttaaaccctaaatctgagtcagtaattctcttacatccttcccaaaaatcagtgtctagggactagttgatctggatgagttatacatgatatttgacttttcataagtagtggaaggtttcactaagtaaaactctcagtttcttggtatctggctttcttatacagatggtgtccatttgctccaccagacaggagttaaaaacctttaaagagcatttaacatgccttttagttttcttatttcataatctacttttctatcattaatcatcttaccaggaataatcaaggcccaggtaggtagaagtttttatatagcctgaatactcacttgacttactgctcattttactttttgcatggaatacagccatttagtcctaatatacataccaatgagacaattaaaaattggttggaagatggagcttatcacattgtgctactacgactttattttttcttgaaaataaagccttgaggatgtgaacataaatgttggtatcataaaacaagtagtaataaaagcataaattatcaaatatcaggtgatcttactatggagaagaaaaaccaatatctagttacagatgaaaaaatgtttaatacaaagagctgaaaatgtagaaattgagttatcttccctttgcaaaatttttacactttaaattagtaattctttgtttgcaaggttttcatccctatgctgttgttttctactacctgttttactcttgttcatactgctactttcccatgtttcctatatgcctcccctatattggagaggataactcgcgtttacatatgtgatagttatgcttaatactaattcacagagttggctcgatcattttgagattctagttgctttatctcaaagctttcactgaagggctgtaactgaaaattattaaatgttagtctttagtcaaatctctgcattgtttcatgcagaaaataaagatacaattaaggctgaaaaaaaaatct

SEQ ID NO: 457914 - DNA, 263 bp, Homo sapiens
agtctatgctttaaaaatgagccttctttcaactgttatatactttttaaagttccatggaatcttttagggtttttcttcatatataatgacacggaggaattgctaaaaccatgcaccaggtgctatacattgtcatcaaagtccatgcccatttgcaaatgtacagtgtatggccagactgagaataatgatttatgttcaggtcaaaatcctgcccaggcaggaagaccctgcgctatttaacacagtctgatttcact

SEQ ID NO: 457915 - DNA, 1380 bp, Homo sapiens
gttttttgtttttaattaaaaaaaatttttttagctgattgtgttgggttgaggttgctttctggggaagaaaaggtgtaggagttgagacatctggagatagcaggaatggctgagtttttcttttgtgtctcctttaagaaaacatcctactaaagccctgggaaaagagacaaatggtgaagaggagaatgaaaggttgcaggagggagctcctgttttagccctgccacctacctgggggccctctggctaccagtgtccttggaggggcttccttgctgcttctcccactaaggtagattttccccaccctgcttaaggctccacagggccaagggtcttcagctgtcagaacccgggttctgagtagcatagggcaagaaagcacagaagtatagattgggccctatgggactgtttgtgcttacagtggcagggggcaggactggtatccatgctgtggctggctggagacttggcactgctcccagacaactcccacccaagctctttagctgcctctatttcccttcagcatgagcatttggggaatgatggtgactggtgacacctctgccctgagaaccccgccacagaacctacttctttccctctcctgccctggcctccccactcaccacctttctgctgtgtccctaggagctctggagccttaggaccatggacgctctcaataggaaccaaataggccctggatgccagacccagaccatggtgcagaaaggacccttggacctgatcgagacaggcaaagggctgaaagtgcaaacggacaaaccccacctggtgagcctgggcagtgggcgactcagcacagccatcaccctcctgccgctggaggaaggtaagtgtgaacagggcatctcactcaccacccctctatccttataggcattcctgccctggaggcccacctcctgcatgtgttggggcccttctactgtctgctggtgctcgcctccccacaccaccagcttgcttcccttgtctctgcctccccagactgcctgccttccttggtagatgatctggttccacgactgggcttaaagatcagcttagaaacaaggaggagaggccaggtgtggtggctcacgcctgttatcccagcactttgggaggctgaggcaggcggatcacgaggtcaggagttctagaccagcctggccaatatggtgaaaccccatctccactacaaatacaaaaattagccaggcgtggtggcacgggcctgtagtcccagctactcaggaggctgaggcagaagaatcgcttgaacccaggagacagaggttgcagtgagccgagatcgtgccactgcactccagcctgggcaacagagcgagactctatctc

SEQ ID NO: 457916 - DNA, 1034 bp, Homo sapiens
ctggaatttagaccagacttacaggctttctgctccttccttcagtgaagaagagtctccagggtccctctagtgcaggtcaaagaagtccagtccagctgagttcagctccctagggcctccccagccagtctcctggaccaagagctggctttgcaagaaaacatcctactaaagccctgggaaaagagacaaatggtgaagaggagaatgaaaggttgcaggagggagctcctgttttagccctgccacctacctgggggccctctggctaccagtgtccttggaggggcttccttgctgcttctcccactaaggagctctggagccttaggaccatggacgctctcaataggaaccaaataggccctggatgccagacccagaccatggtgcagaaaggacccttggacctgatcgagacaggcaaagggctgaaagtgcaaacggacaaaccccacctggtgagcctgggcagtgggcgactcagcacagccatcaccctcctgccgctggaggaaggtaagtgtgaacagggcatctcactcaccacccctctatccttataggcattcctgccctggaggcccacctcctgcatgtgttggggcccttctactgtctgctggtgctcgcctccccacaccaccagcttgcttcccttgtctctgcctccccagactgcctgccttccttggtagatgatctggttccacgactgggcttaaagatcagcttagaaacaaggaggagaggccaggtgtggtggctcacgcctgttatcccagcactttgggaggctgaggcaggcggatcacgaggtcaggagttctagaccagcctggccaatatggtgaaaccccatctccactacaaatacaaaaattagccaggcgtggtggcacgggcctgtagtcccagctactcaggaggctgaggcagaagaatcgcttgaacccaggagacagaggttgcagtgagccgagatcgtgccactgcactccagcctgggcaacagagcgagactctatctc

SEQ ID NO: 457917 - DNA, 258 bp, Homo sapiens
aaaagcaacagtggggagacagaaaggcaacttttgccaatgagccactaaaatatgggccaattttttggccaaatcatccaaatgactgtgcaaaggtatttgtctggcatccaccaagtttgcccaatcagtggaacgttagcaatcccctgctctccttcccagcattgagcccttggttgcctgggcccaggctgggggttttcagtatttgtaagcatttcagcagaacaataaagcctttggactacggaa

SEQ ID NO: 457918 - DNA, 3375 bp, Homo sapiens
tgccatggaactgggcaagcaacaggagggaagctgggaacgccagcgcctggagaccatcctgaacctgtgtgccgaatacagccgggctgatgggggacctgaggctggggagcttcccagcattggggaggccaccgcagcattggcactggcaggccggaggccctcacgaggccttgcaggggcctctgggcggagcagcgaggagcctggcgttgccacccaacgcctatgggagagtatggagcgctcagatgaggaaaatctcaaggaggagtgcagcagcactgagagcacccagcaggagcacgaagatgcacctagcaccaagctccagggagaggtgctagccctggaagaagagcgggctcaggtgctggggcacgtggagcagctcaaggtccgtgtgaaggagctagagcagcagctgcaggagtcagcccgagaggccgaaatggagcgggcactgctgcagggagagagggaggcagagcgggcactgctgcagaaggagcagaaggcagtggatcagctgcaggagaagctggtggccttggagacaggcatccagaaggagagggacaaggaggcagaggccctggagactgagacaaagctctttgaggacttggagttccagcagttggagcgggagagccgcgtggaggaggagcgcgagctggccggccaggggctgctccggagcaaggctgagctgctccgcagcatcgccaagaggaaggagcgcctggccatcctggacagtcaggctgggcagatccgggctcaggccgtgcaggaatcagaacgcctggcccgggacaagaatgcctccttacagctgctgcaaaaggagaaggagaagctgactgtgctggaaaggagataccactcactcacagggggcaggcctttcccgaagaccacatcgaccctcaaagaggtttaccgctccaagatggatggcgaggccaccagcccccttccccggacccgcagcggccccctcccctcctcctctggctcttcctcctcctcctcccagctcagcgtggctaccctggggcgtagcccctccccaaagagcgctctactcacccagaatggcacgggcagccttcctcgcaacctggcagccacactgcaggacatcgagaccaagcgccaactagctctgcagcagaagggacaacaagtgattgaagagcagcggcggcgactggctgagctgaagcagaaagcggcagctgaggcacagtgccagtgggatgcccttcacggggcagcacccttcccagcgggcccctcgggcttcccccctctcatgcaccactctatcctacaccacctgcctgcggggcgggagcgtggggaggagggtgagcacgcctatgatacgctgagtctggagagctctgacagcatggagaccagcatctccaccgggggcaactcggcctgctcccctgacaacatgtccagcgcgagtggtctggacatggggaagatcgaggagatggagaagatgctgaaagaggctcatgcagagaagaaccggctcatggagtcgagggagcgggagatggagctgcggcggcaggccctggaggaggagcggcggaggcgtgagcaggtagaacggaggctgcagagtgagagtgcccggaggcagcagctggtcgagaaggaggtcaagatgcgggagaaacaattttcccaggcacgacccctgacccgctacctgccaatccggaaggaggactttgacctgaagacacatattgagtcatcgggccatggtgttgatacctgcctgcacgtggtgctcagcagcaaggtctgccgtggctacttggtcaagatgggcggcaagattaaatcatggaagaagcgctggtttgtcttcgaccggctcaagcgcaccctttcctattatgtggacaagcatgagacgaagctgaagggagtcatctatttccaggccattgaggaagtgtactacgaccacctgcgcagtgcagccaagagcccgaacccagccctcaccttctgcgtaaagacccatgaccggctgtactacatggtggccccatctgcagaggccatgcgtatctggatggatgtcattgtcacaggggctgagggctacactcagttcatgaactaactgccgtgggcctcctggcagagcacaactggggcttttgtataagaagactttaatattctgtaaggagcttggtcctgtgagtttctgggctctggcctcctgaagaaccagccagaagaagaaaagtagaggtggctttgctgcctcctgggagcccagaacttgcagtaaccctttagggtcctgccccaggcccagccagggctgaggagctgtcacagagagggcctcagctctgacctgacacctgctctccccagcctgttttctcttttctaaaagacaaattatggtaccataagctgccaaagatcccctcctgcctcagacccctttgccaggggctttgggggctgagcagagccacatccagagtggggtaatagctcaggcggcccgcttcccatttctcaaaccccgctctgccccattgttctcctttcccttatactttttattaccttgctcaagggccagagatctcaagtgtcaaccttgaggtcccagctccatcccctagttgcagactcatcaccatggttaccatagtgactgcttcattgccatggttacatactaattgctgcagctctgtggcccagcccactgcttcagctgtgggccatctgagggtacgtgccatcatctctccagcccaggcccctgggcatctcatgctggggggaagggactgaatacctttttccttccccctgcctgtgtcttcagccctgatgcacaggctgccagccccccagtccagccctctcccttccactggtgccttgcttagagccagaagggatgaagccgggggatctatggaacagaggaggagcgatgcagttgggagaggaagctagaagggttatggttggagttctgtacagtgttgagtttccgacagggaaagaggattcctccaatgctcctagagagaaagcctgagcaggagatgatgcagcagaggggaagggccctgtggtgccgccgcccttccttcagcctccgaagggtgatggaaatggagagtggaggaccaggcctccagctgtctggcctcgcccttcacgccttaacactaagcccacctcccctgctctccttcccagcattgagcccttggttgcctgggcccaggctgggggttttcagtatttgtaagcatttcagcagaacaataaagcctttggactacggaa

SEQ ID NO: 457919 - DNA, 5054 bp, Homo sapiens
ccctgtggcaatgcctgcactattgatgggctccctgtccggcagcctacccggctcactcagggctgcatgttgtgcctgggtcagtccaccttccttcgctttaaccacccggctgaagccaagtggatgaaaagcatgattccagcagggggccgagcccctgggcccccctacagccctgttcctgcagaatcagaaagtctggtaaatgggaaccacaccccacagactgcaacacggggaccctctgcctgtgccagccacagttccctggtgagctctattgagaaggacctgcaagagatcatggactcactggtgctagaggagcctggagctgctggcaagaagcctgccgcaacctctccactgtcaccgatggctaatggtgggcgctacctgctgtctcccccaaccagccccggcgccatgtctgtgggctccagctatgagaacacctctccagccttctctccactctcttcaccagccagcagtggaagctgtgccagtcactcacccagtgggcaagagccaggaccttctgtgcccccgctggtacctgcccgttcctccagctaccatctggccctacagcccccacagtcccgcccaagtggtgctcgctccgagagtcctcggctgagcaggaaagggggccatgagaggcctcccagccctggcctccggggtctgctgacagacagccctgcagctactgtcttggcggaggcccggagagccactgagagcccccggctgggtgggcagctgcctgtggtggccatcagcctgagtgaatacccagcttctggtgctctcagtcaacccaccagcattcctggcagccccaagtttcagcctccagtccctgctccccgaaacaagattggcacactccaggaccgccctcccagccctttccgtgagcctccaggcagtgagcgggtgctaacaaccagcccctcacgccaactggtgggccgaacattttcagatgggttagccacccgtaccctgcagcctcctgagagtccccgcctgggccggcggggcctggacagtatgcgagaactaccccccttaagtccatctctgtcccggcgagctctctccccgctgcccacccggaccaccccagatcccaagctaaacagggaagtggcagagagtcctcggccccggcgctgggcagcccatggggcttcaccagaggacttctccctgacgctgggggcacggggccgtaggacacggagcccctcacccacactgggtgagtctctggcaccccacaagggcagcttcagtggcaggctgagcccagcctacagtctgggctctcttactggggcttcaccctgccagagtccctgtgtccagaggaagctctccagcggggacttgcgggtgcctgtcacaagggagcggaaaaatagcatcacagagatcagtgacaatgaggacgacctcctggagtaccaccggcgacagcgccaagagcggctccgggagcaggagatggagaggctggaacgccagcgcctggagaccatcctgaacctgtgtgccgaatacagccgggctgatgggggacctgaggctggggagcttcccagcattggggaggccaccgcagcattggcactggcaggccggaggccctcacgaggccttgcaggggcctctgggcggagcagcgaggagcctggcgttgccacccaacgcctatgggagagtatggagcgctcagatgaggaaaatctcaaggaggagtgcagcagcactgagagcacccagcaggagcacgaagatgcacctagcaccaagctccagggagaggtgctagccctggaagaagagcgggctcaggtgctggggcacgtggagcagctcaaggtccgtgtgaaggagctagagcagcagctgcaggagtcagcccgagaggccgaaatggagcgggcactgctgcagggagagagggaggcagagcgggcactgctgcagaaggagcagaaggcagtggatcagctgcaggagaagctggtggccttggagacaggcatccagaaggagagggacaaggaggcagaggccctggagactgagacaaagctctttgaggacttggagttccagcagttggagcgggagagccgcgtggaggaggagcgcgagctggccggccaggggctgctccggagcaaggctgagctgctccgcagcatcgccaagaggaaggagcgcctggccatcctggacagtcaggctgggcagatccgggctcaggccgtgcaggaatcagaacgcctggcccgggacaagaatgcctccttacagctgctgcaaaaggagaaggagaagctgactgtgctggaaaggagataccactcactcacagggggcaggcctttcccgaagaccacatcgaccctcaaagagctccagatggagaagctgctgctccctgctgtagacttagagcagtggtaccaggagctgatggccgggctggggactggccccgctgcagcctcccctcactcttctcccccgcctctgcccgccaaagcttcccgtcagctgcaggtttaccgctccaagatggatggcgaggccaccagcccccttccccggacccgcagcggccccctcccctcctcctctggctcttcctcctcctcctcccagctcagcgtggctaccctggggcgtagcccctccccaaagagcgctctactcacccagaatggcacgggcagccttcctcgcaacctggcagccacactgcaggacatcgagaccaagcgccaactagctctgcagcagaagggacaacaagtgattgaagagcagcggcggcgactggctgagctgaagcagaaagcggcagctgaggcacagtgccagtgggatgcccttcacggggcagcacccttcccagcgggcccctcgggcttcccccctctcatgcaccactctatcctacaccacctgcctgcggggcgggagcgtggggaggagggtgagcacgcctatgatacgctgagtctggagagctctgacagcatggagaccagcatctccaccgggggcaactcggcctgctcccctgacaacatgtccagcgcgagtggtctggacatggggaagatcgaggagatggagaagatgctgaaagaggctcatgcagagaagaaccggctcatggagtcgagggagcgggagatggagctgcggcggcaggccctggaggaggagcggcggaggcgtgagcaggtagaacggaggctgcagagtgagagtgcccggaggcagcagctggtcgagaaggaggtcaagatgcgggagaaacaattttcccaggcacgacccctgacccgctacctgccaatccggaaggaggactttgacctgaagacacatattgagtcatcgggccatggtgttgatacctgcctgcacgtggtgctcagcagcaaggtctgccgtggctacttggtcaagatgggcggcaagattaaatcatggaagaagcgctggtttgtcttcgaccggctcaagcgcaccctttcctattatgtggacaagcatgagacgaagctgaagggagtcatctatttccaggccattgaggaagtgtactacgaccacctgcgcagtgcagccaagaagaggtttttccgcttcactatggtgactgagagcccgaacccagccctcaccttctgcgtaaagacccatgaccggctgtactacatggtggccccatctgcagaggccatgcgtatctggatggatgtcattgtcacaggggctgagggctacactcagttcatgaactaactgccgtgggcctcctggcagagcacaactggggcttttgtataagaagactttaatattctgtaaggagcttggtcctgtgagtttctgggctctggcctcctgaagaaccagccagaagaagaaaagtagaggtggctttgctgcctcctgggagcccagaacttgcagtaaccctttagggtcctgccccaggcccagccagggctgaggagctgtcacagagagggcctcagctctgacctgacacctgctctccccagcctgttttctcttttctaaaagacaaattatggtaccataagctgccaaagatcccctcctgcctcagacccctttgccaggggctttgggggctgagcagagccacatccagagtggggtaatagctcaggcggcccgcttcccatttctcaaaccccgctctgccccattgttctcctttcccttatactttttattaccttgctcaagggccagagatctcaagtgtcaaccttgaggtcccagctccatcccctagttgcagactcatcaccatggttaccatagtgactgcttcattgccatggttacatactaattgctgcagctctgtggcccagcccactgcttcagctgtgggccatctgagggtacgtgccatcatctctccagcccaggcccctgggcatctcatgctggggggaagggactgaatacctttttccttccccctgcctgtgtcttcagccctgatgcacaggctgccagccccccagtccagccctctcccttccactggtgccttgcttagagccagaagggatgaagccgggggatctatggaacagaggaggagcgatgcagttgggagaggaagctagaagggttatggttggagttctgtacagtgttgagtttccgacagggaaagaggattcctccaatgctcctagagagaaagcctgagcaggagatgatgcagcagaggggaagggccctgtggtgccgccgcccttccttcagcctccgaagggtgatggaaatggagagtggaggaccaggcctccagctgtctggcctcgcccttcacgccttaacactaagcccacctcccctgctctccttcccagcattgagcccttggttgcctgggcccaggctgggggttttcagtatttgtaagcatttcagcagaacaataaagcctttggactacggaa

SEQ ID NO: 457920 - DNA, 3739 bp, Homo sapiens
ccctgtggcaatgcctgcactattgatgggctccctgtccggcagcctacccggctcactcagggctgcatgttgtgcctgggtcagtccaccttccttcgctttaaccacccggctgaagccaagtggatgaaaagcatgattccagcagggggccgagcccctgggcccccctacagccctgttcctgcagaatcagaaagtctggtaaatgggaaccacaccccacagactgcaacacggggaccctctgcctgtgccagccacagttccctggtgagctctattgagaaggacctgcaagagatcatggactcactggtgctagaggagcctggagctgctggcaagaagcctgccgcaacctctccactgtcaccgatggctaatggtgggcgctacctgctgtctcccccaaccagccccggcgccatgtctgtgggctccagctatgagaacacctctccagccttctctccactctcttcaccagccagcagtggaagctgtgccagtcactcacccagtgggcaagagccaggaccttctgtgcccccgctggtacctgcccgttcctccagctaccatctggccctacagcccccacagtcccgcccaagtggtgctcgctccgagagtcctcggctgagcaggaaagggggccatgagaggcctcccagccctggcctccggggtctgctgacagacagccctgcagctactgtcttggcggaggcccggagagccactgagagcccccggctgggtgggcagctgcctgtggtggccatcagcctgagtgaatacccagcttctggtgctctcagtcaacccaccagcattcctggcagccccaagtttcagcctccagtccctgctccccgaaacaagattggcacactccaggaccgccctcccagccctttccgtgagcctccaggcagtgagcgggtgctaacaaccagcccctcacgccaactggtgggccgaacattttcagatgggttagccacccgtaccctgcagcctcctgagagtccccgcctgggccggcggggcctggacagtatgcgagaactaccccccttaagtccatctctgtcccggcgagctctctccccgctgcccacccggaccaccccagatcccaagctaaacagggaagtggcagagagtcctcggccccggcgctgggcagcccatggggcttcaccagaggacttctccctgacgctgggggcacggggccgtaggacacggagcccctcacccacactgggtgagtctctggcaccccacaagggcagcttcagtggcaggctgagcccagcctacagtctgggctctcttactggggcttcaccctgccagagtccctgtgtccagaggaagctctccagcggggacttgcgggtgcctgtcacaagggagcggaaaaatagcatcacagagatcagtgacaatgaggacgacctcctggagtaccaccggcgacagcgccaagagcggctccgggagcaggagatggagaggctggaacgccagcgcctggagaccatcctgaacctgtgtgccgaatacagccgggctgatgggggacctgaggctggggagcttcccagcattggggaggccaccgcagcattggcactggcaggccggaggccctcacgaggccttgcaggggcctctgggcggagcagcgaggagcctggcgttgccacccaacgcctatgggagagtatggagcgctcagatgaggaaaatctcaaggaggagtgcagcagcactgagagcacccagcaggagcacgaagatgcacctagcaccaagctccagggagaggtgctagccctggaagaagagcgggctcaggtgctggggcacgtggagcagctcaaggtccgtgtgaaggagctagagcagcagctgcaggagtcagcccgagaggccgaaatggagcgggcactgctgcagggagagagggaggcagagcgggcactgctgcagaaggagcagaaggcagtggatcagctgcaggactggtcgagaaggaggtcaagatgcgggagaaacaattttcccaggcacgacccctgacccgctacctgccaatccggaaggaggactttgacctgaagacacatattgagtcatcgggccatggtgttgatacctgcctgcacgtggtgctcagcagcaaggtctgccgtggctacttggtcaagatgggcggcaagattaaatcatggaagaagcgctggtttgtcttcgaccggctcaagcgcaccctttcctattatgtggacaagcatgagacgaagctgaagggagtcatctatttccaggccattgaggaagtgtactacgaccacctgcgcagtgcagccaagagcccgaacccagccctcaccttctgcgtaaagacccatgaccggctgtactacatggtggccccatctgcagaggccatgcgtatctggatggatgtcattgtcacaggggctgagggctacactcagttcatgaactaactgccgtgggcctcctggcagagcacaactggggcttttgtataagaagactttaatattctgtaaggagcttggtcctgtgagtttctgggctctggcctcctgaagaaccagccagaagaagaaaagtagaggtggctttgctgcctcctgggagcccagaacttgcagtaaccctttagggtcctgccccaggcccagccagggctgaggagctgtcacagagagggcctcagctctgacctgacacctgctctccccagcctgttttctcttttctaaaagacaaattatggtaccataagctgccaaagatcccctcctgcctcagacccctttgccaggggctttgggggctgagcagagccacatccagagtggggtaatagctcaggcggcccgcttcccatttctcaaaccccgctctgccccattgttctcctttcccttatactttttattaccttgctcaagggccagagatctcaagtgtcaaccttgaggtcccagctccatcccctagttgcagactcatcaccatggttaccatagtgactgcttcattgccatggttacatactaattgctgcagctctgtggcccagcccactgcttcagctgtgggccatctgagggtacgtgccatcatctctccagcccaggcccctgggcatctcatgctggggggaagggactgaatacctttttccttccccctgcctgtgtcttcagccctgatgcacaggctgccagccccccagtccagccctctcccttccactggtgccttgcttagagccagaagggatgaagccgggggatctatggaacagaggaggagcgatgcagttgggagaggaagctagaagggttatggttggagttctgtacagtgttgagtttccgacagggaaagaggattcctccaatgctcctagagagaaagcctgagcaggagatgatgcagcagaggggaagggccctgtggtgccgccgcccttccttcagcctccgaagggtgatggaaatggagagtggaggaccaggcctccagctgtctggcctcgcccttcacgccttaacactaagcccacctcccctgctctccttcccagcattgagcccttggttgcctgggcccaggctgggggttttcagtatttgtaagcatttcagcagaacaataaagcctttggactacggaa

SEQ ID NO: 457921 - DNA, 2071 bp, Homo sapiens
gagcgagataaaaaaaaaagtttaaatgattttatcaggatcacagagcccatagtggtagcggggccagggtttgaagtcaggacagtcatgcttaaagcatttctctttaaccagccagggctcttggagagggtgggctttgaagatgatgcctcctcatgccagactaccctgaggtggattcctcctgcagccctgcccaggtgtgaagagggccagtggggggaagaggatggccataggtgctgaccccttggctttgggggcaggagcgggagatggagctgcggcggcaggccctggaggaggagcggcggaggcgtgagcaggtagaacggaggctgcagagtgagagtgcccggaggcagcagctggtcgagaaggaggtcaagatgcgggagaaacaattttcccaggcacgacccctgacccgctacctgccaatccggaaggaggactttgacctgaagacacatattgagtcatcgggccatggtgttgatacctgcctgcacgtggtgctcagcagcaaggtctgccgtggctacttggtcaagatgggcggcaagattaaatcatggaagaagcgctggtttgtcttcgaccggctcaagcgcaccctttcctattatgtggacaagcatgagacgaagctgaagggagtcatctatttccaggccattgaggaagtgtactacgaccacctgcgcagtgcagccaagagcccgaacccagccctcaccttctgcgtaaagacccatgaccggctgtactacatggtggccccatctgcagaggccatgcgtatctggatggatgtcattgtcacaggggctgagggctacactcagttcatgaactaactgccgtgggcctcctggcagagcacaactggggcttttgtataagaagactttaatattctgtaaggagcttggtcctgtgagtttctgggctctggcctcctgaagaaccagccagaagaagaaaagtagaggtggctttgctgcctcctgggagcccagaacttgcagtaaccctttagggtcctgccccaggcccagccagggctgaggagctgtcacagagagggcctcagctctgacctgacacctgctctccccagcctgttttctcttttctaaaagacaaattatggtaccataagctgccaaagatcccctcctgcctcagacccctttgccaggggctttgggggctgagcagagccacatccagagtggggtaatagctcaggcggcccgcttcccatttctcaaaccccgctctgccccattgttctcctttcccttatactttttattaccttgctcaagggccagagatctcaagtgtcaaccttgaggtcccagctccatcccctagttgcagactcatcaccatggttaccatagtgactgcttcattgccatggttacatactaattgctgcagctctgtggcccagcccactgcttcagctgtgggccatctgagggtacgtgccatcatctctccagcccaggcccctgggcatctcatgctggggggaagggactgaatacctttttccttccccctgcctgtgtcttcagccctgatgcacaggctgccagccccccagtccagccctctcccttccactggtgccttgcttagagccagaagggatgaagccgggggatctatggaacagaggaggagcgatgcagttgggagaggaagctagaagggttatggttggagttctgtacagtgttgagtttccgacagggaaagaggattcctccaatgctcctagagagaaagcctgagcaggagatgatgcagcagaggggaagggccctgtggtgccgccgcccttccttcagcctccgaagggtgatggaaatggagagtggaggaccaggcctccagctgtctggcctcgcccttcacgccttaacactaagcccacctcccctgctctccttcccagcattgagcccttggttgcctgggcccaggctgggggttttcagtatttgtaagcatttcagcagaacaataaagcctttggactacggaa

SEQ ID NO: 457922 - DNA, 4819 bp, Homo sapiens
ccctgtggcaatgcctgcactattgatgggctccctgtccggcagcctacccggctcactcagggctgcatgttgtgcctgggtcagtccaccttccttcgctttaaccacccggctgaagccaagtggatgaaaagcatgattccagcagggggccgagcccctgggcccccctacagccctgttcctgcagaatcagaaagtctggtaaatgggaaccacaccccacagactgcaacacggggaccctctgcctgtgccagccacagttccctggtgagctctattgagaaggacctgcaagagatcatggactcactggtgctagaggagcctggagctgctggcaagaagcctgccgcaacctctccactgtcaccgatggctaatggtgggcgctacctgctgtctcccccaaccagccccggcgccatgtctgtgggctccagctatgagaacacctctccagccttctctccactctcttcaccagccagcagtggaagctgtgccagtcactcacccagtgggcaagagccaggaccttctgtgcccccgctggtacctgcccgttcctccagctaccatctggccctacagcccccacagtcccgcccaagtggtgctcgctccgagagtcctcggctgagcaggaaagggggccatgagaggcctcccagccctggcctccggggtctgctgacagacagccctgcagctactgtcttggcggaggcccggagagccactgagagcccccggctgggtgggcagctgcctgtggtggccatcagcctgagtgaatacccagcttctggtgctctcagtcaacccaccagcattcctggcagccccaagtttcagcctccagtccctgctccccgaaacaagattggcacactccaggaccgccctcccagccctttccgtgagcctccaggcagtgagcgggtgctaacaaccagcccctcacgccaactggtgggccgaacattttcagatgggttagccacccgtaccctgcagcctcctgagagtccccgcctgggccggcggggcctggacagtatgcgagaactaccccccttaagtccatctctgtcccggcgagctctctccccgctgcccacccggaccaccccagatcccaagctaaacagggaagtggcagagagtcctcggccccggcgctgggcagcccatggggcttcaccagaggacttctccctgacgctgggggcacggggccgtaggacacggagcccctcacccacactgggtgagtctctggcaccccacaagggcagcttcagtggcaggctgagcccagcctacagtctgggctctcttactggggcttcaccctgccagagtccctgtgtccagaggaagctctccagcggggacttgcgggtgcctgtcacaagggagcggaaaaatagcatcacagagatcagtgacaatgaggacgacctcctggagtaccaccggcgacagcgccaagagcggctccgggagcaggagatggagaggctggaacgccagcgcctggagaccatcctgaacctgtgtgccgaatacagccgggctgatgggggacctgaggctggggagcttcccagcattggggaggccaccgcagcattggcactggcaggccggaggccctcacgaggccttgcaggggcctctgggcggagcagcgaggagcctggcgttgccacccaacgcctatgggagagtatggagcgctcagatgaggaaaatctcaaggaggagtgcagcagcactgagagcacccagcaggagcacgaagatgcacctagcaccaagctccagggagaggtgctagccctggaagaagagcgggctcaggtgctggggcacgtggagcagctcaaggtccgtgtgaaggagctagagcagcagctgcaggagtcagcccgagaggccgaaatggagcgggcactgctgcagggagagagggaggcagagcgggcactgctgcagaaggagcagaaggcagtggatcagctgcaggagaagctggtggccttggagacaggcatccagaaggagagggacaaggaggcagaggccctggagactgagacaaagctctttgaggacttggagttccagcagttggagcgggagagccgcgtggaggaggagcgcgagctggccggccaggggctgctccggagcaaggctgagctgctccgcagcatcgccaagaggaaggagcgcctggccatcctggacagtcaggctgggcagatccgggctcaggccgtgcaggaatcagaacgcctggcccgggacaagaatgcctccttacagctgctgcaaaaggagaaggagaagctgactgtgctggaaaggagataccactcactcacagggggcaggcctttcccgaagaccacatcgaccctcaaagaggtttaccgctccaagatggatggcgaggccaccagcccccttccccggacccgcagcggccccctcccctcctcctctggctcttcctcctcctcctcccagctcagcgtggctaccctggggcgtagcccctccccaaagagcgctctactcacccagaatggcacgggcagccttcctcgcaacctggcagccacactgcaggacatcgagaccaagcgccaactagctctgcagcagaagggacaacaagtgattgaagagcagcggcggcgactggctgagctgaagcagaaagcggcagctgaggcacagtgccagtgggatgcccttcacggggcagcacccttcccagcgggcccctcgggcttcccccctctcatgcaccactctatcctacaccacctgcctgcggggcgggagcgtggggaggagggtgagcacgcctatgatacgctgagtctggagagctctgacagcatggagaccagcatctccaccgggggcaactcggcctgctcccctgacaacatgtccagcgcgagtggtctggacatggggaagatcgaggagatggagaagatgctgaaagaggctcatgcagagaagaaccggctcatggagtcgagggagcgggagatggagctgcggcggcaggccctggaggaggagcggcggaggcgtgagcaggtagaacggaggctgcagagtgagagtgcccggaggcagcagctggtcgagaaggaggtcaagatgcgggagaaacaattttcccaggcacgacccctgacccgctacctgccaatccggaaggaggactttgacctgaagacacatattgagtcatcgggccatggtgttgatacctgcctgcacgtggtgctcagcagcaaggtctgccgtggctacttggtcaagatgggcggcaagattaaatcatggaagaagcgctggtttgtcttcgaccggctcaagcgcaccctttcctattatgtggacaagcatgagacgaagctgaagggagtcatctatttccaggccattgaggaagtgtactacgaccacctgcgcagtgcagccaagagcccgaacccagccctcaccttctgcgtaaagacccatgaccggctgtactacatggtggccccatctgcagaggccatgcgtatctggatggatgtcattgtcacaggggctgagggctacactcagttcatgaactaactgccgtgggcctcctggcagagcacaactggggcttttgtataagaagactttaatattctgtaaggagcttggtcctgtgagtttctgggctctggcctcctgaagaaccagccagaagaagaaaagtagaggtggctttgctgcctcctgggagcccagaacttgcagtaaccctttagggtcctgccccaggcccagccagggctgaggagctgtcacagagagggcctcagctctgacctgacacctgctctccccagcctgttttctcttttccctttgccaggggctttgggggctgagcagagccacatccagagtggggtaatagctcaggcggcccgcttcccatttctcaaaccccgctctgccccattgttctcctttcccttatactttttattaccttgctcaagggccagagatctcaagtgtcaaccttgaggtcccagctccatcccctagttgcagactcatcaccatggttaccatagtgactgcttcattgccatggttacatactaattgctgcagctctgtggcccagcccactgcttcagctgtgggccatctgagggtacgtgccatcatctctccagcccaggcccctgggcatctcatgctggggggaagggactgaatacctttttccttccccctgcctgtgtcttcagccctgatgcacaggctgccagccccccagtccagccctctcccttccactggtgccttgcttagagccagaagggatgaagccgggggatctatggaacagaggaggagcgatgcagttgggagaggaagctagaagggttatggttggagttctgtacagtgttgagtttccgacagggaaagaggattcctccaatgctcctagagagaaagcctgagcaggagatgatgcagcagaggggaagggccctgtggtgccgccgcccttccttcagcctccgaagggtgatggaaatggagagtggaggaccaggcctccagctgtctggcctcgcccttcacgccttaacactaagcccacctcccctgctctccttcccagcattgagcccttggttgcctgggcccaggctgggggttttcagtatttgtaagcatttcagcagaacaataaagcctttggactacggaa

SEQ ID NO: 457923 - DNA, 1435 bp, Homo sapiens
  misc_feature (15)..(15): n is a, c, g, or t
  misc_feature (49)..(51): n is a, c, g, or t
ggctcggtaccgggncagtacggatgtgtactacgaccacctgcgcagnnnacaagaagaggtttttccgcttcactatggtgactgagagcccgaacccagccctcaccttctgcgtaaagacccatgaccggctgtactacatggtggccccatctgcagaggccatgcgtatctggatggatgtcattgtcacaggggctgagggctacactcagttcatgaactaactgccgtgggcctcctggcagagcacaactggggcttttgtataagaagactttaatattctgtaaggagcttggtcctgtgagtttctgggctctggcctcctgaagaaccagccagaagaagaaaagtagaggtggctttgctgcctcctgggagcccagaacttgcagtaaccctttagggtcctgccccaggcccagccagggctgaggagctgtcacagagagggcctcagctctgacctgacacctgctctccccagcctgttttctcttttctaaaagacaaattatggtaccataagctgccaaagatcccctcctgcctcagacccctttgccaggggctttgggggctgagcagagccacatccagagtggggtaatagctcaggcggcccgcttcccatttctcaaaccccgctctgccccattgttctcctttcccttatactttttattaccttgctcaagggccagagatctcaagtgtcaaccttgaggtcccagctccatcccctagttgcagactcatcaccatggttaccatagtgactgcttcattgccatggttacatactaattgctgcagctctgtggcccagcccactgcttcagctgtgggccatctgagggtacgtgccatcatctctccagcccaggcccctgggcatctcatgctggggggaagggactgaatacctttttccttccccctgcctgtgtcttcagccctgatgcacaggctgccagccccccagtccagccctctcccttccactggtgccttgcttagagccagaagggatgaagccgggggatctatggaacagaggaggagcgatgcagttgggagaggaagctagaagggttatggttggagttctgtacagtgttgagtttccgacagggaaagaggattcctccaatgctcctagagagaaagcctgagcaggagatgatgcagcagaggggaagggccctgtggtgccgccgcccttccttcagcctccgaagggtgatggaaatggagagtggaggaccaggcctccagctgtctggcctcgcccttcacgccttaacactaagcccacctcccctgctctccttcccagcattgagcccttggttgcctgggcccaggctgggggttttcagtatttgtaagcatttcagcagaacaataaagcctttggactacggaa

SEQ ID NO: 457924 - DNA, 1461 bp, Homo sapiens
tagagcgaatcccccgcggtccagttacagatctgtacgtatcgaccaccgtgcgcggtgcagccagatcaagagtgttttatccgcttcactactcgtcactgagagccctgcaagcccgaacccagccctcaccttctgcgtaaagacccatgaccggctgtactacatggtggccccatctgcagaggccatgcgtatctggatggatgtcattgtcacaggggctgagggctacactcagttcatgaactaactgccgtgggcctcctggcagagcacaactggggcttttgtataagaagactttaatattctgtaaggagcttggtcctgtgagtttctgggctctggcctcctgaagaaccagccagaagaagaaaagtagaggtggctttgctgcctcctgggagcccagaacttgcagtaaccctttagggtcctgccccaggcccagccagggctgaggagctgtcacagagagggcctcagctctgacctgacacctgctctccccagcctgttttctcttttctaaaagacaaattatggtaccataagctgccaaagatcccctcctgcctcagacccctttgccaggggctttgggggctgagcagagccacatccagagtggggtaatagctcaggcggcccgcttcccatttctcaaaccccgctctgccccattgttctcctttcccttatactttttattaccttgctcaagggccagagatctcaagtgtcaaccttgaggtcccagctccatcccctagttgcagactcatcaccatggttaccatagtgactgcttcattgccatggttacatactaattgctgcagctctgtggcccagcccactgcttcagctgtgggccatctgagggtacgtgccatcatctctccagcccaggcccctgggcatctcatgctggggggaagggactgaatacctttttccttccccctgcctgtgtcttcagccctgatgcacaggctgccagccccccagtccagccctctcccttccactggtgccttgcttagagccagaagggatgaagccgggggatctatggaacagaggaggagcgatgcagttgggagaggaagctagaagggttatggttggagttctgtacagtgttgagtttccgacagggaaagaggattcctccaatgctcctagagagaaagcctgagcaggagatgatgcagcagaggggaagggccctgtggtgccgccgcccttccttcagcctccgaagggtgatggaaatggagagtggaggaccaggcctccagctgtctggcctcgcccttcacgccttaacactaagcccacctcccctgctctccttcccagcattgagcccttggttgcctgggcccaggctgggggttttcagtatttgtaagcatttcagcagaacaataaagcctttggactacggaa

SEQ ID NO: 457925 - DNA, 4789 bp, Homo sapiens
ccctgtggcaatgcctgcactattgatgggctccctgtccggcagcctacccggctcactcagggctgcatgttgtgcctgggtcagtccaccttccttcgctttaaccacccggctgaagccaagtggatgaaaagcatgattccagcagggggccgagcccctgggcccccctacagccctgttcctgcagaatcagaaagtctggtaaatgggaaccacaccccacagactgcaacacggggaccctctgcctgtgccagccacagttccctggtgagctctattgagaaggacctgcaagagatcatggactcactggtgctagaggagcctggagctgctggcaagaagcctgccgcaacctctccactgtcaccgatggctaatggtgggcgctacctgctgtctcccccaaccagccccggcgccatgtctgtgggctccagctatgagaacacctctccagccttctctccactctcttcaccagccagcagtggaagctgtgccagtcactcacccagtgggcaagagccaggaccttctgtgcccccgctggtacctgcccgttcctccagctaccatctggccctacagcccccacagtcccgcccaagtggtgctcgctccgagagtcctcggctgagcaggaaagggggccatgagaggcctcccagccctggcctccggggtctgctgacagacagccctgcagctactgtcttggcggaggcccggagagccactgagagcccccggctgggtgggcagctgcctgtggtggccatcagcctgagtgaatacccagcttctggtgctctcagtcaacccaccagcattcctggcagccccaagtttcagcctccagtccctgctccccgaaacaagattggcacactccaggaccgccctcccagccctttccgtgagcctccaggcagtgagcgggtgctaacaaccagcccctcacgccaactggtgggccgaacattttcagatgggttagccacccgtaccctgcagcctcctgagagtccccgcctgggccggcggggcctggacagtatgcgagaactaccccccttaagtccatctctgtcccggcgagctctctccccgctgcccacccggaccaccccagatcccaagctaaacagggaagtggcagagagtcctcggccccggcgctgggcagcccatggggcttcaccagaggacttctccctgacgctgggggcacggggccgtaggacacggagcccctcacccacactgggtgagtctctggcaccccacaagggcagcttcagtggcaggctgagcccagcctacagtctgggctctcttactggggcttcaccctgccagagtccctgtgtccagaggaagctctccagcggggacttgcgggtgcctgtcacaagggagcggaaaaatagcatcacagagatcagtgacaatgaggacgacctcctggagtaccaccggcgacagcgccaagagcggctccgggagcaggagatggagaggctggaacgccagcgcctggagaccatcctgaacctgtgtgccgaatacagccgggctgatgggggacctgaggctggggagcttcccagcattggggaggccaccgcagcattggcactggcaggccggaggccctcacgaggccttgcaggggcctctgggcggagcagcgaggagcctggcgttgccacccaacgcctatgggagagtatggagcgctcagatgaggaaaatctcaaggaggagtgcagcagcactgagagcacccagcaggagcacgaagatgcacctagcaccaagctccagggagaggtgctagccctggaagaagagcgggctcaggtgctggggcacgtggagcagctcaaggtccgtgtgaaggagctagagcagcagctgcaggagtcagcccgagaggccgaaatggagcgggcactgctgcagggagagagggaggcagagcgggcactgctgcagaaggagcagaaggcagtggatcagctgcaggagaagctggtggccttggagacaggcatccagaaggagagggacaaggaggcagaggccctggagactgagacaaagctctttgaggacttggagttccagcagttggagcgggagagccgcgtggaggaggagcgcgagctggccggccaggggctgctccggagcaaggctgagctgctccgcagcatcgccaagaggaaggagcgcctggccatcctggacagtcaggctgggcagatccgggctcaggccgtgcaggaatcagaacgcctggcccgggacaagaatgcctccttacagctgctgcaaaaggagaaggagaagctgactgtgctggaaaggagataccactcactcacagggggcaggcctttcccgaagaccacatcgaccctcaaagaggtttaccgctccaagatggatggcgaggccaccagcccccttccccggacccgcagcggccccctcccctcctcctctggctcttcctcctcctcctcccagctcagcgtggctaccctggggcgtagcccctccccaaagagcgctctactcacccagaatggcacgggcagccttcctcgcaacctggcagccacactgcaggacatcgagaccaagcgccaactagctctgcagcagaagggacaacaagtgattgaagagcagcggcggcgactggctgagctgaagcagaaagcggcagctgaggcacagtgccagtgggatgcccttcacggggcagcacccttcccagcgggcccctcgggcttcccccctctcatgcaccactctatcctacaccacctgcctgcggggcgggagcgtggggaggagggtgagcacgcctatgatacgctgagtctggagagctctgacagcatggagaccagcatctccaccgggggcaactcggcctgctcccctgacaacatgtccagcgcgagtggtctggacatggggaagatcgaggagatggagaagatgctgaaagaggctcatgcagagaagaaccggctcatggagtcgagggagcgggagatggagctgcggcggcaggccctggaggaggagcggcggaggcgtgagcaggtagaacggaggctgcagagtgagagtgcccggaggcagcagctggtcgagaaggaggtcaagatgcgggagaaacaattttcccaggcacgacccctgacccgctacctgccaatccggaaggaggactttgacctgaagacacatattgagtcatcgggccatggtgttgatacctgcctgcacgtggtgctcagcagcaaggtctgccgtggctacttggtcaagatgggcggcaagattaaatcatggaagaagcgctggtttgtcttcgaccggctcaagcgcaccctttcctattatgtggacaagcatgagacgaagctgaagggagtcatctatttccaggccattgaggaagtgtactacgaccacctgcgcagtgcagccaagagcccgaacccagccctcaccttctgcgtaaagacccatgaccggctgtactacatggtggccccatctgcagaggccatgcgtatctggatggatgtcattgtcacaggggctgagggctacactcagttcatgaactaactgccgtgggcctcctggcagagcacaactggggcttttgtataagaagactttaatattctgtaaggagcttggtcctgtgagtttctgggctctggcctcctgaagaaccagccagaagaagaaaagtagaggtggctttgctgcctcctgggagcccagaacttgcagtaaccctttagggtcctgccccaggcccagccagggctgaggagctgtcacagagagggcctcagctctgacctgacacctgctctccccagcctgttttctcttttctaaaagacaaattatggtaccataagctgccaaagatcccctcctgcctcagacccctttgccaggggctttgggggctgagcagagccacatccagagtggggtaatagctcaggcggcccgcttcccatttctcaaaccccgctctgccccattgttctcctttcccttatactttttattaccttgctcaagggccagagatctcaagtgtcaaccttgaggtcccagctccatcccctagttgcagactcatcaccatggttaccatagtgactgcttcattgccatggttacatactaattgctgcagctctgtggcccagcccactgcttcagctgtgggccatctgagggtacgtgccatcatctctccagcccaggcccctgggcatctcatgctggggggaagggactgaatacctttttccttccccctgcctgtgtcttcagccctgatgcacaggctgccagccccccagtccagccctctcccttccactggtgccttgcttagagccagaagggatgaagccgggggatctatggaacagaggaggagcgatgcagttgggagaggaagctagaagggttatgatgcagcagaggggaagggccctgtggtgccgccgcccttccttcagcctccgaagggtgatggaaatggagagtggaggaccaggcctccagctgtctggcctcgcccttcacgccttaacactaagcccacctcccctgctctccttcccagcattgagcccttggttgcctgggcccaggctgggggttttcagtatttgtaagcatttcagcagaacaataaagcctttggactacggaa

SEQ ID NO: 457926 - DNA, 4243 bp, Homo sapiens
ccctgtggcaatgcctgcactattgatgggctccctgtccggcagcctacccggctcactcagggctgcatgttgtgcctgggtcagtccaccttccttcgctttaaccacccggctgaagccaagtggatgaaaagcatgattccagcagggggccgagcccctgggcccccctacagccctgttcctgcagaatcagaaagtctggtaaatgggaaccacaccccacagactgcaacacggggaccctctgcctgtgccagccacagttccctggtgagctctattgagaaggacctgcaagagatcatggactcactggtgctagaggagcctggagctgctggcaagaagcctgccgcaacctctccactgtcaccgatggctaatggtgggcgctacctgctgtctcccccaaccagccccggcgccatgtctgtgggctccagctatgagaacacctctccagccttctctccactctcttcaccagccagcagtggaagctgtgccagtcactcacccagtgggcaagagccaggaccttctgtgcccccgctggtacctgcccgttcctccagctaccatctggccctacagcccccacagtcccgcccaagtggtgctcgctccgagagtcctcggctgagcaggaaagggggccatgagaggcctcccagccctggcctccggggtctgctgacagacagccctgcagctactgtcttggcggaggcccggagagccactgagagcccccggctgggtgggcagctgcctgtggtggccatcagcctgagtgaatacccagcttctggtgctctcagtcaacccaccagcattcctggcagccccaagtttcagcctccagtccctgctccccgaaacaagattggcacactccaggaccgccctcccagccctttccgtgagcctccaggcagtgagcgggtgctaacaaccagcccctcacgccaactggtgggccgaacattttcagatgggttagccacccgtaccctgcagcctcctgagagtccccgcctgggccggcggggcctggacagtatgcgagaactaccccccttaagtccatctctgtcccggcgagctctctccccgctgcccacccggaccaccccagatcccaagctaaacagggaagtggcagagagtcctcggccccggcgctgggcagcccatggggcttcaccagaggacttctccctgacgctgggggcacggggccgtaggacacggagcccctcacccacactgggtgagtctctggcaccccacaagggcagcttcagtggcaggctgagcccagcctacagtctgggctctcttactggggcttcaccctgccagagtccctgtgtccagaggaagctctccagcggggacttgcgggtgcctgtcacaagggagcggaaaaatagcatcacagagatcagtgacaatgaggacgacctcctggagtaccaccggcgacagcgccaagagcggctccgggagcaggagatggagaggctggaacgccagcgcctggagaccatcctgaacctgtgtgccgaatacagccgggctgatgggggacctgaggctggggagcttcccagcattggggaggccaccgcagcattggcactggcaggccggaggccctcacgaggccttgcaggggcctctgggcggagcagcgaggagcctggcgttgccacccaacgcctatgggagagtatggagcgctcagatgaggaaaatctcaaggaggagtgcagcagcactgagagcacccagcaggagcacgaagatgcacctagcaccaagctccagggagaggtgctagccctggaagaagagcgggctcaggtgctggggcacgtggagcagctcaaggtccgtgtgaaggagctagagcagcagctgcaggagtcagcccgagaggccgaaatggagcgggcactgctgcagggagagagggaggcagagcgggcactgctgcagaaggagcagaaggcagtggatcagctgcaggagaagctggtggccttggagacaggcatccagaaggagagggacaaggaggcagaggccctggagactgagacaaagctctttgaggacttggagttccagcagttggagcgggagagccgcgtggaggaggagcgcgagctggccggccaggggctgctccggagcaaggctgagctgctccgcagcatcgccaagaggaaggagcgcctggccatcctggacagtcaggctgggcagatccgggctcaggccgtgcaggaatcagaacgcctggcccgggacaagaatgcctccttacagctgctgcaaaaggagaaggagaagctgactgtgctggaaaggagataccactcactcacagggggcaggcctttcccgaagaccacatcgaccctcaaagaggtttaccgctccaagatggatggcgaggccaccagcccccttccccggacccgcagcggccccctcccctcctcctctggctcttcctcctcctcctcccagctcagcgtggctaccctggggcgtagcccctccccaaagagcgctctactcacccagaatggcacgggcagccttcctcgcaacctggcagccacactgcaggacatcgagaccaagcgccaactagctctgcagcagaagggacaacaagtgattgaagagcagcggcggcgactggctgagctgaagcagaaagcggcagctgaggcacagtgccagtgggatgcccttcacggggcagcacccttcccagcgggcccctcgggcttcccccctctcatgcaccactctatcctacaccacctgcctgcggggcgggagcgtggggaggagggtgagcacgcctatgatacgctgagtctggagagctctgacagcatggagaccagcatctccaccgggggcaactcggcctgctcccctgacaacatgtccagcgcgagtggtctggacatggggaagatcgaggagatggagaagatgctgaaagaggctcatgcagagaagaaccggctcatggagtcgagggagcgggagatggagctgcggcggcaggccctggaggaggagcggcggaggcgtgagcaggtagaacggaggctgcagagtgagagtgcccggaggcagcagctggtcgagaaggaggtcaagatgcgggagaaacaattttcccaggcacgacccctgacccgctacctgccaatccggaaggaggactttgacctgaagacacatattgagtcatcgggccatggtgttgatacctgcctgcacgtggtgctcagcagcaaggtctgccgtggctacttggtcaagatgggcggcaagattaaatcatggaagaagcgctggtttgtcttcgaccggctcaagcgcaccctttcctattatgtggacaagcatgagacgaagctgaagggagtcatctatttccaggccattgaggaagtgtactacgaccacctgcgcagtgcagccaagagcccgaacccagccctcaccttctgcgtaaagacccatgaccggctgtactacatggtggccccatctgcagaggccatgcgtatctggatggatgtcattgtcacaggggctgagggctacactcagttcatgaactaactgccgtgggcctcctggcagagcacaactggggcttttgtataagaagactttaatattctgtaaggagcttggtcctgtgagtttctgggctctggcctcctgaagaaccagccagaagaagaaaagtagaggtggctttgctgcctcctgggagcccagaacttgcagtaaccctttagggtcctgccccaggcccagccagggctgaggagctgtcacagagagggcctcagctctgacctgacacctgctctccccagcctgttttctcttttctaaaagacaaattatggtaccataagctgccaaagatcccctcctgcctcagacccctttgccaggggctttgggggctgagcagagccacatccagagtggggtaatagctcaggcggcccgcttcccatttctcaaaccccgctctgccccattgttctcctttcccttatactttttattactcccctgctctccttcccagcattgagcccttggttgcctgggcccaggctgggggttttcagtatttgtaagcatttcagcagaacaataaagcctttggactacggaa

SEQ ID NO: 457927 - DNA, 2543 bp, Homo sapiens
ccctgtggcaatgcctgcactattgatgggctccctgtccggcagcctacccggctcactcagggctgcatgttgtgcctgggtcagtccaccttccttcgctttaaccacccggctgaagccaagtggatgaaaagcatgattccagcagggggccgagcccctgggcccccctacagccctgttcctgcagaatcagaaagtctggtaaatgggaaccacaccccacagactgcaacacggggaccctctgcctgtgccagccacagttccctggtgagctctattgagaaggacctgcaagagatcatggactcactggtgctagaggagcctggagctgctggcaagaagcctgccgcaacctctccactgtcaccgatggctaatggtgggcgctacctgctgtctcccccaaccagccccggcgccatgtctgtgggctccagctatgagaacacctctccagccttctctccactctcttcaccagccagcagtggaagctgtgccagtcactcacccagtgggcaagagccaggaccttctgtgcccccgctggtacctgcccgttcctccagctaccatctggccctacagcccccacagtcccgcccaagtggtgctcgctccgagagtcctcggctgagcaggaaagggggccatgagaggcctcccagccctggcctccggggtctgctgacagacagccctgcagctactgtcttggcggaggcccggagagccactgagagcccccggctgggtgggcagctgcctgtggtggccatcagcctgagtgaatacccagcttctggtgctctcagtcaacccaccagcattcctggcagccccaagtttcagcctccagtccctgctccccgaaacaagattggcacactccaggaccgccctcccagccctttccgtgagcctccaggcagtgagcgggtgctaacaaccagcccctcacgccaactggtgggccgaacattttcagatgggttagccacccgtaccctgcagcctcctgagagtccccgcctgggccggcggggcctggacagtatgcgagaactaccccccttaagtccatctctgtcccggcgagctctctccccgctgcccacccggaccaccccagatcccaagctaaacagggaagtggcagagagtcctcggccccggcgctgggcagcccatggggcttcaccagaggacttctccctgacgctgggggcacggggccgtaggacacggagcccctcacccacactgggtgagtctctggcaccccacaagggcagcttcagtggcaggctgagcccagcctacagtctgggctctcttactggggcttcaccctgccagagtccctgtgtccagaggaagctctccagcggggacttgcgggtgcctgtcacaagggagcggaaaaatagcatcacagagatcagtgacaatgaggacgacctcctggagtaccaccggcgacagcgccaagagcggctccgggagcaggagatggagaggctggaacgccagcgcctggagaccatcctgaacctgtgtgccgaatacagccgggctgatgggggacctgaggctggggagcttcccagcattggggaggccaccgcagcattggcactggcaggccggaggccctcacgaggccttgcaggggcctctgggcggagcagcgaggagcctggcgttgccacccaacgcctatgggagagtatggagcgctcagatgaggaaaatctcaaggaggagtgcagcagcactgagagcacccagcaggagcacgaagatgcacctagcaccaagctccagggagaggtgctagccctggaagaagagcgggctcaggtgctggggcacgtggagcagctcaaggtccgtgtgaaggagctagagcagcagctgcaggagtcagcccgagaggccgaaatggagcgggcactgctgcagggagagagggaggcagagcgggcactgctgcagaaggagcagaaggcagtggatcagctgcaggagaagctggtggccttggagacaggcatccagaaggagagggacaaggagagggcggagctggccgcgggacggaggcacctggaggcccgccaggcgctctacgccgagctccagacgcagctcgataactgccccgagtcagtgcgggaacagttacaggagcagctgagaagggaggcagaggccctggagactgagacaaagctctttgaggacttggagttccagcagttggagcgggagagccgcgtggaggaggagcgcgagctggccggccaggggctgctccggagcaaggctgagctgctccgcagcatcgccaagaggaaggtgtgccccacctcgttccctgctgcgtgctgttggaggccagtgacctgggtttgaatcccaatgacctcacaaaagttaacttcgtcttttgtgcctggatttccttgtctgtaaaatgagaattacaacaggttgttgtgagaattaaacaagatgtaaagacaaaa

SEQ ID NO: 457928 - DNA, 2655 bp, Homo sapiens
ccctgtggcaatgcctgcactattgatgggctccctgtccggcagcctacccggctcactcagggctgcatgttgtgcctgggtcagtccaccttccttcgctttaaccacccggctgaagccaagtggatgaaaagcatgattccagcagggggccgagcccctgggcccccctacagccctgttcctgcagaatcagaaagtctggtaaatgggaaccacaccccacagactgcaacacggggaccctctgcctgtgccagccacagttccctggtgagctctattgagaaggacctgcaagagatcatggactcactggtgctagaggagcctggagctgctggcaagaagcctgccgcaacctctccactgtcaccgatggctaatggtgggcgctacctgctgtctcccccaaccagccccggcgccatgtctgtgggctccagctatgagaacacctctccagccttctctccactctcttcaccagccagcagtggaagctgtgccagtcactcacccagtgggcaagagccaggaccttctgtgcccccgctggtacctgcccgttcctccagctaccatctggccctacagcccccacagtcccgcccaagtggtgctcgctccgagagtcctcggctgagcaggaaagggggccatgagaggcctcccagccctggcctccggggtctgctgacagacagccctgcagctactgtcttggcggaggcccggagagccactgagagcccccggctgggtgggcagctgcctgtggtggccatcagcctgagtgaatacccagcttctggtgctctcagtcaacccaccagcattcctggcagccccaagtttcagcctccagtccctgctccccgaaacaagattggcacactccaggaccgccctcccagccctttccgtgagcctccaggcagtgagcgggtgctaacaaccagcccctcacgccaactggtgggccgaacattttcagatgggttagccacccgtaccctgcagcctcctgagagtccccgcctgggccggcggggcctggacagtatgcgagaactaccccccttaagtccatctctgtcccggcgagctctctccccgctgcccacccggaccaccccagatcccaagctaaacagggaagtggcagagagtcctcggccccggcgctgggcagcccatggggcttcaccagaggacttctccctgacgctgggggcacggggccgtaggacacggagcccctcacccacactgggtgagtctctggcaccccacaagggcagcttcagtggcaggctgagcccagcctacagtctgggctctcttactggggcttcaccctgccagagtccctgtgtccagaggaagctctccagcggggacttgcgggtgcctgtcacaagggagcggaaaaatagcatcacagagatcagtgacaatgaggacgacctcctggagtaccaccggcgacagcgccaagagcggctccgggagcaggagatggagaggctggaacgccagcgcctggagaccatcctgaacctgtgtgccgaatacagccgggctgatgggggacctgaggctggggagcttcccagcattggggaggccaccgcagcattggcactggcaggccggaggccctcacgaggccttgcaggggcctctgggcggagcagcgaggagcctggcgttgccacccaacgcctatgggagagtatggagcgctcagatgaggaaaatctcaaggaggagtgcagcagcactgagagcacccagcaggagcacgaagatgcacctagcaccaagctccagggagaggtgctagccctggaagaagagcgggctcaggtgctggggcacgtggagcagctcaaggtccgtgtgaaggagctagagcagcagctgcaggagtcagcccgagaggccgaaatggagcgggcactgctgcagggagagagggaggcagagcgggcactgctgcagaaggagcagaaggcagtggatcagctgcaggagaagctggtggccttggagacaggcatccagaaggagagggacaaggagagggcggagctggccgcgggacggaggcacctggaggcccgccaggcgctctacgccgagctccagacgcagctcgataactgccccgagtcagtgcgggaacagttacaggagcagctgagaagggtcagttccaccgccccccctcccccggccccgcgggccacgccccagaaggaagagaggagagcggtgggacgggaccacctggcctctgcagtacctgccggacaccagggaggcagaggccctggagactgagacaaagctctttgaggacttggagttccagcagttggagcgggagagccgcgtggaggaggagcgcgagctggccggccaggggctgctccggagcaaggctgagctgctccgcagcatcgccaagaggaaggtgtgccccacctcgttccctgctgcgtgctgttggaggccagtgacctgggtttgaatcccaatgacctcacaaaagttaacttcgtcttttgtgcctggatttccttgtctgtaaaatgagaattacaacaggttgttgtgagaattaaacaagatgtaaagacaaaa

SEQ ID NO: 457929 - DNA, 388 bp, Homo sapiens
ttgctgagaggaaactctggtcctcactggaaaagcctttgtgtttgatcctcttgatactcacttttgaacctggggcgccaaggaccagtgccccccttgtcagggtatagctctgtcagggtccagggagtttagagagcccaggactgctgtggtgtgagaagggaacatttcagcctggggctcacatggactggtagggtctaggctctggacctatttaggactaagctccagggctttctaggggctgggaggggaaagggcagatagggaggcaggtgagaatattcctgggcatgggtgagccccatcttagaccttcctctcttcctttggcagagcccgaacccagccctcaccttctgcgtaaagacccatgacc

SEQ ID NO: 457930 - DNA, 520 bp, Homo sapiens
gaaggcagtggatcagctgcaggagaagctggtggccttggagacaggcatccagaaggagagggacaaggtaacccacacctggcccagcttagtgctgggtaccagtggcctgggagagaaggagaaatgtcttctctggggccctgtacccttcacctcatcatccattctgcagtacaagtggtctctgtggctttccagagacagagtgacttctcctcctctgtggaaggaaccagcttggagggcactgccaggggctgggctggtgtctggggtctcctctgtctgggtctgtgtgctacctctgggtgcctgccatcctaggccctttatggcccttctaggaagtgccaaagccccttcttgggcagtgagcacagcccaagggactgacattggggagtgattcaagttcgggtcccaccatctggagaacatctccctccaagcatgccacaagtgcttacgttgtgatctttgggagatggccctcgggcctctgcttcccttgagc

SEQ ID NO: 457931 - DNA, 259 bp, Homo sapiens
ctccctaaagtcaaagacctttgcatttccctccagcagaatcagaaagtctggtaaatgggaaccacaccccacagactgcaacacggggaccctctgcctgtgccagccacagttccctggtgagctctattgagaaggacctgcaagagatcatggactcactggtgctagaggagcctggagctgctggcaagaagcctgccgcaacctctccactgtcaccgatggctaatggtgggcgctacctgctgtctcc

SEQ ID NO: 457932 - DNA, 411 bp, Homo sapiens
cgggggatctatggaacagaggaggagcgatgcagttgggagaggaagctagaagggttatggttggagttctgtacagtgttgagtttccgacagggaaagaggattcctccaatgctcctagagagaaagcctgagcaggagatgatgcagcagaggggaagggccctgtggtgccgccgcccttccttcagcctccgaagggtgatggaaatggagagtggaggaccaggcctccagctgtctggcctcgcccttcacgccttaacactaagcccacctcccctgctctccttcccagcattgagcccttggttgcctgggcccaggctgggggttttcagtatttgtaagcatttcagcagaacaataaagcctttggactacggaaaagtgagtggaaggccggtg

SEQ ID NO: 457933 - DNA, 564 bp, Homo sapiens
gctccttgatgcacttcctcttccccttctctccccagcgcgagtggtctggacatggggaagatcgaggagatggagaagatgctgaaagaggctcatgcagagaagaaccggctcatggagtcgagggtgagtctgacctggatcggggaggcagaaggtgttggggcacagagctacctactgcatgtcaagggcctgtgctccaccccaagcccttccacccacattagccttgccacattcccttggggtagaaaatgttttaaaaggttgtattctggccgggcgcggtggctcatgcccgtaatcccagcacttcaggtggccgaggcaggcggatcacgaggtcaggagatcgaaaccatcctggctaacacggtgaaaccccgtctctactgaaaatacaaaaaattagctgggcgtggtggcaggcgcctgtagtcccagctgcgcgggaggctgaggcaggagaatggcgtgaacccgggaggcggaggttgcagtaagccgagatcgcaccactgcactccagcctgggagacagagcgagactccgtctca

SEQ ID NO: 457934 - DNA, 4874 bp, Homo sapiens
ccctgtggcaatgcctgcactattgatgggctccctgtccggcagcctacccggctcactcagggctgcatgttgtgcctgggtcagtccaccttccttcgctttaaccacccggctgaagccaagtggatgaaaagcatgattccagcagggggccgagcccctgggcccccctacagccctgttcctgcagaatcagaaagtctggtaaatgggaaccacaccccacagactgcaacacggggaccctctgcctgtgccagccacagttccctggtgagctctattgagaaggacctgcaagagatcatggactcactggtgctagaggagcctggagctgctggcaagaagcctgccgcaacctctccactgtcaccgatggctaatggtgggcgctacctgctgtctcccccaaccagccccggcgccatgtctgtgggctccagctatgagaacacctctccagccttctctccactctcttcaccagccagcagtggaagctgtgccagtcactcacccagtgggcaagagccaggaccttctgtgcccccgctggtacctgcccgttcctccagctaccatctggccctacagcccccacagtcccgcccaagtggtgctcgctccgagagtcctcggctgagcaggaaagggggccatgagaggcctcccagccctggcctccggggtctgctgacagacagccctgcagctactgtcttggcggaggcccggagagccactgagagcccccggctgggtgggcagctgcctgtggtggccatcagcctgagtgaatacccagcttctggtgctctcagtcaacccaccagcattcctggcagccccaagtttcagcctccagtccctgctccccgaaacaagattggcacactccaggaccgccctcccagccctttccgtgagcctccaggcagtgagcgggtgctaacaaccagcccctcacgccaactggtgggccgaacattttcagatgggttagccacccgtaccctgcagcctcctgagagtccccgcctgggccggcggggcctggacagtatgcgagaactaccccccttaagtccatctctgtcccggcgagctctctccccgctgcccacccggaccaccccagatcccaagctaaacagggaagtggcagagagtcctcggccccggcgctgggcagcccatggggcttcaccagaggacttctccctgacgctgggggcacggggccgtaggacacggagcccctcacccacactgggtgagtctctggcaccccacaagggcagcttcagtggcaggctgagcccagcctacagtctgggctctcttactggggcttcaccctgccagagtccctgtgtccagaggaagctctccagcggggacttgcgggtgcctgtcacaagggagcggaaaaatagcatcacagagatcagtgacaatgaggacgacctcctggagtaccaccggcgacagcgccaagagcggctccgggagcaggagatggagaggctggaacgccagcgcctggagaccatcctgaacctgtgtgccgaatacagccgggctgatgggggacctgaggctggggagcttcccagcattggggaggccaccgcagcattggcactggcaggccggaggccctcacgaggccttgcaggggcctctgggcggagcagcgaggagcctggcgttgccacccaacgcctatgggagagtatggagcgctcagatgaggaaaatctcaaggaggagtgcagcagcactgagagcacccagcaggagcacgaagatgcacctagcaccaagctccagggagaggtgctagccctggaagaagagcgggctcaggtgctggggcacgtggagcagctcaaggtccgtgtgaaggagctagagcagcagctgcaggagtcagcccgagaggccgaaatggagcgggcactgctgcagggagagagggaggcagagcgggcactgctgcagaaggagcagaaggcagtggatcagctgcaggagaagctggtggccttggagacaggcatccagaaggagagggacaaggaggcagaggccctggagactgagacaaagctctttgaggacttggagttccagcagttggagcgggagagccgcgtggaggaggagcgcgagctggccggccaggggctgctccggagcaaggctgagctgctccgcagcatcgccaagaggaaggagcgcctggccatcctggacagtcaggctgggcagatccgggctcaggccgtgcaggaatcagaacgcctggcccgggacaagaatgcctccttacagctgctgcaaaaggagaaggagaagctgactgtgctggaaaggagataccactcactcacagggggcaggcctttcccgaagaccacatcgaccctcaaagaggtttaccgctccaagatggatggcgaggccaccagcccccttccccggacccgcagcggccccctcccctcctcctctggctcttcctcctcctcctcccagctcagcgtggctaccctggggcgtagcccctccccaaagagcgctctactcacccagaatggcacgggcagccttcctcgcaacctggcagccacactgcaggacatcgagaccaagcgccaactagctctgcagcagaagggacaacaagtgattgaagagcagcggcggcgactggctgagctgaagcagaaagcggcagctgaggcacagtgccagtgggatgcccttcacggggcagcacccttcccagcgggcccctcgggcttcccccctctcatgcaccactctatcctacaccacctgcctgcggggcgggagcgtggggaggagggtgagcacgcctatgatacgctgagtctggagagctctgacagcatggagaccagcatctccaccgggggcaactcggcctgctcccctgacaacatgtccagcgcgagtggtctggacatggggaagatcgaggagatggagaagatgctgaaagaggctcatgcagagaagaaccggctcatggagtcgagggagcgggagatggagctgcggcggcaggccctggaggaggagcggcggaggcgtgagcaggtagaacggaggctgcagagtgagagtgcccggaggcagcagctggtcgagaaggaggtcaagatgcgggagaaacaattttcccaggcacgacccctgacccgctacctgccaatccggaaggaggactttgacctgaagacacatattgagtcatcgggccatggtgttgatacctgcctgcacgtggtgctcagcagcaaggtctgccgtggctacttggtcaagatgggcggcaagattaaatcatggaagaagcgctggtttgtcttcgaccggctcaagcgcaccctttcctattatgtggacaagcatgagacgaagctgaagggagtcatctatttccaggccattgaggaagtgtactacgaccacctgcgcagtgcagccaagagcccgaacccagccctcaccttctgcgtaaagacccatgaccggctgtactacatggtggccccatctgcagaggccatgcgtatctggatggatgtcattgtcacaggggctgagggctacactcagttcatgaactaactgccgtgggcctcctggcagagcacaactggggcttttgtataagaagactttaatattctgtaaggagcttggtcctgtgagtttctgggctctggcctcctgaagaaccagccagaagaagaaaagtagaggtggctttgctgcctcctgggagcccagaacttgcagtaaccctttagggtcctgccccaggcccagccagggctgaggagctgtcacagagagggcctcagctctgacctgacacctgctctccccagcctgttttctcttttctaaaagacaaattatggtaccataagctgccaaagatcccctcctgcctcagacccctttgccaggggctttgggggctgagcagagccacatccagagtggggtaatagctcaggcggcccgcttcccatttctcaaaccccgctctgccccattgttctcctttcccttatactttttattaccttgctcaagggccagagatctcaagtgtcaaccttgaggtcccagctccatcccctagttgcagactcatcaccatggttaccatagtgactgcttcattgccatggttacatactaattgctgcagctctgtggcccagcccactgcttcagctgtgggccatctgagggtacgtgccatcatctctccagcccaggcccctgggcatctcatgctggggggaagggactgaatacctttttccttccccctgcctgtgtcttcagccctgatgcacaggctgccagccccccagtccagccctctcccttccactggtgccttgcttagagccagaagggatgaagccgggggatctatggaacagaggaggagcgatgcagttgggagaggaagctagaagggttatggttggagttctgtacagtgttgagtttccgacagggaaagaggattcctccaatgctcctagagagaaagcctgagcaggagatgatgcagcagaggggaagggccctgtggtgccgccgcccttccttcagcctccgaagggtgatggaaatggagagtggaggaccaggcctccagctgtctggcctcgcccttcacgccttaacactaagcccacctcccctgctctccttcccagcattgagcccttggttgcctgggcccaggctgggggttttcagtatttgtaagcatttcagcagaacaataaagcctttggactacggaa

SEQ ID NO: 457935 - DNA, 4736 bp, Homo sapiens
ccctgtggcaatgcctgcactattgatgggctccctgtccggcagcctacccggctcactcagggctgcatgttgtgcctgggtcagtccaccttccttcgctttaaccacccggctgaagccaagtggatgaaaagcatgattccagcagggggccgagcccctgggcccccctacagccctgttcctgcagaatcagaaagtctggtaaatgggaaccacaccccacagactgcaacacggggaccctctgcctgtgccagccacagttccctggtgagctctattgagaaggacctgcaagagatcatggactcactggtgctagaggagcctggagctgctggcaagaagcctgccgcaacctctccactgtcaccgatggctaatggtgggcgctacctgctgtctcccccaaccagccccggcgccatgtctgtgggctccagctatgagaacacctctccagccttctctccactctcttcaccagccagcagtggaagctgtgccagtcactcacccagtgggcaagagccaggaccttctgtgcccccgctggtacctgcccgttcctccagctaccatctggccctacagcccccacagtcccgcccaagtggtgctcgctccgagagtcctcggctgagcaggaaagggggccatgagaggcctcccagccctggcctccggggtctgctgacagacagccctgcagctactgtcttggcggaggcccggagagccactgagagcccccggctgggtgggcagctgcctgtggtggccatcagcctgagtgaatacccagcttctggtgctctcagtcaacccaccagcattcctggcagccccaagtttcagcctccagtccctgctccccgaaacaagattggcacactccaggaccgccctcccagccctttccgtgagcctccaggcagtgagcgggtgctaacaaccagcccctcacgccaactggtgggccgaacattttcagatgggttagccacccgtaccctgcagcctcctgagagtccccgcctgggccggcggggcctggacagtatgcgagaactaccccccttaagtccatctctgtcccggcgagctctctccccgctgcccacccggaccaccccagatcccaagctaaacagggaagtggcagagagtcctcggccccggcgctgggcagcccatggggcttcaccagaggacttctccctgacgctgggggcacggggccgtaggacacggagcccctcacccacactgggtgagtctctggcaccccacaagggcagcttcagtggcaggctgagcccagcctacagtctgggctctcttactggggcttcaccctgccagagtccctgtgtccagaggaagctctccagcggggacttgcgggtgcctgtcacaagggagcggaaaaatagcatcacagagatcagtgacaatgaggacgacctcctggagtaccaccggcgacagcgccaagagcggctccgggagcaggagatggagaggctggaacgccagcgcctggagaccatcctgaacctgtgtgccgaatacagccgggctgatgggggacctgaggctggggagcttcccagcattggggaggccaccgcagcattggcactggcaggccggaggccctcacgaggccttgcaggggcctctgggcggagcagcgaggagcctggcgttgccacccaacgcctatgggagagtatggagcgctcagatgaggaaaatctcaaggaggagtgcagcagcactgagagcacccagcaggagcacgaagatgcacctagcaccaagctccagggagaggtgctagccctggaagaagagcgggctcaggtgctggggcacgtggagcagctcaaggtccgtgtgaaggagctagagcagcagctgcaggagtcagcccgagaggaggcagaggccctggagactgagacaaagctctttgaggacttggagttccagcagttggagcgggagagccgcgtggaggaggagcgcgagctggccggccaggggctgctccggagcaaggctgagctgctccgcagcatcgccaagaggaaggagcgcctggccatcctggacagtcaggctgggcagatccgggctcaggccgtgcaggaatcagaacgcctggcccgggacaagaatgcctccttacagctgctgcaaaaggagaaggagaagctgactgtgctggaaaggagataccactcactcacagggggcaggcctttcccgaagaccacatcgaccctcaaagaggtttaccgctccaagatggatggcgaggccaccagcccccttccccggacccgcagcggccccctcccctcctcctctggctcttcctcctcctcctcccagctcagcgtggctaccctggggcgtagcccctccccaaagagcgctctactcacccagaatggcacgggcagccttcctcgcaacctggcagccacactgcaggacatcgagaccaagcgccaactagctctgcagcagaagggacaacaagtgattgaagagcagcggcggcgactggctgagctgaagcagaaagcggcagctgaggcacagtgccagtgggatgcccttcacggggcagcacccttcccagcgggcccctcgggcttcccccctctcatgcaccactctatcctacaccacctgcctgcggggcgggagcgtggggaggagggtgagcacgcctatgatacgctgagtctggagagctctgacagcatggagaccagcatctccaccgggggcaactcggcctgctcccctgacaacatgtccagcgcgagtggtctggacatggggaagatcgaggagatggagaagatgctgaaagaggctcatgcagagaagaaccggctcatggagtcgagggagcgggagatggagctgcggcggcaggccctggaggaggagcggcggaggcgtgagcaggtagaacggaggctgcagagtgagagtgcccggaggcagcagctggtcgagaaggaggtcaagatgcgggagaaacaattttcccaggcacgacccctgacccgctacctgccaatccggaaggaggactttgacctgaagacacatattgagtcatcgggccatggtgttgatacctgcctgcacgtggtgctcagcagcaaggtctgccgtggctacttggtcaagatgggcggcaagattaaatcatggaagaagcgctggtttgtcttcgaccggctcaagcgcaccctttcctattatgtggacaagcatgagacgaagctgaagggagtcatctatttccaggccattgaggaagtgtactacgaccacctgcgcagtgcagccaagagcccgaacccagccctcaccttctgcgtaaagacccatgaccggctgtactacatggtggccccatctgcagaggccatgcgtatctggatggatgtcattgtcacaggggctgagggctacactcagttcatgaactaactgccgtgggcctcctggcagagcacaactggggcttttgtataagaagactttaatattctgtaaggagcttggtcctgtgagtttctgggctctggcctcctgaagaaccagccagaagaagaaaagtagaggtggctttgctgcctcctgggagcccagaacttgcagtaaccctttagggtcctgccccaggcccagccagggctgaggagctgtcacagagagggcctcagctctgacctgacacctgctctccccagcctgttttctcttttctaaaagacaaattatggtaccataagctgccaaagatcccctcctgcctcagacccctttgccaggggctttgggggctgagcagagccacatccagagtggggtaatagctcaggcggcccgcttcccatttctcaaaccccgctctgccccattgttctcctttcccttatactttttattaccttgctcaagggccagagatctcaagtgtcaaccttgaggtcccagctccatcccctagttgcagactcatcaccatggttaccatagtgactgcttcattgccatggttacatactaattgctgcagctctgtggcccagcccactgcttcagctgtgggccatctgagggtacgtgccatcatctctccagcccaggcccctgggcatctcatgctggggggaagggactgaatacctttttccttccccctgcctgtgtcttcagccctgatgcacaggctgccagccccccagtccagccctctcccttccactggtgccttgcttagagccagaagggatgaagccgggggatctatggaacagaggaggagcgatgcagttgggagaggaagctagaagggttatggttggagttctgtacagtgttgagtttccgacagggaaagaggattcctccaatgctcctagagagaaagcctgagcaggagatgatgcagcagaggggaagggccctgtggtgccgccgcccttccttcagcctccgaagggtgatggaaatggagagtggaggaccaggcctccagctgtctggcctcgcccttcacgccttaacactaagcccacctcccctgctctccttcccagcattgagcccttggttgcctgggcccaggctgggggttttcagtatttgtaagcatttcagcagaacaataaagcctttggactacggaa

SEQ ID NO: 457936 - DNA, 4498 bp, Homo sapiens
ccctgtggcaatgcctgcactattgatgggctccctgtccggcagcctacccggctcactcagggctgcatgttgtgcctgggtcagtccaccttccttcgctttaaccacccggctgaagccaagtggatgaaaagcatgattccagcagggggccgagcccctgggcccccctacagccctgttcctgcagaatcagaaagtctggtaaatgggaaccacaccccacagactgcaacacggggaccctctgcctgtgccagccacagttccctggtgagctctattgagaaggacctgcaagagatcatggactcactggtgctagaggagcctggagctgctggcaagaagcctgccgcaacctctccactgtcaccgatggctaatggtgggcgctacctgctgtctcccccaaccagccccggcgccatgtctgtgggctccagctatgagaacacctctccagccttctctccactctcttcaccagccagcagtggaagctgtgccagtcactcacccagtgggcaagagccaggaccttctgtgcccccgctggtacctgcccgttcctccagctaccatctggccctacagcccccacagtcccgcccaagtggtgctcgctccgagagtcctcggctgagcaggaaagggggccatgagaggcctcccagccctggcctccggggtctgctgacagacagccctgcagctactgtcttggcggaggcccggagagccactgagagcccccggctgggtgggcagctgcctgtggtggccatcagcctgagtgaatacccagcttctggtgctctcagtcaacccaccagcattcctggcagccccaagtttcagcctccagtccctgctccccgaaacaagattggcacactccaggaccgccctcccagccctttccgtgagcctccaggcagtgagcgggtgctaacaaccagcccctcacgccaactggtgggccgaacattttcagatgggttagccacccgtaccctgcagcctcctgagagtccccgcctgggccggcggggcctggacagtatgcgagaactaccccccttaagtccatctctgtcccggcgagctctctccccgctgcccacccggaccaccccagatcccaagctaaacagggaagtggcagagagtcctcggccccggcgctgggcagcccatggggcttcaccagaggacttctccctgacgctgggggcacggggccgtaggacacggagcccctcacccacactgggtgagtctctggcaccccacaagggcagcttcagtggcaggctgagcccagcctacagtctgggctctcttactggggcttcaccctgccagagtccctgtgtccagaggaagctctccagcggggacttgcgggtgcctgtcacaagggagcggaaaaatagcatcacagagatcagtgacaatgaggacgacctcctggagtaccaccggcgacagcgccaagagcggctccgggagcaggagatggagaggctggaacgccagcgcctggagaccatcctgaacctgtgtgccgaatacagccgggctgatgggggacctgaggctggggagcttcccagcattggggaggccaccgcagcattggcactggcaggccggaggccctcacgaggccttgcaggggcctctgggcggagcagcgaggagcctggcgttgccacccaacgcctatgggagagtatggagcgctcagatgaggaaaatctcaaggaggagtgcagcagcactgagagcacccagcaggagcacgaagatgcacctagcaccaagctccagggagaggtgctagccctggaagaagagcgggctcaggtgctggggcacgtggagcagctcaaggtccgtgtgaaggagctagagcagcagctgcaggagtcagcccgagaggccgaaatggagcgggcactgctgcagggagagagggaggcagagcgggcactgctgcagaaggagcagaaggcagtggatcagctgcaggagaagctggtggccttggagacaggcatccagaaggagagggacaaggaggcagaggccctggagactgagacaaagctctttgaggacttggagttccagcagttggagcgggagagccgcgtggaggaggagcgcgagctggccggccaggggctgctccggagcaaggctgagctgctccgcagcatcgccaagaggaaggagcgcctggccatcctggacagtcaggctgggcagatccgggctcaggccgtgcaggaatcagaacgcctggcccgggacaagaatgcctccttacagctgctgcaaaaggagaaggagaagctgactgtgctggaaaggagataccactcactcacagggggcaggcctttcccgaagaccacatcgaccctcaaagagctctcatgcaccactctatcctacaccacctgcctgcggggcgggagcgtggggaggagggtgagcacgcctatgatacgctgagtctggagagctctgacagcatggagaccagcatctccaccgggggcaactcggcctgctcccctgacaacatgtccagcgcgagtggtctggacatggggaagatcgaggagatggagaagatgctgaaagaggctcatgcagagaagaaccggctcatggagtcgagggagcgggagatggagctgcggcggcaggccctggaggaggagcggcggaggcgtgagcaggtagaacggaggctgcagagtgagagtgcccggaggcagcagctggtcgagaaggaggtcaagatgcgggagaaacaattttcccaggcacgacccctgacccgctacctgccaatccggaaggaggactttgacctgaagacacatattgagtcatcgggccatggtgttgatacctgcctgcacgtggtgctcagcagcaaggtctgccgtggctacttggtcaagatgggcggcaagattaaatcatggaagaagcgctggtttgtcttcgaccggctcaagcgcaccctttcctattatgtggacaagcatgagacgaagctgaagggagtcatctatttccaggccattgaggaagtgtactacgaccacctgcgcagtgcagccaagagcccgaacccagccctcaccttctgcgtaaagacccatgaccggctgtactacatggtggccccatctgcagaggccatgcgtatctggatggatgtcattgtcacaggggctgagggctacactcagttcatgaactaactgccgtgggcctcctggcagagcacaactggggcttttgtataagaagactttaatattctgtaaggagcttggtcctgtgagtttctgggctctggcctcctgaagaaccagccagaagaagaaaagtagaggtggctttgctgcctcctgggagcccagaacttgcagtaaccctttagggtcctgccccaggcccagccagggctgaggagctgtcacagagagggcctcagctctgacctgacacctgctctccccagcctgttttctcttttctaaaagacaaattatggtaccataagctgccaaagatcccctcctgcctcagacccctttgccaggggctttgggggctgagcagagccacatccagagtggggtaatagctcaggcggcccgcttcccatttctcaaaccccgctctgccccattgttctcctttcccttatactttttattaccttgctcaagggccagagatctcaagtgtcaaccttgaggtcccagctccatcccctagttgcagactcatcaccatggttaccatagtgactgcttcattgccatggttacatactaattgctgcagctctgtggcccagcccactgcttcagctgtgggccatctgagggtacgtgccatcatctctccagcccaggcccctgggcatctcatgctggggggaagggactgaatacctttttccttccccctgcctgtgtcttcagccctgatgcacaggctgccagccccccagtccagccctctcccttccactggtgccttgcttagagccagaagggatgaagccgggggatctatggaacagaggaggagcgatgcagttgggagaggaagctagaagggttatggttggagttctgtacagtgttgagtttccgacagggaaagaggattcctccaatgctcctagagagaaagcctgagcaggagatgatgcagcagaggggaagggccctgtggtgccgccgcccttccttcagcctccgaagggtgatggaaatggagagtggaggaccaggcctccagctgtctggcctcgcccttcacgccttaacactaagcccacctcccctgctctccttcccagcattgagcccttggttgcctgggcccaggctgggggttttcagtatttgtaagcatttcagcagaacaataaagcctttggactacggaa

SEQ ID NO: 457937 - DNA, 4795 bp, Homo sapiens
ccctgtggcaatgcctgcactattgatgggctccctgtccggcagcctacccggctcactcagggctgcatgttgtgcctgggtcagtccaccttccttcgctttaaccacccggctgaagccaagtggatgaaaagcatgattccagcagggggccgagcccctgggcccccctacagccctgttcctgcagaatcagaaagtctggtaaatgggaaccacaccccacagactgcaacacggggaccctctgcctgtgccagccacagttccctggtgagctctattgagaaggacctgcaagagatcatggactcactggtgctagaggagcctggagctgctggcaagaagcctgccgcaacctctccactgtcaccgatggctaatggtgggcgctacctgctgtctcccccaaccagccccggcgccatgtctgtgggctccagctatgagaacacctctccagccttctctccactctcttcaccagccagcagtggaagctgtgccagtcactcacccagtgggcaagagccaggaccttctgtgcccccgctggtacctgcccgttcctccagctaccatctggccctacagcccccacagtcccgcccaagtggtgctcgctccgagagtcctcggctgagcaggaaagggggccatgagaggcctcccagccctggcctccggggtctgctgacagacagccctgcagctactgtcttggcggaggcccggagagccactgagagcccccggctgggtgggcagctgcctgtggtggccatcagcctgagtgaatacccagcttctggtgctctcagtcaacccaccagcattcctggcagccccaagtttcagcctccagtccctgctccccgaaacaagattggcacactccaggaccgccctcccagccctttccgtgagcctccaggcagtgagcgggtgctaacaaccagcccctcacgccaactggtgggccgaacattttcagatgggttagccacccgtaccctgcagcctcctgagagtccccgcctgggccggcggggcctggacagtatgcgagaactaccccccttaagtccatctctgtcccggcgagctctctccccgctgcccacccggaccaccccagatcccaagctaaacagggaagtggcagagagtcctcggccccggcgctgggcagcccatggggcttcaccagaggacttctccctgacgctgggggcacggggccgtaggacacggagcccctcacccacactgggtgagtctctggcaccccacaagggcagcttcagtggcaggctgagcccagcctacagtctgggctctcttactggggcttcaccctgccagagtccctgtgtccagaggaagctctccagcggggacttgcgggtgcctgtcacaagggagcggaaaaatagcatcacagagatcagtgacaatgaggacgacctcctggagtaccaccggcgacagcgccaagagcggctccgggagcaggagatggagaggctggaacgccagcgcctggagaccatcctgaacctgtgtgccgaatacagccgggctgatgggggacctgaggctggggagcttcccagcattggggaggccaccgcagcattggcactggcaggccggaggccctcacgaggccttgcaggggcctctgggcggagcagcgaggagcctggcgttgccacccaacgcctatgggagagtatggagcgctcagatgaggaaaatctcaaggaggagtgcagcagcactgagagcacccagcaggagcacgaagatgcacctagcaccaagctccagggagaggtgctagccctggaagaagagcgggctcaggtgctggggcacgtggagcagctcaaggtccgtgtgaaggagctagagcagcagctgcaggagtcagcccgagaggccgaaatggagcgggcactgctgcagggagagagggaggcagagcgggcactgctgcagaaggagcagaaggcagtggatcagctgcaggagaagctggtggccttggagacaggcatccagaaggagagggacaaggaggcagaggccctggagactgagacaaagctctttgaggacttggagttccagcagttggagcgggagagccgcgtggaggaggagcgcgagctggccggccaggggctgctccggagcaaggctgagctgctccgcagcatcgccaagaggaaggagcgcctggccatcctggacagtcaggctgggcagatccgggctcaggccgtgcaggaatcagaacgcctggcccgggacaagaatgcctccttacagctgctgcaaaaggagaaggagaagctgactgtgctggaaaggagataccactcactcacagggggcaggcctttcccgaagaccacatcgaccctcaaagaggtttaccgctccaagatggatggcgaggccaccagcccccttccccggacccgcagcggccccctcccctcctcctctggctcttcctcctcctcctcccagctcagcgtggctaccctggggcgtagcccctccccaaagagcgctctactcacccagaatggcacgggcagccttcctcgcaacctggcagccacactgcaggacatcgagaccaagcgccaactagctctgcagcagaagggacaacaagtgattgaagagcagcggcggcgactggctgagctgaagcagaaagcggcagctgaggcacagtgccagtgggatgcccttcacggggcagcacccttcccagcgggcccctcgggcttcccccctctcatgcaccactctatcctacaccacctgcctgcggggcgggagcgtggggaggagggtgagcacgcctatgatacgctgagtctggagagctctgacagcatggagaccagcatctccaccgggggcaactcggcctgctcccctgacaacatgtccagcgcgagtggtctggacatggggaagatcgaggagatggagaagatgctgaaagaggctcatgcagagaagaaccggctcatggagtcgagggagcgggagatggagctgcggcggcaggccctggaggaggagcggcggaggcgtgagcaggtagaacggaggctgcagagtgagagtgcccggaggcagcagctggtcgagaaggaggtcaagatgcgggagaaacaattttcccaggcacgacccctgacccgctacctgccaatccggaaggaggactttgacctgaagacacatattgagtcatcgggccatggtgttgatacctgcctgcacgtggtgctcagcagcaaggtctgccgtggctacttggtcaagatgggcggcaagattaaatcatggaagaagcgctggtttgtcttcgaccggctcaagcgcaccctttcctattatgtggacaagcatgagacgaagctgaagggagtcatctatttccaggccattgaggaagtgtatacatggtggccccatctgcagaggccatgcgtatctggatggatgtcattgtcacaggggctgagggctacactcagttcatgaactaactgccgtgggcctcctggcagagcacaactggggcttttgtataagaagactttaatattctgtaaggagcttggtcctgtgagtttctgggctctggcctcctgaagaaccagccagaagaagaaaagtagaggtggctttgctgcctcctgggagcccagaacttgcagtaaccctttagggtcctgccccaggcccagccagggctgaggagctgtcacagagagggcctcagctctgacctgacacctgctctccccagcctgttttctcttttctaaaagacaaattatggtaccataagctgccaaagatcccctcctgcctcagacccctttgccaggggctttgggggctgagcagagccacatccagagtggggtaatagctcaggcggcccgcttcccatttctcaaaccccgctctgccccattgttctcctttcccttatactttttattaccttgctcaagggccagagatctcaagtgtcaaccttgaggtcccagctccatcccctagttgcagactcatcaccatggttaccatagtgactgcttcattgccatggttacatactaattgctgcagctctgtggcccagcccactgcttcagctgtgggccatctgagggtacgtgccatcatctctccagcccaggcccctgggcatctcatgctggggggaagggactgaatacctttttccttccccctgcctgtgtcttcagccctgatgcacaggctgccagccccccagtccagccctctcccttccactggtgccttgcttagagccagaagggatgaagccgggggatctatggaacagaggaggagcgatgcagttgggagaggaagctagaagggttatggttggagttctgtacagtgttgagtttccgacagggaaagaggattcctccaatgctcctagagagaaagcctgagcaggagatgatgcagcagaggggaagggccctgtggtgccgccgcccttccttcagcctccgaagggtgatggaaatggagagtggaggaccaggcctccagctgtctggcctcgcccttcacgccttaacactaagcccacctcccctgctctccttcccagcattgagcccttggttgcctgggcccaggctgggggttttcagtatttgtaagcatttcagcagaacaataaagcctttggactacggaa

SEQ ID NO: 457938 - DNA, 5167 bp, Homo sapiens
ccctgtggcaatgcctgcactattgatgggctccctgtccggcagcctacccggctcactcagggctgcatgttgtgcctgggtcagtccaccttccttcgctttaaccacccggctgaagccaagtggatgaaaagcatgattccagcagggggccgagcccctgggcccccctacagccctgttcctgcagaatcagaaagtctggtaaatgggaaccacaccccacagactgcaacacggggaccctctgcctgtgccagccacagttccctggtgagctctattgagaaggacctgcaagagatcatggactcactggtgctagaggagcctggagctgctggcaagaagcctgccgcaacctctccactgtcaccgatggctaatggtgggcgctacctgctgtctcccccaaccagccccggcgccatgtctgtgggctccagctatgagaacacctctccagccttctctccactctcttcaccagccagcagtggaagctgtgccagtcactcacccagtgggcaagagccaggaccttctgtgcccccgctggtacctgcccgttcctccagctaccatctggccctacagcccccacagtcccgcccaagtggtgctcgctccgagagtcctcggctgagcaggaaagggggccatgagaggcctcccagccctggcctccggggtctgctgacagacagccctgcagctactgtcttggcggaggcccggagagccactgagagcccccggctgggtgggcagctgcctgtggtggccatcagcctgagtgaatacccagcttctggtgctctcagtcaacccaccagcattcctggcagccccaagtttcagcctccagtccctgctccccgaaacaagattggcacactccaggaccgccctcccagccctttccgtgagcctccaggcagtgagcgggtgctaacaaccagcccctcacgccaactggtgggccgaacattttcagatgggttagccacccgtaccctgcagcctcctgagagtccccgcctgggccggcggggcctggacagtatgcgagaactaccccccttaagtccatctctgtcccggcgagctctctccccgctgcccacccggaccaccccagatcccaagctaaacagggaagtggcagagagtcctcggccccggcgctgggcagcccatggggcttcaccagaggacttctccctgacgctgggggcacggggccgtaggacacggagcccctcacccacactgggtgagtctctggcaccccacaagggcagcttcagtggcaggctgagcccagcctacagtctgggctctcttactggggcttcaccctgccagagtccctgtgtccagaggaagctctccagcggggacttgcgggtgcctgtcacaagggagcggaaaaatagcatcacagagatcagtgacaatgaggacgacctcctggagtaccaccggcgacagcgccaagagcggctccgggagcaggagatggagaggctggaacgccagcgcctggagaccatcctgaacctgtgtgccgaatacagccgggctgatgggggacctgaggctggggagcttcccagcattggggaggccaccgcagcattggcactggcaggccggaggccctcacgaggccttgcaggggcctctgggcggagcagcgaggagcctggcgttgccacccaacgcctatgggagagtatggagcgctcagatgaggaaaatctcaaggaggagtgcagcagcactgagagcacccagcaggagcacgaagatgcacctagcaccaagctccagggagaggtgctagccctggaagaagagcgggctcaggtgctggggcacgtggagcagctcaaggtccgtgtgaaggagctagagcagcagctgcaggagtcagcccgagaggccgaaatggagcgggcactgctgcagggagagagggaggcagagcgggcactgctgcagaaggagcagaaggcagtggatcagctgcaggagaagctggtggccttggagacaggcatccagaaggagagggacaaggaggcagaggccctggagactgagacaaagctctttgaggacttggagttccagcagttggagcgggagagccgcgtggaggaggagcgcgagctggccggccaggggctgctccggagcaaggctgagctgctccgcagcatcgccaagaggaaggagcgcctggccatcctggacagtcaggctgggcagatccgggctcaggccgtgcaggaatcagaacgcctggcccgggacaagaatgcctccttacagctgctgcaaaaggagaaggagaagctgactgtgctggaaaggagataccactcactcacagggggcaggcctttcccgaagaccacatcgaccctcaaagaggtttaccgctccaagatggatggcgaggccaccagcccccttccccggacccgcagcggccccctcccctcctcctctggctcttcctcctcctcctcccagctcagcgtggctaccctggggcgtagcccctccccaaagagcgctctactcacccagaatggcacgggcagccttcctcgcaacctggcagccacactgcaggacatcgagaccaagcgccaactagctctgcagcagaagggacaacaagtgattgaagagcagcggcggcgactggctgagctgaagcagaaagcggcagctgaggcacagtgccagtgggatgcccttcacggggcagcacccttcccagcgggcccctcgggcttcccccctctcatgcaccactctatcctacaccacctgcctgcggggcgggagcgtggggaggagggtgagcacgcctatgatacgctgagtctggagagctctgacagcatggagaccagcatctccaccgggggcaactcggcctgctcccctgacaacatgtccagcgcgagtggtctggacatggggaagatcgaggagatggagaagatgctgaaagaggctcatgcagagaagaaccggctcatggagtcgagggagcgggagatggagctgcggcggcaggccctggaggaggagcggcggaggcgtgagcaggtagaacggaggctgcagagtgagagtgcccggaggcagcagctggtcgagaaggaggtcaagatgcgggagaaacaattttcccaggcacgacccctgacccgctacctgccaatccggaaggaggactttgacctgaagacacatattgagtcatcgggccatggtgttgatacctgcctgcacgtggtgctcagcagcaaggtctgccgtggctacttggtcaagatgggcggcaagattaaatcatggaagaagcgctggtttgtcttcgaccggctcaagcgcaccctttcctattatgtggacaagcatgagacgaagctgaagggagtcatctatttccaggccattgaggaagtgtactacgaccacctgcgcagtgcagccaagagcccgaacccagccctcaccttctgcgtaaagacccatgaccggctgtactacatggtggccccatctgcagaggccatgcgtatctggatggatgtcattgtcacaggggctgagggctacactcagttcatgaactaactgccgtgggcctcctggcagagcacaactggggcttttgtataagaagactttaatattctgtaaggagcttggtcctgtgagtttctgggctctggcctcctgaagaaccagccagaagaagaaaagtagaggtggctttgctgcctcctgggagcccagaacttgcagtaaccctttagggtcctgccccaggcccagccagggctgaggagctgtcacagagagggcctcagctctgacctgacacctgctctccccagcctgttttctcttttctaaaagacaaattatggtaccataagctgccaaagatcccctcctgcctcagacccctttgccaggggctttgggggctgagcagagccacatccagagtggggtaatagctcaggcggcccgcttcccatttctcaaaccccgctctgccccattgttctcctttcccttatactttttattaccttgctcaagggccagagatctcaagtgtcaaccttgaggtcccagctccatcccctagttgcagactcatcaccatggttaccatagtgactgcttcattgccatggttacatactaattgctgcagctctgtggcccagcccactgcttcagctgtgggccatctgagggtacgtgccatcatctctccagcccaggcccctgggcatctcatgctggggggaagggactgaatacctttttccttccccctgcctgtgtcttcagccctgatgcacaggctgccagccccccagtccagccctctcccttccactggtgccttgcttagagccagaagggatgaagccgggggatctatggaacagaggaggagcgatgcagttgggagaggaagctagaagggttatggttggagttctgtacagtgttgagtttccgacagggaaagaggattcctccaatgctcctagagagaaagcctgagcaggagatgatgcagcagaggggaagggccctgtggtgccgccgcccttccttcagcctccgaagggtgatggaaatggagagtggaggaccaggcctccagctgtctggcctcgcccttcacgccttaacactaagcccacctcccctgctctccttcccagcattgagcccttggttgcctgggcccaggctgggggttttcagtatttgtaagcatttcagcagaacaataaagcctttggactacggaaaaaaaaaaaaaaaaaacaaaaaaaaaaaaaaaaaaaaaaaaaaaaaaaaaaaaaaaaaaaaaaaaaaaaaaaaaaaaacaacatacaaaatagcgaagaacaagaacaacacagtagagatagaccaatgagcaccaggtcactcgaaagcttcttcaactgtattgagagagcgcaatttcagcacataataattatatagggcagtgggagtataccacaaatacgaatagtatggaaatctgtagctactgaactccggctactgttggggctgacatacttatgtgata

SEQ ID NO: 457939 - DNA, 5145 bp, Homo sapiens
ccctgtggcaatgcctgcactattgatgggctccctgtccggcagcctacccggctcactcagggctgcatgttgtgcctgggtcagtccaccttccttcgctttaaccacccggctgaagccaagtggatgaaaagcatgattccagcagggggccgagcccctgggcccccctacagccctgttcctgcagaatcagaaagtctggtaaatgggaaccacaccccacagactgcaacacggggaccctctgcctgtgccagccacagttccctggtgagctctattgagaaggacctgcaagagatcatggactcactggtgctagaggagcctggagctgctggcaagaagcctgccgcaacctctccactgtcaccgatggctaatggtgggcgctacctgctgtctcccccaaccagccccggcgccatgtctgtgggctccagctatgagaacacctctccagccttctctccactctcttcaccagccagcagtggaagctgtgccagtcactcacccagtgggcaagagccaggaccttctgtgcccccgctggtacctgcccgttcctccagctaccatctggccctacagcccccacagtcccgcccaagtggtgctcgctccgagagtcctcggctgagcaggaaagggggccatgagaggcctcccagccctggcctccggggtctgctgacagacagccctgcagctactgtcttggcggaggcccggagagccactgagagcccccggctgggtgggcagctgcctgtggtggccatcagcctgagtgaatacccagcttctggtgctctcagtcaacccaccagcattcctggcagccccaagtttcagcctccagtccctgctccccgaaacaagattggcacactccaggaccgccctcccagccctttccgtgagcctccaggcagtgagcgggtgctaacaaccagcccctcacgccaactggtgggccgaacattttcagatgggttagccacccgtaccctgcagcctcctgagagtccccgcctgggccggcggggcctggacagtatgcgagaactaccccccttaagtccatctctgtcccggcgagctctctccccgctgcccacccggaccaccccagatcccaagctaaacagggaagtggcagagagtcctcggccccggcgctgggcagcccatggggcttcaccagaggacttctccctgacgctgggggcacggggccgtaggacacggagcccctcacccacactgggtgagtctctggcaccccacaagggcagcttcagtggcaggctgagcccagcctacagtctgggctctcttactggggcttcaccctgccagagtccctgtgtccagaggaagctctccagcggggacttgcgggtgcctgtcacaagggagcggaaaaatagcatcacagagatcagtgacaatgaggacgacctcctggagtaccaccggcgacagcgccaagagcggctccgggagcaggagatggagaggctggaacgccagcgcctggagaccatcctgaacctgtgtgccgaatacagccgggctgatgggggacctgaggctggggagcttcccagcattggggaggccaccgcagcattggcactggcaggccggaggccctcacgaggccttgcaggggcctctgggcggagcagcgaggagcctggcgttgccacccaacgcctatgggagagtatggagcgctcagatgaggaaaatctcaaggaggagtgcagcagcactgagagcacccagcaggagcacgaagatgcacctagcaccaagctccagggagaggtgctagccctggaagaagagcgggctcaggtgctggggcacgtggagcagctcaaggtccgtgtgaaggagctagagcagcagctgcaggagtcagcccgagaggccgaaatggagcgggcactgctgcagggagagagggaggcagagcgggcactgctgcagaaggagcagaaggcagtggatcagctgcaggagaagctggtggccttggagacaggcatccagaaggagagggacaaggaggcagaggccctggagactgagacaaagctctttgaggacttggagttccagcagttggagcgggagagccgcgtggaggaggagcgcgagctggccggccaggggctgctccggagcaaggctgagctgctccgcagcatcgccaagaggaaggagcgcctggccatcctggacagtcaggctgggcagatccgggctcaggccgtgcaggaatcagaacgcctggcccgggacaagaatgcctccttacagctgctgcaaaaggagaaggagaagctgactgtgctggaaaggagataccactcactcacagggggcaggcctttcccgaagaccacatcgaccctcaaagaggtttaccgctccaagatggatggcgaggccaccagcccccttccccggacccgcagcggccccctcccctcctcctctggctcttcctcctcctcctcccagctcagcgtggctaccctggggcgtagcccctccccaaagagcgctctactcacccagaatggcacgggcagccttcctcgcaacctggcagccacactgcaggacatcgagaccaagcgccaactagctctgcagcagaagggacaacaagtgattgaagagcagcggcggcgactggctgagctgaagcagaaagcggcagctgaggcacagtgccagtgggatgcccttcacggggcagcacccttcccagcgggcccctcgggcttcccccctctcatgcaccactctatcctacaccacctgcctgcggggcgggagcgtggggaggagggtgagcacgcctatgatacgctgagtctggagagctctgacagcatggagaccagcatctccaccgggggcaactcggcctgctcccctgacaacatgtccagcgcgagtggtctggacatggggaagatcgaggagatggagaagatgctgaaagaggctcatgcagagaagaaccggctcatggagtcgagggagcgggagatggagctgcggcggcaggccctggaggaggagcggcggaggcgtgagcaggtagaacggaggctgcagagtgagagtgcccggaggcagcagctggtcgagaaggaggtcaagatgcgggagaaacaattttcccaggcacgacccctgacccgctacctgccaatccggaaggaggactttgacctgaagacacatattgagtcatcgggccatggtgttgatacctgcctgcacgtggtgctcagcagcaaggtctgccgtggctacttggtcaagatgggcggcaagattaaatcatggaagaagcgctggtttgtcttcgaccggctcaagcgcaccctttcctattatgtggacaagcatgagacgaagctgaagggagtcatctatttccaggccattgaggaagtgtactacgaccacctgcgcagtgcagccaagagcccgaacccagccctcaccttctgcgtaaagacccatgaccggctgtactacatggtggccccatctgcagaggccatgcgtatctggatggatgtcattgtcacaggggctgagggctacactcagttcatgaactaactgccgtgggcctcctggcagagcacaactggggcttttgtataagaagactttaatattctgtaaggagcttggtcctgtgagtttctgggctctggcctcctgaagaaccagccagaagaagaaaagtagaggtggctttgctgcctcctgggagcccagaacttgcagtaaccctttagggtcctgccccaggcccagccagggctgaggagctgtcacagagagggcctcagctctgacctgacacctgctctccccagcctgttttctcttttctaaaagacaaattatggtaccataagctgccaaagatcccctcctgcctcagacccctttgccaggggctttgggggctgagcagagccacatccagagtggggtaatagctcaggcggcccgcttcccatttctcaaaccccgctctgccccattgttctcctttcccttatactttttattaccttgctcaagggccagagatctcaagtgtcaaccttgaggtcccagctccatcccctagttgcagactcatcaccatggttaccatagtgactgcttcattgccatggttacatactaattgctgcagctctgtggcccagcccactgcttcagctgtgggccatctgagggtacgtgccatcatctctccagcccaggcccctgggcatctcatgctggggggaagggactgaatacctttttccttccccctgcctgtgtcttcagccctgatgcacaggctgccagccccccagtccagccctctcccttccactggtgccttgcttagagccagaagggatgaagccgggggatctatggaacagaggaggagcgatgcagttgggagaggaagctagaagggttatggttggagttctgtacagtgttgagtttccgacagggaaagaggattcctccaatgctcctagagagaaagcctgagcaggagatgatgcagcagaggggaagggccctgtggtgccgccgcccttccttcagcctccgaagggtgatggaaatggagagtggaggaccaggcctccagctgtctggcctcgcccttcacgccttaacactaagcccacctcccctgctctccttcccagcattgagcccttggttgcctgggcccaggctgggggttttcagtatttgtaagcatttcagcagaacaataaagcctttggactacggaaaaaaaaaaaaaaaaaaaaaaaaaaaaaaaaaaaaaaaaaaaaaaaaaaaaaaaaaacaacatacaaaatagcgaagaacaagaacaacacagtagagatagaccaatgagcaccaggtcactcgaaagcttcttcaactgtattgagagagcgcaatttcagcacataataattatatagggcagtgggagtataccacaaatacgaatagtatggaaatctgtagctactgaactccggctactgttggggctgacatacttatgtgata

SEQ ID NO: 457940 - DNA, 4599 bp, Homo sapiens
ccctgtggcaatgcctgcactattgatgggctccctgtccggcagcctacccggctcactcagggctgcatgttgtgcctgggtcagtccaccttccttcgctttaaccacccggctgaagccaagtggatgaaaagcatgattccagcagggggccgagcccctgggcccccctacagccctgttcctgcagaatcagaaagtctggtaaatgggaaccacaccccacagactgcaacacggggaccctctgcctgtgccagccacagttccctggtgagctctattgagaaggacctgcaagagatcatggactcactggtgctagaggagcctggagctgctggcaagaagcctgccgcaacctctccactgtcaccgatggctaatggtgggcgctacctgctgtctcccccaaccagccccggcgccatgtctgtgggctccagctatgagaacacctctccagccttctctccactctcttcaccagccagcagtggaagctgtgccagtcactcacccagtgggcaagagccaggaccttctgtgcccccgctggtacctgcccgttcctccagctaccatctggccctacagcccccacagtcccgcccaagtggtgctcgctccgagagtcctcggctgagcaggaaagggggccatgagaggcctcccagccctggcctccggggtctgctgacagacagccctgcagctactgtcttggcggaggcccggagagccactgagagcccccggctgggtgggcagctgcctgtggtggccatcagcctgagtgaatacccagcttctggtgctctcagtcaacccaccagcattcctggcagccccaagtttcagcctccagtccctgctccccgaaacaagattggcacactccaggaccgccctcccagccctttccgtgagcctccaggcagtgagcgggtgctaacaaccagcccctcacgccaactggtgggccgaacattttcagatgggttagccacccgtaccctgcagcctcctgagagtccccgcctgggccggcggggcctggacagtatgcgagaactaccccccttaagtccatctctgtcccggcgagctctctccccgctgcccacccggaccaccccagatcccaagctaaacagggaagtggcagagagtcctcggccccggcgctgggcagcccatggggcttcaccagaggacttctccctgacgctgggggcacggggccgtaggacacggagcccctcacccacactgggtgagtctctggcaccccacaagggcagcttcagtggcaggctgagcccagcctacagtctgggctctcttactggggcttcaccctgccagagtccctgtgtccagaggaagctctccagcggggacttgcgggtgcctgtcacaagggagcggaaaaatagcatcacagagatcagtgacaatgaggacgacctcctggagtaccaccggcgacagcgccaagagcggctccgggagcaggagatggagaggctggaacgccagcgcctggagaccatcctgaacctgtgtgccgaatacagccgggctgatgggggacctgaggctggggagcttcccagcattggggaggccaccgcagcattggcactggcaggccggaggccctcacgaggccttgcaggggcctctgggcggagcagcgaggagcctggcgttgccacccaacgcctatgggagagtatggagcgctcagatgaggaaaatctcaaggaggagtgcagcagcactgagagcacccagcaggagcacgaagatgcacctagcaccaagctccagggagaggtgctagccctggaagaagagcgggctcaggtgctggggcacgtggagcagctcaaggtccgtgtgaaggagctagagcagcagctgcaggagtcagcccgagaggccgaaatggagcgggcactgctgcagggagagagggaggcagagcgggcactgctgcagaaggagcagaaggcagtggatcagctgcaggagaagctggtggccttggagacaggcatccagaaggagagggacaaggaggcagaggccctggagactgagacaaagctctttgaggacttggagttccagcagttggagcgggagagccgcgtggaggaggagcgcgagctggccggccaggggctgctccggagcaaggctgagctgctccgcagcatcgccaagaggaaggagcgcctggccatcctggacagtcaggctgggcagatccgggctcaggccgtgcaggaatcagaacgcctggcccgggacaagaatgcctccttacagctgctgcaaaaggagaaggagaagctgactgtgctggaaaggagataccactcactcacagggggcaggcctttcccgaagaccacatcgaccctcaaagaggtttaccgctccaagatggatggcgaggccaccagcccccttccccggacccgcagcggccccctcccctcctcctctggctcttcctcctcctcctcccagctcagcgtggctaccctggggcgtagcccctccccaaagagcgctctactcacccagaatggcacgggcagccttcctcgcaacctggcagccacactgcaggacatcgagaccaagcgccaactagctctgcagcagaagggacaacaagtgattgaagagcagcggcggcgactggctgagctgaagcagaaagcggcagctgaggcacagtgccagtgggatgcccttcacggggcagcacccttcccagcgggcccctcgggcttcccccctctcatgcaccactctatcctacaccacctgcctgcggggcgggagcgtggggaggagggtgagcacgcctatgatacgctgagtctggagagctctgacagcatggagaccagcatctccaccgggggcaactcggcctgctcccctgacaacatgtccagcgcgagtggtctggacatggggaagatcgaggagatggagaagatgctgaaagaggctcatgcagagaagaaccggctcatggagtcgagggagcgggagatggagctgcggcggcaggccctggaggaggagcggcggaggcgtgagcaggtagaacggaggctgcagagtgagagtgcccggaggcagcagctggtcgagaaggaggtcaagatgcgggagaaacaattttcccaggcacgacccctgacccgctacctgccaatccggaaggaggactttgacctgaagacacatattgagtcatcgggccatggtgttgatacctgcctgcacgtggtgctcagcagcaaggtctgccgtggctacttggtcaagatgggcggcaagattaaatcatggaagaagcgctggtttgtcttcgaccggctcaagcgcaccctttcctattatgtggacaagcatgagacgaagctgaagggagtcatctatttccaggccattgaggaagtgtactacgaccacctgcgcagtgcagccaagagcccgaacccagccctcaccttctgcgtaaagacccatgaccggctgtactacatggtggccccatctgcagaggccatgcgtatctggatggatgtcattgtcacaggggctgagggctacactcagttcatgaactaactgccgtgggcctcctggcagagcacaactggggcttttgtataagaagactttaatattctgtaaggagcttggtcctgtgagtttctgggctctggcctcctgaagaaccagccagaagaagaaaagtagaggtggctttgctgcctcctgggagcccagaacttgcagtaaccctttagggtcctgccccaggcccagccagggctgaggagctgtcacagagagggcctcagctctgacctgacacctgctctccccagcctgttttctcttttctaaaagacaaattatggtaccataagctgccaaagatcccctcctgcctcagacccctttgccaggggctttgggggctgagcagagccacatccagagtggggtaatagctcaggcggcccgcttcccatttctcaaaccccgctctgccccattgttctcctttcccttatactttttattaccttgctcaagggccagagatctcaagtgtcaaccttgaggtcccagctccatcccctagttgcagactcatcaccatggttaccatagtgactgcttcattgccatggttacatactaattgctgcagctctgtggcccagcccactgcttcagctgtgggccatctgagggtacgtgccatcatctctccagcccaggcccctgggcatctcatgctggggggaagggactgaatacctttttccttccccctgcctgtgtcttcagccctccgaagggtgatggaaatggagagtggaggaccaggcctccagctgtctggcctcgcccttcacgccttaacactaagcccacctcccctgctctccttcccagcattgagcccttggttgcctgggcccaggctgggggttttcagtatttgtaagcatttcagcagaacaataaagcctttggactacggaa

SEQ ID NO: 457941 - DNA, 3186 bp, Homo sapiens
ccctgtggcaatgcctgcactattgatgggctccctgtccggcagcctacccggctcactcagggctgcatgttgtgcctgggtcagtccaccttccttcgctttaaccacccggctgaagccaagtggatgaaaagcatgattccagcagggggccgagcccctgggcccccctacagccctgttcctgcagaatcagaaagtctggtaaatgggaaccacaccccacagactgcaacacggggaccctctgcctgtgccagccacagttccctggtgagctctattgagaaggacctgcaagagatcatggactcactggtgctagaggagcctggagctgctggcaagaagcctgccgcaacctctccactgtcaccgatggctaatggtgggcgctacctgctgtctcccccaaccagccccggcgccatgtctgtgggctccagctatgagaacacctctccagccttctctccactctcttcaccagccagcagtggaagctgtgccagtcactcacccagtgggcaagagccaggaccttctgtgcccccgctggtacctgcccgttcctccagctaccatctggccctacagcccccacagtcccgcccaagtggtgctcgctccgagagtcctcggctgagcaggaaagggggccatgagaggcctcccagccctggcctccggggtctgctgacagacagccctgcagctactgtcttggcggaggcccggagagccactgagagcccccggctgggtgggcagctgcctgtggtggccatcagcctgagtgaatacccagcttctggtgctctcagtcaacccaccagcattcctggcagccccaagtttcagcctccagtccctgctccccgaaacaagattggcacactccaggaccgccctcccagccctttccgtgagcctccaggcagtgagcgggtgctaacaaccagcccctcacgccaactggtgggccgaacattttcagatgggttagccacccgtaccctgcagcctcctgagagtccccgcctgggccggcggggcctggacagtatgcgagaactaccccccttaagtccatctctgtcccggcgagctctctccccgctgcccacccggaccaccccagatcccaagctaaacagggaagtggcagagagtcctcggccccggcgctgggcagcccatggggcttcaccagaggacttctccctgacgctgggggcacggggccgtaggacacggagcccctcacccacactgggtgagtctctggcaccccacaagggcagcttcagtggcaggctgagcccagcctacagtctgggctctcttactggggcttcaccctgccagagtccctgtgtccagaggaagctctccagcggggacttgcgggtgcctgtcacaagggagcggaaaaatagcatcacagagatcagtgacaatgaggacgacctcctggagtaccaccggcgacagcgccaagagcggctccgggagcaggagatggagaggctggaacgccagcgcctggagaccatcctgaacctgtgtgccgaatacagccgggctgatgggggacctgaggctggggagcttcccagcattggggaggccaccgcagcattggcactggcaggccggaggccctcacgaggccttgcaggggcctctgggcggagcagcgaggagcctggcgttgccacccaacgcctatgggagagtatggagcgctcagatgaggaaaatctcaaggaggagtgcagcagcactgagagcacccagcaggagcacgaagatgcacctagcaccaagctccagggagaggtgctagccctggaagaagagcgggctcaggtgctggggcacgtggagcagctcaaggtccgtgtgaaggagctagagcagcagctgcaggagtcagcccgagaggccgaaatggagcgggcactgctgcagggagagagggaggcagagcgggcactgctgcagaaggagcagaaggcagtggatcagctgcaggagaagctggtggccttggagacaggcatccagaaggagagggacaaggaggcagaggccctggagactgagacaaagctctttgaggacttggagttccagcagttggagcgggagagccgcgtggaggaggagcgcgagctggccggccaggggctgctccggagcaaggctgagctgctccgcagcatcgccaagaggaaggagcgcctggccatcctggacagtcaggctgggcagatccgggctcaggccgtgcaggaatcagaacgcctggcccgggacaagaatgcctccttacagctgctgcaaaaggagaaggagaagctgactgtgctggaaaggagataccactcactcacagggggcaggcctttcccgaagaccacatcgaccctcaaagaggtttaccgctccaagatggatggcgaggccaccagcccccttccccggacccgcagcggccccctcccctcctcctctggctcttcctcctcctcctcccagctcagcgtggctaccctggggcgtagcccctccccaaagagcgctctactcacccagaatggcacgggcagccttcctcgcaacctggcagccacactgcaggacatcgagaccaagcgccaactagctctgcagcagaagggacaacaagtgattgaagagcagcggcggcgactggctgagctgaagcagaaagcggcagctgaggcacagtgccagtgggatgcccttcacggggcagcacccttcccagcgggcccctcgggcttcccccctctcatgcaccactctatcctacaccacctgcctgcggggcgggagcgtggggaggagggtgagcacgcctatgatacgctgagtctggagagctctgacagcatggagaccagcatctccaccgggggcaactcggcctgctcccctgacaacatgtccagcgcgagtggtctggacatggggaagatcgaggagatggagaagatgctgaaagaggctcatgcagagaagaaccggctcatggagtcgagggagcgggagatggagctgcggcggcaggctgaagctttgagatggaagagcgagaatgagcaggggactccctaattcttcagcagatggatggaattcaggtaggcatca

SEQ ID NO: 457942 - DNA, 2964 bp, Homo sapiens
ccctgtggcaatgcctgcactattgatgggctccctgtccggcagcctacccggctcactcagggctgcatgttgtgcctgggtcagtccaccttccttcgctttaaccacccggctgaagccaagtggatgaaaagcatgattccagcagggggccgagcccctgggcccccctacagccctgttcctgcagaatcagaaagtctggtaaatgggaaccacaccccacagactgcaacacggggaccctctgcctgtgccagccacagttccctggtgagctctattgagaaggacctgcaagagatcatggactcactggtgctagaggagcctggagctgctggcaagaagcctgccgcaacctctccactgtcaccgatggctaatggtgggcgctacctgctgtctcccccaaccagccccggcgccatgtctgtgggctccagctatgagaacacctctccagccttctctccactctcttcaccagccagcagtggaagctgtgccagtcactcacccagtgggcaagagccaggaccttctgtgcccccgctggtacctgcccgttcctccagctaccatctggccctacagcccccacagtcccgcccaagtggtgctcgctccgagagtcctcggctgagcaggaaagggggccatgagaggcctcccagccctggcctccggggtctgctgacagacagccctgcagctactgtcttggcggaggcccggagagccactgagagcccccggctgggtgggcagctgcctgtggtggccatcagcctgagtgaatacccagcttctggtgctctcagtcaacccaccagcattcctggcagccccaagtttcagcctccagtccctgctccccgaaacaagattggcacactccaggaccgccctcccagccctttccgtgagcctccaggcagtgagcgggtgctaacaaccagcccctcacgccaactggtgggccgaacattttcagatgggttagccacccgtaccctgcagcctcctgagagtccccgcctgggccggcggggcctggacagtatgcgagaactaccccccttaagtccatctctgtcccggcgagctctctccccgctgcccacccggaccaccccagatcccaagctaaacagggaagtggcagagagtcctcggccccggcgctgggcagcccatggggcttcaccagaggacttctccctgacgctgggggcacggggccgtaggacacggagcccctcacccacactgggtgagtctctggcaccccacaagggcagcttcagtggcaggctgagcccagcctacagtctgggctctcttactggggcttcaccctgccagagtccctgtgtccagaggaagctctccagcggggacttgcgggtgcctgtcacaagggagcggaaaaatagcatcacagagatcagtgacaatgaggacgacctcctggagtaccaccggcgacagcgccaagagcggctccgggagcaggagatggagaggctggaacgccagcgcctggagaccatcctgaacctgtgtgccgaatacagccgggctgatgggggacctgaggctggggagcttcccagcattggggaggccaccgcagcattggcactggcaggccggaggccctcacgaggccttgcaggggcctctgggcggagcagcgaggagcctggcgttgccacccaacgcctatgggagagtatggagcgctcagatgaggaaaatctcaaggaggagtgcagcagcactgagagcacccagcaggagcacgaagatgcacctagcaccaagctccagggagaggtgctagccctggaagaagagcgggctcaggtgctggggcacgtggagcagctcaaggtccgtgtgaaggagctagagcagcagctgcaggagtcagcccgagaggccgaaatggagcgggcactgctgcagggagagagggaggcagagcgggcactgctgcagaaggagcagaaggcagtggatcagctgcaggagaagctggtggccttggagacaggcatccagaaggagagggacaaggaggcagaggccctggagactgagacaaagctctttgaggacttggagttccagcagttggagcgggagagccgcgtggaggaggagcgcgagctggccggccaggggctgctccggagcaaggctgagctgctccgcagcatcgccaagaggaaggagcgcctggccatcctggacagtcaggctgggcagatccgggctcaggccgtgcaggaatcagaacgcctggcccgggacaagaatgcctccttacagctgctgcaaaaggagaaggagaagctgactgtgctggaaaggagataccactcactcacagggggcaggcctttcccgaagaccacatcgaccctcaaagaggtttaccgctccaagatggatggcgaggccaccagcccccttccccggacccgcagcggccccctcccctcctcctctggctcttcctcctcctcctcccagctcagcgtggctaccctggggcgtagcccctccccaaagagcgctctactcacccagaatggcacgggcagccttcctcgcaacctggcagccacactgcaggacatcgagaccaagcgccaactagctctgcagcagaagggacaacaagtgattgaagagcagcggcggcgactggctgagctgaagcagaaagcggcagctgaggcacagtgccagtgggatgcccttcacggggcagcacccttcccagcgggcccctcgggcttcccccctctcatgcaccactctatcctacaccacctgctcccctgctctccttcccagcattgagcccttggttgcctgggcccaggctgggggttttcagtatttgtaagcatttcagcagaacaataaagcctttggactacggaa

SEQ ID NO: 457943 - DNA, 1815 bp, Homo sapiens
ccctgtggcaatgcctgcactattgatgggctccctgtccggcagcctacccggctcactcagggctgcatgttgtgcctgggtcagtccaccttccttcgctttaaccacccggctgaagccaagtggatgaaaagcatgattccagcagggggccgagcccctgggcccccctacagccctgttcctgcagaatcagaaagtctggtaaatgggaaccacaccccacagactgcaacacggggaccctctgcctgtgccagccacagttccctggtgagctctattgagaaggacctgcaagagatcatggactcactggtgctagaggagcctggagctgctggcaagaagcctgccgcaacctctccactgtcaccgatggctaatggtgggcgctacctgctgtctcccccaaccagccccggcgccatgtctgtgggctccagctatgagaacacctctccagccttctctccactctcttcaccagccagcagtggaagctgtgccagtcactcacccagtgggcaagagccaggaccttctgtgcccccgctggtacctgcccgttcctccagctaccatctggccctacagcccccacagtcccgcccaagtggtgctcgctccgagagtcctcggctgagcaggaaagggggccatgagaggcctcccagccctggcctccggggtctgctgacagacagccctgcagctactgtcttggcggaggcccggagagccactgagagcccccggctgggtgggcagctgcctgtggtggccatcagcctgagtgaatacccagcttctggtgctctcagtcaacccaccagcattcctggcagccccaagtttcagcctccagtccctgctccccgaaacaagattggcacactccaggaccgccctcccagccctttccgtgagcctccaggcagtgagcgggtgctaacaaccagcccctcacgccaactggtgggccgaacattttcagatgggttagccacccgtaccctgcagcctcctgagagtccccgcctgggccggcggggcctggacagtatgcgagaactaccccccttaagtccatctctgtcccggcgagctctctccccgctgcccacccggaccaccccagatcccaagctaaacagggaagtggcagagagtcctcggccccggcgctgggcagcccatggggcttcaccagaggacttctccctgacgctgggggcacggggccgtaggacacggagcccctcacccacactgggtgagtctctggcaccccacaagggcagcttcagtggcaggctgagcccagcctacagtctgggctctcttactggggcttcaccctgccagagtccctgtgtccagaggaagctctccagcggggacttgcgggtgcctgtcacaagggagcggaaaaatagcatcacagagatcagtgacaatgaggacgacctcctggagtaccaccggcgacagcgccaagagcggctccgggagcaggagatggagaggctggtgagcgggtgccagggaggcttgccactgtccatggcagagtctctgccagggctcgagcaggccagctggcagagcaggagaggccctcaaacagggcttcggcttctcaaggttccccacctccaggatacactttagtgatcaatatcttatggttctggtgccgtgaagaagaaattcctttgaaatctctaagactttattttaaattcttgctaattttgcatttattcaacatagcatttgttttaatgttaaattaaatttcacattgtt

SEQ ID NO: 457944 - DNA, 392 bp, Homo sapiens
ctccagatggagaagctgctgctccctgctgtagacttagagcagtggtaccaggagctgatggccgggctggggactggccccgctgcagcctcccctcactcttctcccccgcctctgcccgccaaagcttcccgtcagctgcaggtaacccctccttcactgcccgtcctccccagcctttgcacctgtccactctgatacctcctgccaatccatcagccacacagtaccaccttgagtggaggcgtcagcccagtcagggcaatgagggcacctctgggccctgagagggtcactccttgggcagccatcctggcatgtgggcaaccggggggccagcctccatagtctaaaactatctgattgagtgtctggtggaagaggattct

SEQ ID NO: 457945 - DNA, 400 bp, Homo sapiens
ctgtggcctggtcttccaggcccagagtggcattgcaagcaccacccaaccccctttgtcactgtcgttgaaggaggcagaggccctggagactgagacaaagctctttgaggacttggagttccagcagttggagcgggagagccgcgtggaggaggagcgcgagctggccggccaggggctgctccggagcaaggctgagctgctccgcagcatcgccaagaggaaggtgtgccccacctcgttccctgctgcgtgctgttggaggccagtgacctgggtttgaatcccaatgacctcacaaaagttaacttcgtcttttgtgcctggatttccttgtctgtaaaatgagaattacaacaggttgttgtgagaattaaacaagatgtaaagacaaaaa

SEQ ID NO: 457946 - DNA, 1388 bp, Homo sapiens
aagctgcactcctcaggcttccggtcttgtggaccgaggctcctctccaatcgtcctaaagcaactgaaggaacaattgataacaatttaaacatgttaatttatttaatctgatttggttgttaaaacagccttaaaactctcattcctatttcccagcaattgcaagagacgcctccgcggagccggcgctcagatgccaaaggctggagtcgttggtgacgtcatccagggctgggctatgcggggtggggccaagaagcaggaccaaagttccggtatgcgcgctttcagtcttcaattaggtccgaattcccggcatataagggcgttgctttgccttagcgtgaggtttcttaagttggttttagaagttgcttagtcatgtctggccgtggtaaaggtggaaaaggtttgggtaagggaggggctaagcgtcatcgcaaggttttgcgcgataacatccagggcatcactaagccagctatccggcgccttgctcgtcgcggcggtgtcaagcgaatttctggccttatctatgaggagactcgtggtgttctgaaggtgttcctggagaacgtgattcgtgacgctgtcacttacacagagcacgccaaacgcaagaccgtgacagcaatggatgtggtctacgcgctgaagcgacagggacgcactctttacggcttcggtggctaaggctcctgcttgctgcactcttattttcattttcaaccaaaggcccttttcagggccgcccacttttttcataaaagagcagacatcttgttatcctgctttgttccagatttttgctgagaagtagttactgtgcacatgtgtagatttgcagttctgtggctcctgatggatctgagaagatggacgtggaggatgaaaatctgtctgattattttgaactgatgtttgttgctatggagatgctgcctatatgttgatgttgcagacgttaagtcactagcccacagccttgtattccatactcagagaccctgctacttacttgacatctcaacttgaaagtccaattaatatgcacttcaaactttaataggcttcaaacagaatttctttcattatctctgcaaaacagcttctctcatcatcttgaaattagtgaatggcattttactgttttagttggagtcatttctgtggttttctttcacatcctacataacaatccatcagtaagttctatgagctcttctttgaaaacaaacagaatccaactgtttcattcccacttctgctctggtcaagccactgccaacactcacctttattattgtagcaccctcattgcctagttctgtcccacagatttccaataaaaggtgaataaaatcaggtcactcttctgctgaaaa

SEQ ID NO: 457947 - DNA, 665 bp, Homo sapiens
tggaaacttcgcggagagactgcaagttaccctttccaaaatggcgggaagggctaaaaacaaagaaagctcgcacccagacggcgggccttaaaccaaggcgaatccgtgagcgcaacacatctgcttctgtggctcctgatggatctgagaagatggacgtggaggatgaaaatctgtctgattattttgaactgatgtttgttgctatggagatgctgcctatatgttgatgttgcagacgttaagtcactagcccacagccttgtattccatactcagagaccctgctacttacttgacatctcaacttgaaagtccaattaatatgcacttcaaactttaataggcttcaaacagaatttctttcattatctctgcaaaacagcttctctcatcatcttgaaattagtgaatggcattttactgttttagttggagtcatttctgtggttttctttcacatcctacataacaatccatcagtaagttctatgagctcttctttgaaaacaaacagaatccaactgtttcattcccacttctgctctggtcaagccactgccaacactcacctttattattgtagcaccctcattgcctagttctgtcccacagatttccaataaaaggtgaataaaatcaggtcactcttctgctgaaaa

SEQ ID NO: 457948 - DNA, 1055 bp, Homo sapiens
  misc_feature (907)..(907): n is a, c, g, or t
  misc_feature (1055)..(1055): n is a, c, g, or t
aagctgcactcctcaggcttccggtcttgtggaccgaggctcctctccaatcgtcctaaagcaactgaaggaacaattgataacaatttaaacatgttaatttatttaatctgatttggttgttaaaacagccttaaaactctcattcctatttcccagcaattgcaagagacgcctccgcggagccggcgctcagatgccaaaggctggagtcgttggtgacgtcatccagggctgggctatgcggggtggggccaagaagcaggaccaaagttccggtatgcgcgctttcagtcttcaattaggtccgaattcccggcatataagggcgttgctttgccttagcgtgaggtttcttaagttggttttagaagttgcttagtcatgtctggccgtggtaaaggtggaaaaggtttgggtaagggaggggctaagcgtcatcgcaaggttttgcgcgataacatccagggcatcactaagccagctatccggcgccttgctcgtcgcggcggtgtcaagcgaatttctggccttatctatgaggagactcgtggtgttctgaaggtgttcctggagaacgtgattcgtgacgctgtcacttacacagagcacgccaaacgcaagaccgtgacagcaatggatgtggtctacgcgctgaagcgacagggacgcactctttacggcttcggtggctaaggctcctgcttgctgcactcttattttcattttcaaccaaaggcccttttcagggccgcccacttttttcataaaagagcagacatcttgttatcctgctttgttccagatttttgctgagaagtagttactgtgcacatgtgtagatttgcaggtaacgtttaattactcgtgcttaatctcgcatgtttaggatttgggcataaagtanttaaagccactgttttctgcttgagggaagttggtatgttgaatatgtttagctttcttgtggcattttaacactagatatcagtgagtaagctggattgtgacagtttataattcccgtgggccttcctccttcagtttaagctgan

SEQ ID NO: 457949 - DNA, 6764 bp, Homo sapiens
aattcggcactagggcttgatgactataatgggcccagttgtctgcgggctgcggggagctaagtccccagattggaggaggctggctctggtcttcgatgcacaggagtggccgttatggaacgccagcagcgtgcagggtcaaagacagccggccccccatgtcagtggtctaggatggccagtgaaggcaccaacatcccaagtcctgtggtgcgccagattgacaagcagtttctgatttgcagtatatgcctggaacggtacaagaatcccaaggttctcccctgtctgcacactttctgcgagaggtgcctgcagaactacattcctgcccacagtttaaccctctcctgcccagtgtgccgccagacctccatcctgcccgagaaaggggtggccgcgctccagaacaatttcttcatcacaaacctgatggacgtgctgcagcgaactccaggcagcaacgctgaggagtcttccatcctggagacagtcactgctgtggctgcgggaaagcctctctcttgcccaaaccacgatgggaatgtgatggaattttactgccagtcctgtgagactgccatgtgtcgggagtgcacggagggggagcacgcagagcaccccacagttccactcaaggatgtggtggaacagcacaaggcctcgctccaggtccagctggatgctgtcaacaaaaggctcccagaaatagattctgctcttcagttcatctctgaaatcattcatcagttaaccaaccaaaaggccagcatcgtggatgacattcattccacctttgatgagctccagaagactttaaatgtgcgcaagagtgtgctgcttatggaattggaggtcaactatggcctcaaacacaaagtcctccagtcgcagctggatactctgctccaggggcaggagagcattaagagctgcagcaacttcacagcgcaggccctcaaccatggcacggagaccgaggtcctactggtgaagaagcagatgagcgagaagctgaacgagctggccgaccaggacttccccttgcacccgcgggagaacgaccagctggatttcatcgtggaaaccgaggggctgaagaagtccatccacaacctcgggacgatcttaaccaccaacgccgttgcctcagagacagtggccacgggcgaggggctgcggcagaccatcatcgggcagcccatgtccgtcaccatcaccaccaaggacaaagacggtgagctgtgcaaaaccggcaacgcctacctcaccgccgaactgagcacccccgacgggagcgtggcagacggggagatcctggacaacaagaacggcacctatgagtttttgtacactgtccagaaggaaggggactttaccctgtctctgagactctatgaccagcacatccgaggcagcccgtttaagctgaaagtgatccgatccgctgatgtgtctcccaccacagaaggcgtgaagaggcgcgttaagtccccggggagcggccacgtcaagcagaaagctgtgaaaagacccgcaagcatgtacagcactggaaaacgaaaagagaatcccatcgaagacgatttgatctttcgagtgggtaccaaaggaagaaataaaggagagtttacaaatcttcagggggtagctgcatctacaaatggaaagatattaattgcagacagtaacaaccaatgtgtgcagatattttccaatgatggccagttcaaaagtcgttttggcatacggggacgctctccggggcagctgcagcggcccacaggagtggctgtacatcccagtggggacataatcattgccgattatgataataaatgggtcagcattttctcctccgatgggaaatttaagacaaaaattggatcaggaaagctgatgggacccaaaggagtttctgtggaccgcaatgggcacattattgttgtggacaacaaggcgtgctgcgtgtttatcttccagccaaacgggaaaatagtcaccaggtttggtagccgaggaaatggggacaggcagtttgcaggtccccattttgcagctgtaaatagcaataatgagattattattacagatttccataatcattctgtcaaggtgtttaatcaggaaggagaattcatgttgaagtttggctcaaatggagaaggaaatgggcagtttaatgctccaacaggtgtagcagtggattcaaatggaaacatcattgtggccgactggggaaacagcaggatccaggtttttgatgggagtggatcatttttgtcctacattaacacatctgctgacccactctatggcccccaaggcctggccctaacttcagatggtcatgttgtggttgcagactctggaaatcactgtttcaaagtctatcgatacttacagtaatggtgggcaggtggatacccgcttccatggtcttgcactataaactggaatggatttctcaatgcgggaccagattatgactagagtttttatgccagaaggaatcattggtgaactttccaaggttatttctgaatgtaacaatttccttaaaaatgacttatccaatttctgtatttcacctttagggttaaaaaaaactcttctactgaatctataaaaactgcagttttacatctgtgaactatggcttaagggacaggatttatgtagctaaactaattttgcaaatcaaacagacacttaaaaaaactagcatatgtaaaggtattcgttaatcctgtgaatggtagcttttgcacagaacttccaaaagcaaaacaaaaacaaaatctattgtagttatatacttcatttaacctaggtcacaagacccagggaatcttctaacctcacttttacagtaggtattactcttgtgacatttttttggttatcaacaactaaatataaattactttggaaaaagtaaggctgtcttgcaaaatgatcccagctctgattagcagccctctggagttcagaacttaagtatcagtgcaaatttctcaacctttctgggttagacaaagatccttttttgtgtgttcttttcaccacccctttggctcaccttgtatcagcaaacaaagtacttcttcagggaaacctgaaatttctaatgccttgaaaagcatattacaaaagtaatgctaccttttgggaaacaaactgccccgttaactccagatcattgcactggaatgtaatcaagaaagttagtcatgttttatgtaccatgttttcacacgtgtctcttctcttcgacttcctgaaagcgaaagctttacctcctgcaaatgtcagcacatgtagtaggacaccagtatcctaggacagagagccataagtagccctttggaggactgatggtgtcaaccaaaggcatgtgattgattaatgattcccccttagaaagcaagtgttaccaaagttgtgttatcttgaaagcattacaggtaagggcatgttatggttatttatcattgtttaatgaatagtagaggtgtcaagggactatgtatacatgattagggtaagatagaatgtattatatatatatatatatacacacacacatatatatagctgaatctttggtgtattgaaataggcagcactctgaaagacagaagcttcgtccagccactcttcagcacattcctttactaagcagtttaaagccgtcctagtggagcaagccctaaagcagatttaatttttgccattttccaagaatgacggtggtggcttttagtcagaaaatggccttctgtgctttcaaaaaaaaaacaaaaaaaaaaccacacacacacataaaaaacccaacaggtcaaaataaaagttgaacttgagttacatttaatttaaatataaatgcattttgagaaatgttaagaacaatttagtcaatcgttcatctgtcattggtactgtaaaataagctgtggtctatttccactgtttaattttctactcagttctaccaaataggatgtcatgtttgacatttttgatagtgactttggggtcttcttcactgaaagcaccttagaactgtactataagaaaacatttcccctatgtataattatatgaatgtgatgtttattgcttattaatttataattcagtcattctctatataggacttcttaaaatttagaagggaaatctagctacttcaaattgtctgttaaatttattatgcccaaatcaacctctgaaaaaaggtttttccaggaagatttacatttaggtttaatatttttttagttaggtagagttttaaaaaatacttgagcctgtccgtgataaagctataaaattcaataactttttagaatgttaaatgaagacactgtttcctaacatcagtgagatacatctttgaatttaaacattcatatttactgagtacctactaggtaccaagtactcttttaggcactggaaatacagtgatggacaaaacaggtaaaaaatcgctgccccctcagagctgacattctggggtgggaatttcattttgccacgtactaacgttctgcacaaaagacaggctagactcttgtctagattgtttaaaagaaacttttcaaattggttacattaattttagtttattttcacaagtaaaaatggctttttatttagattctttctgtcccaggctgttgatcttaaaactagttgatttaaagagtttttttgcacaacatttcaattatatttgtgaacttagaaattaacttacaatctaaccagccatcatatcatatcctatcaggctagatatctcaatagtagactgaatacaaagctaattttttttacatgtcaatattggcacaaactggaatgaaagaatagtttgattcagacctgctccactatgtgttgctaaaacacatgctatgagcactccaggaaacactatattttttccaaaaaatatgtgattatatatgttaaagtatagataacatttcacacttggatacatatgtgcatttactgtatttcttggtaagcatatttttgggggaaagtgctgctgatatgatacaagtagacaaaatttaaatgaaattttgtcacattctatggaaaatggtttctggtaaactgagaaggatattaaaataagtggcttttttctgggctaccattattgtttgatttctctttgtcaagtgtatagaacctgtcatacattcatgataagtagcactgaaaaattactcattcaaatttcccctgggcacgtaaggcaaaatattgccggttgggatttcaaggtcagtgacgacgcatttcctcccagtacagaccccccagccccccttgctggacatggggaggcagagagtcacttgaccatccagaaatacatgactacaagtcctttatgactgtttgccattttttttaatggtacttagtattttgatcaaactttagtctccagaactaaacaagtccctaagtttccttattttaatttactgtgactagatttgaagcaaataaatactccagatccatgcagctagaacacacttgcttccactactaaatatacagggtatgtcctaacatggagttaactggaatagcagtacactagcaagtatctgtgaatccttagcactgacgggttaacagaaatgctttggtaatacctacttagttaattggaggaagtagtaaataaacattaggtaatctgcagattacttcaaatgggaaaaatctttttgtagactctatagtaccctctctattcactagcttctgaaaagggaggagtatttttagtttgacaatttaataatttaaaaacaagacatctccaggtaggaaaaaatgaaagctatttcatgcaaacattatctaatttagcttaaaagtgaaagtggtaatactgttggtttctgtaaatgttgcagggttttaaactttataattactttaatatttttgataactagaaatctagtattgccataaaggaaactaagtgcccatcaaagatttgtttggtataaataaagaattatttgttttgttttcaatgacagtaagctacaaatcatgatgcttaaaaactttctaaagatgaattgtgtggcagtgattggtctgtttgtggagaatgtatgaaagctattaatattctagaatagattaataaattggctatgttgttccaatgaatgtacagcacttccattaacttttgaaagcaacacagccttaaactcaatgcttttgctttatgacatgggaatgttctgtcatcaatggagtgtattcttgtaatagaattctttatatcgttctcaattctatagactttcaagcctatgtatgaatatgaaggggtttttttttttttgctttgttttctttttagattttgtacattccatctttataggtctgtttcatatgttttatgtatagaacactaagtcttgcactctctgacattgatactgatatattctcgtcatttgttcttttatgaatcaaaatgttgactgcctatttaaagaaaagaatgaacgctgtgcatcaaagtgtttgtatgttcgtagctacatacgtaccacagtattttggatgctttagtctacaatgaaactttcaattaattctgtcttgaaacataggagaaacaggattcatgtgtatctctttaccatgcacaaaatctcaaatcattataataaagcttgttttctcca

SEQ ID NO: 457950 - DNA, 767 bp, Homo sapiens
gaaaagatgtcctgtaagatcaagaccgattggtgtgaatactgaagggggtcttccacttgttaatgacccagaaacattcctgccgacttccagccttctctcatttcctccatttttctcttcctctgttctgtgcatgaactggcacatcactacttagagcagaagatatgctgggcttctgatgatggctgcactgcatgcagcagcgtgcagggtcaaagacagccggccccccatgtcagtggtctaggatggccagtgaaggcaccaacatcccaagtcctgtggtgcgccagattgacaagcagtttctgatttgcagtatatgcctggaacggtacaagaatcccaaggttctcccctgtctgcacactttctgcgagaggtgcctgcagaactacattcctgcccacagtttaaccctctcctgcccagtgtgccgccagacctccatcctgcccgagaaaggggtggccgcgctccagaacaatttcttcatcacaaacctgatggacgtgctgcagcgaactccaggcagcaacgctgaggagtcttccatcctggagacagtcactgctgtggctgcgggaaagcctctctcttgcccaaaccacgatgggaatgtaagtggctgggatggcagatactgcccgggagcatgactactgtggccttggggaggctttgggtacatcagagattacagattgaaacagaactccatgtggaaaaatcagtaattaaaaaagatttttaccagc

SEQ ID NO: 457951 - DNA, 438 bp, Homo sapiens
cctcccaaagtgctgaaattacaggtatgcgccactgtgcccagccaagctaatatttctaactgtcattatttctcattctacatgacagccccttcatatcccaaatttacaccagtgtctatagtaggtctcctaatgtttctaagggccagacatggtggctcatgcctgtaatcccagcactttgggaggctgaggcaggccaatcgcttgagcccaggagtttgagacctgactgggcaacatggcgaaatcccacctctgccaaaaatacaaaaatcagctgggcatgatggggctgcacctgtagtcccagctgttcggaggctgaggtgggaggatcctgtgggtccagacattgaggcttcagtgagccatgattgcgcctctgcgctccaacccaggtgacagagcaagactctatctcaaaaaaaa

SEQ ID NO: 457952 - DNA, 6791 bp, Homo sapiens
agcattttgagtgagcttgcagaaaatgaggggctttcagctggtcgcctgcttgtcacctctcgctgcctgaaaggcagctctcagagccctttcctgtccttctaattacagcggcgggggcagtgcgcgcttcgggacgcaattggaaaccagcagcgtgcagggtcaaagacagccggccccccatgtcagtggtctaggatggccagtgaaggcaccaacatcccaagtcctgtggtgcgccagattgacaagcagtttctgatttgcagtatatgcctggaacggtacaagaatcccaaggttctcccctgtctgcacactttctgcgagaggtgcctgcagaactacattcctgcccacagtttaaccctctcctgcccagtgtgccgccagacctccatcctgcccgagaaaggggtggccgcgctccagaacaatttcttcatcacaaacctgatggacgtgctgcagcgaactccaggcagcaacgctgaggagtcttccatcctggagacagtcactgctgtggctgcgggaaagcctctctcttgcccaaaccacgatgggaatgtgatggaattttactgccagtcctgtgagactgccatgtgtcgggagtgcacggagggggagcacgcagagcaccccacagttccactcaaggatgtggtggaacagcacaaggcctcgctccaggtccagctggatgctgtcaacaaaaggctcccagaaatagattctgctcttcagttcatctctgaaatcattcatcagttaaccaaccaaaaggccagcatcgtggatgacattcattccacctttgatgagctccagaagactttaaatgtgcgcaagagtgtgctgcttatggaattggaggtcaactatggcctcaaacacaaagtcctccagtcgcagctggatactctgctccaggggcaggagagcattaagagctgcagcaacttcacagcgcaggccctcaaccatggcacggagaccgaggtcctactggtgaagaagcagatgagcgagaagctgaacgagctggccgaccaggacttccccttgcacccgcgggagaacgaccagctggatttcatcgtggaaaccgaggggctgaagaagtccatccacaacctcgggacgatcttaaccaccaacgccgttgcctcagagacagtggccacgggcgaggggctgcggcagaccatcatcgggcagcccatgtccgtcaccatcaccaccaaggacaaagacggtgagctgtgcaaaaccggcaacgcctacctcaccgccgaactgagcacccccgacgggagcgtggcagacggggagatcctggacaacaagaacggcacctatgagtttttgtacactgtccagaaggaaggggactttaccctgtctctgagactctatgaccagcacatccgaggcagcccgtttaagctgaaagtgatccgatccgctgatgtgtctcccaccacagaaggcgtgaagaggcgcgttaagtccccggggagcggccacgtcaagcagaaagctgtgaaaagacccgcaagcatgtacagcactggaaaacgaaaagagaatcccatcgaagacgatttgatctttcgagtgggtaccaaaggaagaaataaaggagagtttacaaatcttcagggggtagctgcatctacaaatggaaagatattaattgcagacagtaacaaccaatgtgtgcagatattttccaatgatggccagttcaaaagtcgttttggcatacggggacgctctccggggcagctgcagcggcccacaggagtggctgtacatcccagtggggacataatcattgccgattatgataataaatgggtcagcattttctcctccgatgggaaatttaagacaaaaattggatcaggaaagctgatgggacccaaaggagtttctgtggaccgcaatgggcacattattgttgtggacaacaaggcgtgctgcgtgtttatcttccagccaaacgggaaaatagtcaccaggtttggtagccgaggaaatggggacaggcagtttgcaggtccccattttgcagctgtaaatagcaataatgagattattattacagatttccataatcattctgtcaaggtgtttaatcaggaaggagaattcatgttgaagtttggctcaaatggagaaggaaatgggcagtttaatgctccaacaggtgtagcagtggattcaaatggaaacatcattgtggccgactggggaaacagcaggatccaggtttttgatgggagtggatcatttttgtcctacattaacacatctgctgacccactctatggcccccaaggcctggccctaacttcagatggtcatgttgtggttgcagactctggaaatcactgtttcaaagtctatcgatacttacagtaatggtgggcaggtggatacccgcttccatggtcttgcactataaactggaatggatttctcaatgcgggaccagattatgactagagtttttatgccagaaggaatcattggtgaactttccaaggttatttctgaatgtaacaatttccttaaaaatgacttatccaatttctgtatttcacctttagggttaaaaaaaactcttctactgaatctataaaaactgcagttttacatctgtgaactatggcttaagggacaggatttatgtagctaaactaattttgcaaatcaaacagacacttaaaaaaactagcatatgtaaaggtattcgttaatcctgtgaatggtagcttttgcacagaacttccaaaagcaaaacaaaaacaaaatctattgtagttatatacttcatttaacctaggtcacaagacccagggaatcttctaacctcacttttacagtaggtattactcttgtgacatttttttggttatcaacaactaaatataaattactttggaaaaagtaaggctgtcttgcaaaatgatcccagctctgattagcagccctctggagttcagaacttaagtatcagtgcaaatttctcaacctttctgggttagacaaagatccttttttgtgtgttcttttcaccacccctttggctcaccttgtatcagcaaacaaagtacttcttcagggaaacctgaaatttctaatgccttgaaaagcatattacaaaagtaatgctaccttttgggaaacaaactgccccgttaactccagatcattgcactggaatgtaatcaagaaagttagtcatgttttatgtaccatgttttcacacgtgtctcttctcttcgacttcctgaaagcgaaagctttacctcctgcaaatgtcagcacatgtagtaggacaccagtatcctaggacagagagccataagtagccctttggaggactgatggtgtcaaccaaaggcatgtgattgattaatgattcccccttagaaagcaagtgttaccaaagttgtgttatcttgaaagcattacaggtaagggcatgttatggttatttatcattgtttaatgaatagtagaggtgtcaagggactatgtatacatgattagggtaagatagaatgtattatatatatatatatatacacacacacatatatatagctgaatctttggtgtattgaaataggcagcactctgaaagacagaagcttcgtccagccactcttcagcacattcctttactaagcagtttaaagccgtcctagtggagcaagccctaaagcagatttaatttttgccattttccaagaatgacggtggtggcttttagtcagaaaatggccttctgtgctttcaaaaaaaaaacaaaaaaaaaaccacacacacacataaaaaacccaacaggtcaaaataaaagttgaacttgagttacatttaatttaaatataaatgcattttgagaaatgttaagaacaatttagtcaatcgttcatctgtcattggtactgtaaaataagctgtggtctatttccactgtttaattttctactcagttctaccaaataggatgtcatgtttgacatttttgatagtgactttggggtcttcttcactgaaagcaccttagaactgtactataagaaaacatttcccctatgtataattatatgaatgtgatgtttattgcttattaatttataattcagtcattctctatataggacttcttaaaatttagaagggaaatctagctacttcaaattgtctgttaaatttattatgcccaaatcaacctctgaaaaaaggtttttccaggaagatttacatttaggtttaatatttttttagttaggtagagttttaaaaaatacttgagcctgtccgtgataaagctataaaattcaataactttttagaatgttaaatgaagacactgtttcctaacatcagtgagatacatctttgaatttaaacattcatatttactgagtacctactaggtaccaagtactcttttaggcactggaaatacagtgatggacaaaacaggtaaaaaatcgctgccccctcagagctgacattctggggtgggaatttcattttgccacgtactaacgttctgcacaaaagacaggctagactcttgtctagattgtttaaaagaaacttttcaaattggttacattaattttagtttattttcacaagtaaaaatggctttttatttagattctttctgtcccaggctgttgatcttaaaactagttgatttaaagagtttttttgcacaacatttcaattatatttgtgaacttagaaattaacttacaatctaaccagccatcatatcatatcctatcaggctagatatctcaatagtagactgaatacaaagctaattttttttacatgtcaatattggcacaaactggaatgaaagaatagtttgattcagacctgctccactatgtgttgctaaaacacatgctatgagcactccaggaaacactatattttttccaaaaaatatgtgattatatatgttaaagtatagataacatttcacacttggatacatatgtgcatttactgtatttcttggtaagcatatttttgggggaaagtgctgctgatatgatacaagtagacaaaatttaaatgaaattttgtcacattctatggaaaatggtttctggtaaactgagaaggatattaaaataagtggcttttttctgggctaccattattgtttgatttctctttgtcaagtgtatagaacctgtcatacattcatgataagtagcactgaaaaattactcattcaaatttcccctgggcacgtaaggcaaaatattgccggttgggatttcaaggtcagtgacgacgcatttcctcccagtacagaccccccagccccccttgctggacatggggaggcagagagtcacttgaccatccagaaatacatgactacaagtcctttatgactgtttgccattttttttaatggtacttagtattttgatcaaactttagtctccagaactaaacaagtccctaagtttccttattttaatttactgtgactagatttgaagcaaataaatactccagatccatgcagctagaacacacttgcttccactactaaatatacagggtatgtcctaacatggagttaactggaatagcagtacactagcaagtatctgtgaatccttagcactgacgggttaacagaaatgctttggtaatacctacttagttaattggaggaagtagtaaataaacattaggtaatctgcagattacttcaaatgggaaaaatctttttgtagactctatagtaccctctctattcactagcttctgaaaagggaggagtatttttagtttgacaatttaataatttaaaaacaagacatctccaggtaggaaaaaatgaaagctatttcatgcaaacattatctaatttagcttaaaagtgaaagtggtaatactgttggtttctgtaaatgttgcagggttttaaactttataattactttaatatttttgataactagaaatctagtattgccataaaggaaactaagtgcccatcaaagatttgtttggtataaataaagaattatttgttttgttttcaatgacagtaagctacaaatcatgatgcttaaaaactttctaaagatgaattgtgtggcagtgattggtctgtttgtggagaatgtatgaaagctattaatattctagaatagattaataaattggctatgttgttccaatgaatgtacagcacttccattaacttttgaaagcaacacagccttaaactcaatgcttttgctttatgacatgggaatgttctgtcatcaatggagtgtattcttgtaatagaattctttatatcgttctcaattctatagactttcaagcctatgtatgaatatgaaggggtttttttttttttgctttgttttctttttagattttgtacattccatctttataggtctgtttcatatgttttatgtatagaacactaagtcttgcactctctgacattgatactgatatattctcgtcatttgttcttttatgaatcaaaatgttgactgcctatttaaagaaaagaatgaacgctgtgcatcaaagtgtttgtatgttcgtagctacatacgtaccacagtattttggatgctttagtctacaatgaaactttcaattaattctgtcttgaaacataggagaaacaggattcatgtgtatctctttaccatgcacaaaatctcaaatcattataataaagcttgttttctcca

SEQ ID NO: 457953 - DNA, 6917 bp, Homo sapiens
cgtccatcagaggacgcagtactccctgtgatttatattttctgccccaattttgccttctccacaaattttataccgtttgtagctgcctactctagattacttcacctttccagactatcagttcttccacctttattcttcataaagaaaattccaataacctgtttcacttaggtttttctattactcttcaagcatgaatcctaatttccctgactatatcttacctctgatctccataactgatgggagaagactggcgcatcttcgtcccatcagcagcgtgcagggtcaaagacagccggccccccatgtcagtggtctaggatggccagtgaaggcaccaacatcccaagtcctgtggtgcgccagattgacaagcagtttctgatttgcagtatatgcctggaacggtacaagaatcccaaggttctcccctgtctgcacactttctgcgagaggtgcctgcagaactacattcctgcccacagtttaaccctctcctgcccagtgtgccgccagacctccatcctgcccgagaaaggggtggccgcgctccagaacaatttcttcatcacaaacctgatggacgtgctgcagcgaactccaggcagcaacgctgaggagtcttccatcctggagacagtcactgctgtggctgcgggaaagcctctctcttgcccaaaccacgatgggaatgtgatggaattttactgccagtcctgtgagactgccatgtgtcgggagtgcacggagggggagcacgcagagcaccccacagttccactcaaggatgtggtggaacagcacaaggcctcgctccaggtccagctggatgctgtcaacaaaaggctcccagaaatagattctgctcttcagttcatctctgaaatcattcatcagttaaccaaccaaaaggccagcatcgtggatgacattcattccacctttgatgagctccagaagactttaaatgtgcgcaagagtgtgctgcttatggaattggaggtcaactatggcctcaaacacaaagtcctccagtcgcagctggatactctgctccaggggcaggagagcattaagagctgcagcaacttcacagcgcaggccctcaaccatggcacggagaccgaggtcctactggtgaagaagcagatgagcgagaagctgaacgagctggccgaccaggacttccccttgcacccgcgggagaacgaccagctggatttcatcgtggaaaccgaggggctgaagaagtccatccacaacctcgggacgatcttaaccaccaacgccgttgcctcagagacagtggccacgggcgaggggctgcggcagaccatcatcgggcagcccatgtccgtcaccatcaccaccaaggacaaagacggtgagctgtgcaaaaccggcaacgcctacctcaccgccgaactgagcacccccgacgggagcgtggcagacggggagatcctggacaacaagaacggcacctatgagtttttgtacactgtccagaaggaaggggactttaccctgtctctgagactctatgaccagcacatccgaggcagcccgtttaagctgaaagtgatccgatccgctgatgtgtctcccaccacagaaggcgtgaagaggcgcgttaagtccccggggagcggccacgtcaagcagaaagctgtgaaaagacccgcaagcatgtacagcactggaaaacgaaaagagaatcccatcgaagacgatttgatctttcgagtgggtaccaaaggaagaaataaaggagagtttacaaatcttcagggggtagctgcatctacaaatggaaagatattaattgcagacagtaacaaccaatgtgtgcagatattttccaatgatggccagttcaaaagtcgttttggcatacggggacgctctccggggcagctgcagcggcccacaggagtggctgtacatcccagtggggacataatcattgccgattatgataataaatgggtcagcattttctcctccgatgggaaatttaagacaaaaattggatcaggaaagctgatgggacccaaaggagtttctgtggaccgcaatgggcacattattgttgtggacaacaaggcgtgctgcgtgtttatcttccagccaaacgggaaaatagtcaccaggtttggtagccgaggaaatggggacaggcagtttgcaggtccccattttgcagctgtaaatagcaataatgagattattattacagatttccataatcattctgtcaaggtgtttaatcaggaaggagaattcatgttgaagtttggctcaaatggagaaggaaatgggcagtttaatgctccaacaggtgtagcagtggattcaaatggaaacatcattgtggccgactggggaaacagcaggatccaggtttttgatgggagtggatcatttttgtcctacattaacacatctgctgacccactctatggcccccaaggcctggccctaacttcagatggtcatgttgtggttgcagactctggaaatcactgtttcaaagtctatcgatacttacagtaatggtgggcaggtggatacccgcttccatggtcttgcactataaactggaatggatttctcaatgcgggaccagattatgactagagtttttatgccagaaggaatcattggtgaactttccaaggttatttctgaatgtaacaatttccttaaaaatgacttatccaatttctgtatttcacctttagggttaaaaaaaactcttctactgaatctataaaaactgcagttttacatctgtgaactatggcttaagggacaggatttatgtagctaaactaattttgcaaatcaaacagacacttaaaaaaactagcatatgtaaaggtattcgttaatcctgtgaatggtagcttttgcacagaacttccaaaagcaaaacaaaaacaaaatctattgtagttatatacttcatttaacctaggtcacaagacccagggaatcttctaacctcacttttacagtaggtattactcttgtgacatttttttggttatcaacaactaaatataaattactttggaaaaagtaaggctgtcttgcaaaatgatcccagctctgattagcagccctctggagttcagaacttaagtatcagtgcaaatttctcaacctttctgggttagacaaagatccttttttgtgtgttcttttcaccacccctttggctcaccttgtatcagcaaacaaagtacttcttcagggaaacctgaaatttctaatgccttgaaaagcatattacaaaagtaatgctaccttttgggaaacaaactgccccgttaactccagatcattgcactggaatgtaatcaagaaagttagtcatgttttatgtaccatgttttcacacgtgtctcttctcttcgacttcctgaaagcgaaagctttacctcctgcaaatgtcagcacatgtagtaggacaccagtatcctaggacagagagccataagtagccctttggaggactgatggtgtcaaccaaaggcatgtgattgattaatgattcccccttagaaagcaagtgttaccaaagttgtgttatcttgaaagcattacaggtaagggcatgttatggttatttatcattgtttaatgaatagtagaggtgtcaagggactatgtatacatgattagggtaagatagaatgtattatatatatatatatatacacacacacatatatatagctgaatctttggtgtattgaaataggcagcactctgaaagacagaagcttcgtccagccactcttcagcacattcctttactaagcagtttaaagccgtcctagtggagcaagccctaaagcagatttaatttttgccattttccaagaatgacggtggtggcttttagtcagaaaatggccttctgtgctttcaaaaaaaaaacaaaaaaaaaaccacacacacacataaaaaacccaacaggtcaaaataaaagttgaacttgagttacatttaatttaaatataaatgcattttgagaaatgttaagaacaatttagtcaatcgttcatctgtcattggtactgtaaaataagctgtggtctatttccactgtttaattttctactcagttctaccaaataggatgtcatgtttgacatttttgatagtgactttggggtcttcttcactgaaagcaccttagaactgtactataagaaaacatttcccctatgtataattatatgaatgtgatgtttattgcttattaatttataattcagtcattctctatataggacttcttaaaatttagaagggaaatctagctacttcaaattgtctgttaaatttattatgcccaaatcaacctctgaaaaaaggtttttccaggaagatttacatttaggtttaatatttttttagttaggtagagttttaaaaaatacttgagcctgtccgtgataaagctataaaattcaataactttttagaatgttaaatgaagacactgtttcctaacatcagtgagatacatctttgaatttaaacattcatatttactgagtacctactaggtaccaagtactcttttaggcactggaaatacagtgatggacaaaacaggtaaaaaatcgctgccccctcagagctgacattctggggtgggaatttcattttgccacgtactaacgttctgcacaaaagacaggctagactcttgtctagattgtttaaaagaaacttttcaaattggttacattaattttagtttattttcacaagtaaaaatggctttttatttagattctttctgtcccaggctgttgatcttaaaactagttgatttaaagagtttttttgcacaacatttcaattatatttgtgaacttagaaattaacttacaatctaaccagccatcatatcatatcctatcaggctagatatctcaatagtagactgaatacaaagctaattttttttacatgtcaatattggcacaaactggaatgaaagaatagtttgattcagacctgctccactatgtgttgctaaaacacatgctatgagcactccaggaaacactatattttttccaaaaaatatgtgattatatatgttaaagtatagataacatttcacacttggatacatatgtgcatttactgtatttcttggtaagcatatttttgggggaaagtgctgctgatatgatacaagtagacaaaatttaaatgaaattttgtcacattctatggaaaatggtttctggtaaactgagaaggatattaaaataagtggcttttttctgggctaccattattgtttgatttctctttgtcaagtgtatagaacctgtcatacattcatgataagtagcactgaaaaattactcattcaaatttcccctgggcacgtaaggcaaaatattgccggttgggatttcaaggtcagtgacgacgcatttcctcccagtacagaccccccagccccccttgctggacatggggaggcagagagtcacttgaccatccagaaatacatgactacaagtcctttatgactgtttgccattttttttaatggtacttagtattttgatcaaactttagtctccagaactaaacaagtccctaagtttccttattttaatttactgtgactagatttgaagcaaataaatactccagatccatgcagctagaacacacttgcttccactactaaatatacagggtatgtcctaacatggagttaactggaatagcagtacactagcaagtatctgtgaatccttagcactgacgggttaacagaaatgctttggtaatacctacttagttaattggaggaagtagtaaataaacattaggtaatctgcagattacttcaaatgggaaaaatctttttgtagactctatagtaccctctctattcactagcttctgaaaagggaggagtatttttagtttgacaatttaataatttaaaaacaagacatctccaggtaggaaaaaatgaaagctatttcatgcaaacattatctaatttagcttaaaagtgaaagtggtaatactgttggtttctgtaaatgttgcagggttttaaactttataattactttaatatttttgataactagaaatctagtattgccataaaggaaactaagtgcccatcaaagatttgtttggtataaataaagaattatttgttttgttttcaatgacagtaagctacaaatcatgatgcttaaaaactttctaaagatgaattgtgtggcagtgattggtctgtttgtggagaatgtatgaaagctattaatattctagaatagattaataaattggctatgttgttccaatgaatgtacagcacttccattaacttttgaaagcaacacagccttaaactcaatgcttttgctttatgacatgggaatgttctgtcatcaatggagtgtattcttgtaatagaattctttatatcgttctcaattctatagactttcaagcctatgtatgaatatgaaggggtttttttttttttgctttgttttctttttagattttgtacattccatctttataggtctgtttcatatgttttatgtatagaacactaagtcttgcactctctgacattgatactgatatattctcgtcatttgttcttttatgaatcaaaatgttgactgcctatttaaagaaaagaatgaacgctgtgcatcaaagtgtttgtatgttcgtagctacatacgtaccacagtattttggatgctttagtctacaatgaaactttcaattaattctgtcttgaaacataggagaaacaggattcatgtgtatctctttaccatgcacaaaatctcaaatcattataataaagcttgttttctcca

SEQ ID NO: 457954 - DNA, 6656 bp, Homo sapiens
ttggcctcccaaagtgctgggattataggcatacgccactgcacccagcctagtttcaatttttaatataagaaatatctataaatataacccacatacacgaaagctcttttggagtcctcaataatttttaaagattataacggggtcctgatataaaaatgtttgagcaccacagccctatactgtactgccttggggcagtggatacccaaaagctggttttatggttatagaagcagcttagaagtcagctccatttctgagacctgtcacataaaaatgtgtccttccttttctcctgtgaagctggacttaataatgctgacattctggggtggctctcatttaattatgagagactgcaaggcaagtgcttagtgtagagtaagccctcaacccatggcccagaaccaggaacttttcttgtgtcatccacaggtgatggaattttactgccagtcctgtgagactgccatgtgtcgggagtgcacggagggggagcacgcagagcaccccacagttccactcaaggatgtggtggaacagcacaaggcctcgctccaggtccagctggatgctgtcaacaaaaggctcccagaaatagattctgctcttcagttcatctctgaaatcattcatcagttaaccaaccaaaaggccagcatcgtggatgacattcattccacctttgatgagctccagaagactttaaatgtgcgcaagagtgtgctgcttatggaattggaggtcaactatggcctcaaacacaaagtcctccagtcgcagctggatactctgctccaggggcaggagagcattaagagctgcagcaacttcacagcgcaggccctcaaccatggcacggagaccgaggtcctactggtgaagaagcagatgagcgagaagctgaacgagctggccgaccaggacttccccttgcacccgcgggagaacgaccagctggatttcatcgtggaaaccgaggggctgaagaagtccatccacaacctcgggacgatcttaaccaccaacgccgttgcctcagagacagtggccacgggcgaggggctgcggcagaccatcatcgggcagcccatgtccgtcaccatcaccaccaaggacaaagacggtgagctgtgcaaaaccggcaacgcctacctcaccgccgaactgagcacccccgacgggagcgtggcagacggggagatcctggacaacaagaacggcacctatgagtttttgtacactgtccagaaggaaggggactttaccctgtctctgagactctatgaccagcacatccgaggcagcccgtttaagctgaaagtgatccgatccgctgatgtgtctcccaccacagaaggcgtgaagaggcgcgttaagtccccggggagcggccacgtcaagcagaaagctgtgaaaagacccgcaagcatgtacagcactggaaaacgaaaagagaatcccatcgaagacgatttgatctttcgagtgggtaccaaaggaagaaataaaggagagtttacaaatcttcagggggtagctgcatctacaaatggaaagatattaattgcagacagtaacaaccaatgtgtgcagatattttccaatgatggccagttcaaaagtcgttttggcatacggggacgctctccggggcagctgcagcggcccacaggagtggctgtacatcccagtggggacataatcattgccgattatgataataaatgggtcagcattttctcctccgatgggaaatttaagacaaaaattggatcaggaaagctgatgggacccaaaggagtttctgtggaccgcaatgggcacattattgttgtggacaacaaggcgtgctgcgtgtttatcttccagccaaacgggaaaatagtcaccaggtttggtagccgaggaaatggggacaggcagtttgcaggtccccattttgcagctgtaaatagcaataatgagattattattacagatttccataatcattctgtcaaggtgtttaatcaggaaggagaattcatgttgaagtttggctcaaatggagaaggaaatgggcagtttaatgctccaacaggtgtagcagtggattcaaatggaaacatcattgtggccgactggggaaacagcaggatccaggtttttgatgggagtggatcatttttgtcctacattaacacatctgctgacccactctatggcccccaaggcctggccctaacttcagatggtcatgttgtggttgcagactctggaaatcactgtttcaaagtctatcgatacttacagtaatggtgggcaggtggatacccgcttccatggtcttgcactataaactggaatggatttctcaatgcgggaccagattatgactagagtttttatgccagaaggaatcattggtgaactttccaaggttatttctgaatgtaacaatttccttaaaaatgacttatccaatttctgtatttcacctttagggttaaaaaaaactcttctactgaatctataaaaactgcagttttacatctgtgaactatggcttaagggacaggatttatgtagctaaactaattttgcaaatcaaacagacacttaaaaaaactagcatatgtaaaggtattcgttaatcctgtgaatggtagcttttgcacagaacttccaaaagcaaaacaaaaacaaaatctattgtagttatatacttcatttaacctaggtcacaagacccagggaatcttctaacctcacttttacagtaggtattactcttgtgacatttttttggttatcaacaactaaatataaattactttggaaaaagtaaggctgtcttgcaaaatgatcccagctctgattagcagccctctggagttcagaacttaagtatcagtgcaaatttctcaacctttctgggttagacaaagatccttttttgtgtgttcttttcaccacccctttggctcaccttgtatcagcaaacaaagtacttcttcagggaaacctgaaatttctaatgccttgaaaagcatattacaaaagtaatgctaccttttgggaaacaaactgccccgttaactccagatcattgcactggaatgtaatcaagaaagttagtcatgttttatgtaccatgttttcacacgtgtctcttctcttcgacttcctgaaagcgaaagctttacctcctgcaaatgtcagcacatgtagtaggacaccagtatcctaggacagagagccataagtagccctttggaggactgatggtgtcaaccaaaggcatgtgattgattaatgattcccccttagaaagcaagtgttaccaaagttgtgttatcttgaaagcattacaggtaagggcatgttatggttatttatcattgtttaatgaatagtagaggtgtcaagggactatgtatacatgattagggtaagatagaatgtattatatatatatatatatacacacacacatatatatagctgaatctttggtgtattgaaataggcagcactctgaaagacagaagcttcgtccagccactcttcagcacattcctttactaagcagtttaaagccgtcctagtggagcaagccctaaagcagatttaatttttgccattttccaagaatgacggtggtggcttttagtcagaaaatggccttctgtgctttcaaaaaaaaaacaaaaaaaaaaccacacacacacataaaaaacccaacaggtcaaaataaaagttgaacttgagttacatttaatttaaatataaatgcattttgagaaatgttaagaacaatttagtcaatcgttcatctgtcattggtactgtaaaataagctgtggtctatttccactgtttaattttctactcagttctaccaaataggatgtcatgtttgacatttttgatagtgactttggggtcttcttcactgaaagcaccttagaactgtactataagaaaacatttcccctatgtataattatatgaatgtgatgtttattgcttattaatttataattcagtcattctctatataggacttcttaaaatttagaagggaaatctagctacttcaaattgtctgttaaatttattatgcccaaatcaacctctgaaaaaaggtttttccaggaagatttacatttaggtttaatatttttttagttaggtagagttttaaaaaatacttgagcctgtccgtgataaagctataaaattcaataactttttagaatgttaaatgaagacactgtttcctaacatcagtgagatacatctttgaatttaaacattcatatttactgagtacctactaggtaccaagtactcttttaggcactggaaatacagtgatggacaaaacaggtaaaaaatcgctgccccctcagagctgacattctggggtgggaatttcattttgccacgtactaacgttctgcacaaaagacaggctagactcttgtctagattgtttaaaagaaacttttcaaattggttacattaattttagtttattttcacaagtaaaaatggctttttatttagattctttctgtcccaggctgttgatcttaaaactagttgatttaaagagtttttttgcacaacatttcaattatatttgtgaacttagaaattaacttacaatctaaccagccatcatatcatatcctatcaggctagatatctcaatagtagactgaatacaaagctaattttttttacatgtcaatattggcacaaactggaatgaaagaatagtttgattcagacctgctccactatgtgttgctaaaacacatgctatgagcactccaggaaacactatattttttccaaaaaatatgtgattatatatgttaaagtatagataacatttcacacttggatacatatgtgcatttactgtatttcttggtaagcatatttttgggggaaagtgctgctgatatgatacaagtagacaaaatttaaatgaaattttgtcacattctatggaaaatggtttctggtaaactgagaaggatattaaaataagtggcttttttctgggctaccattattgtttgatttctctttgtcaagtgtatagaacctgtcatacattcatgataagtagcactgaaaaattactcattcaaatttcccctgggcacgtaaggcaaaatattgccggttgggatttcaaggtcagtgacgacgcatttcctcccagtacagaccccccagccccccttgctggacatggggaggcagagagtcacttgaccatccagaaatacatgactacaagtcctttatgactgtttgccattttttttaatggtacttagtattttgatcaaactttagtctccagaactaaacaagtccctaagtttccttattttaatttactgtgactagatttgaagcaaataaatactccagatccatgcagctagaacacacttgcttccactactaaatatacagggtatgtcctaacatggagttaactggaatagcagtacactagcaagtatctgtgaatccttagcactgacgggttaacagaaatgctttggtaatacctacttagttaattggaggaagtagtaaataaacattaggtaatctgcagattacttcaaatgggaaaaatctttttgtagactctatagtaccctctctattcactagcttctgaaaagggaggagtatttttagtttgacaatttaataatttaaaaacaagacatctccaggtaggaaaaaatgaaagctatttcatgcaaacattatctaatttagcttaaaagtgaaagtggtaatactgttggtttctgtaaatgttgcagggttttaaactttataattactttaatatttttgataactagaaatctagtattgccataaaggaaactaagtgcccatcaaagatttgtttggtataaataaagaattatttgttttgttttcaatgacagtaagctacaaatcatgatgcttaaaaactttctaaagatgaattgtgtggcagtgattggtctgtttgtggagaatgtatgaaagctattaatattctagaatagattaataaattggctatgttgttccaatgaatgtacagcacttccattaacttttgaaagcaacacagccttaaactcaatgcttttgctttatgacatgggaatgttctgtcatcaatggagtgtattcttgtaatagaattctttatatcgttctcaattctatagactttcaagcctatgtatgaatatgaaggggtttttttttttttgctttgttttctttttagattttgtacattccatctttataggtctgtttcatatgttttatgtatagaacactaagtcttgcactctctgacattgatactgatatattctcgtcatttgttcttttatgaatcaaaatgttgactgcctatttaaagaaaagaatgaacgctgtgcatcaaagtgtttgtatgttcgtagctacatacgtaccacagtattttggatgctttagtctacaatgaaactttcaattaattctgtcttgaaacataggagaaacaggattcatgtgtatctctttaccatgcacaaaatctcaaatcattataataaagcttgttttctcca

SEQ ID NO: 457955 - DNA, 6431 bp, Homo sapiens
aattcggcactagggcttgatgactataatgggcccagttgtctgcgggctgcggggagctaagtccccagattggaggaggctggctctggtcttcgatgcacaggagtggccgttatggaacgccagcagcgtgcagggtcaaagacagccggccccccatgtcagtggtctaggatggccagtgaaggcaccaacatcccaagtcctgtggtgcgccagattgacaagcagtttctgatttgcagtatatgcctggaacggtacaagaatcccaaggttctcccctgtctgcacactttctgcgagaggtgcctgcagaactacattcctgcccacagtttaaccctctcctgcccagtgtgccgccagacctccatcctgcccgagaaaggggtggccgcgctccagaacaatttcttcatcacaaacctgatggacgtgctgcagcgaactccaggcagcaacgctgaggagtcttccatcctggagacagtcactgctgtggctgcgggaaagcctctctcttgcccaaaccacgatgggaatgtcctccagtcgcagctggatactctgctccaggggcaggagagcattaagagctgcagcaacttcacagcgcaggccctcaaccatggcacggagaccgaggtcctactggtgaagaagcagatgagcgagaagctgaacgagctggccgaccaggacttccccttgcacccgcgggagaacgaccagctggatttcatcgtggaaaccgaggggctgaagaagtccatccacaacctcgggacgatcttaaccaccaacgccgttgcctcagagacagtggccacgggcgaggggctgcggcagaccatcatcgggcagcccatgtccgtcaccatcaccaccaaggacaaagacggtgagctgtgcaaaaccggcaacgcctacctcaccgccgaactgagcacccccgacgggagcgtggcagacggggagatcctggacaacaagaacggcacctatgagtttttgtacactgtccagaaggaaggggactttaccctgtctctgagactctatgaccagcacatccgaggcagcccgtttaagctgaaagtgatccgatccgctgatgtgtctcccaccacagaaggcgtgaagaggcgcgttaagtccccggggagcggccacgtcaagcagaaagctgtgaaaagacccgcaagcatgtacagcactggaaaacgaaaagagaatcccatcgaagacgatttgatctttcgagtgggtaccaaaggaagaaataaaggagagtttacaaatcttcagggggtagctgcatctacaaatggaaagatattaattgcagacagtaacaaccaatgtgtgcagatattttccaatgatggccagttcaaaagtcgttttggcatacggggacgctctccggggcagctgcagcggcccacaggagtggctgtacatcccagtggggacataatcattgccgattatgataataaatgggtcagcattttctcctccgatgggaaatttaagacaaaaattggatcaggaaagctgatgggacccaaaggagtttctgtggaccgcaatgggcacattattgttgtggacaacaaggcgtgctgcgtgtttatcttccagccaaacgggaaaatagtcaccaggtttggtagccgaggaaatggggacaggcagtttgcaggtccccattttgcagctgtaaatagcaataatgagattattattacagatttccataatcattctgtcaaggtgtttaatcaggaaggagaattcatgttgaagtttggctcaaatggagaaggaaatgggcagtttaatgctccaacaggtgtagcagtggattcaaatggaaacatcattgtggccgactggggaaacagcaggatccaggtttttgatgggagtggatcatttttgtcctacattaacacatctgctgacccactctatggcccccaaggcctggccctaacttcagatggtcatgttgtggttgcagactctggaaatcactgtttcaaagtctatcgatacttacagtaatggtgggcaggtggatacccgcttccatggtcttgcactataaactggaatggatttctcaatgcgggaccagattatgactagagtttttatgccagaaggaatcattggtgaactttccaaggttatttctgaatgtaacaatttccttaaaaatgacttatccaatttctgtatttcacctttagggttaaaaaaaactcttctactgaatctataaaaactgcagttttacatctgtgaactatggcttaagggacaggatttatgtagctaaactaattttgcaaatcaaacagacacttaaaaaaactagcatatgtaaaggtattcgttaatcctgtgaatggtagcttttgcacagaacttccaaaagcaaaacaaaaacaaaatctattgtagttatatacttcatttaacctaggtcacaagacccagggaatcttctaacctcacttttacagtaggtattactcttgtgacatttttttggttatcaacaactaaatataaattactttggaaaaagtaaggctgtcttgcaaaatgatcccagctctgattagcagccctctggagttcagaacttaagtatcagtgcaaatttctcaacctttctgggttagacaaagatccttttttgtgtgttcttttcaccacccctttggctcaccttgtatcagcaaacaaagtacttcttcagggaaacctgaaatttctaatgccttgaaaagcatattacaaaagtaatgctaccttttgggaaacaaactgccccgttaactccagatcattgcactggaatgtaatcaagaaagttagtcatgttttatgtaccatgttttcacacgtgtctcttctcttcgacttcctgaaagcgaaagctttacctcctgcaaatgtcagcacatgtagtaggacaccagtatcctaggacagagagccataagtagccctttggaggactgatggtgtcaaccaaaggcatgtgattgattaatgattcccccttagaaagcaagtgttaccaaagttgtgttatcttgaaagcattacaggtaagggcatgttatggttatttatcattgtttaatgaatagtagaggtgtcaagggactatgtatacatgattagggtaagatagaatgtattatatatatatatatatacacacacacatatatatagctgaatctttggtgtattgaaataggcagcactctgaaagacagaagcttcgtccagccactcttcagcacattcctttactaagcagtttaaagccgtcctagtggagcaagccctaaagcagatttaatttttgccattttccaagaatgacggtggtggcttttagtcagaaaatggccttctgtgctttcaaaaaaaaaacaaaaaaaaaaccacacacacacataaaaaacccaacaggtcaaaataaaagttgaacttgagttacatttaatttaaatataaatgcattttgagaaatgttaagaacaatttagtcaatcgttcatctgtcattggtactgtaaaataagctgtggtctatttccactgtttaattttctactcagttctaccaaataggatgtcatgtttgacatttttgatagtgactttggggtcttcttcactgaaagcaccttagaactgtactataagaaaacatttcccctatgtataattatatgaatgtgatgtttattgcttattaatttataattcagtcattctctatataggacttcttaaaatttagaagggaaatctagctacttcaaattgtctgttaaatttattatgcccaaatcaacctctgaaaaaaggtttttccaggaagatttacatttaggtttaatatttttttagttaggtagagttttaaaaaatacttgagcctgtccgtgataaagctataaaattcaataactttttagaatgttaaatgaagacactgtttcctaacatcagtgagatacatctttgaatttaaacattcatatttactgagtacctactaggtaccaagtactcttttaggcactggaaatacagtgatggacaaaacaggtaaaaaatcgctgccccctcagagctgacattctggggtgggaatttcattttgccacgtactaacgttctgcacaaaagacaggctagactcttgtctagattgtttaaaagaaacttttcaaattggttacattaattttagtttattttcacaagtaaaaatggctttttatttagattctttctgtcccaggctgttgatcttaaaactagttgatttaaagagtttttttgcacaacatttcaattatatttgtgaacttagaaattaacttacaatctaaccagccatcatatcatatcctatcaggctagatatctcaatagtagactgaatacaaagctaattttttttacatgtcaatattggcacaaactggaatgaaagaatagtttgattcagacctgctccactatgtgttgctaaaacacatgctatgagcactccaggaaacactatattttttccaaaaaatatgtgattatatatgttaaagtatagataacatttcacacttggatacatatgtgcatttactgtatttcttggtaagcatatttttgggggaaagtgctgctgatatgatacaagtagacaaaatttaaatgaaattttgtcacattctatggaaaatggtttctggtaaactgagaaggatattaaaataagtggcttttttctgggctaccattattgtttgatttctctttgtcaagtgtatagaacctgtcatacattcatgataagtagcactgaaaaattactcattcaaatttcccctgggcacgtaaggcaaaatattgccggttgggatttcaaggtcagtgacgacgcatttcctcccagtacagaccccccagccccccttgctggacatggggaggcagagagtcacttgaccatccagaaatacatgactacaagtcctttatgactgtttgccattttttttaatggtacttagtattttgatcaaactttagtctccagaactaaacaagtccctaagtttccttattttaatttactgtgactagatttgaagcaaataaatactccagatccatgcagctagaacacacttgcttccactactaaatatacagggtatgtcctaacatggagttaactggaatagcagtacactagcaagtatctgtgaatccttagcactgacgggttaacagaaatgctttggtaatacctacttagttaattggaggaagtagtaaataaacattaggtaatctgcagattacttcaaatgggaaaaatctttttgtagactctatagtaccctctctattcactagcttctgaaaagggaggagtatttttagtttgacaatttaataatttaaaaacaagacatctccaggtaggaaaaaatgaaagctatttcatgcaaacattatctaatttagcttaaaagtgaaagtggtaatactgttggtttctgtaaatgttgcagggttttaaactttataattactttaatatttttgataactagaaatctagtattgccataaaggaaactaagtgcccatcaaagatttgtttggtataaataaagaattatttgttttgttttcaatgacagtaagctacaaatcatgatgcttaaaaactttctaaagatgaattgtgtggcagtgattggtctgtttgtggagaatgtatgaaagctattaatattctagaatagattaataaattggctatgttgttccaatgaatgtacagcacttccattaacttttgaaagcaacacagccttaaactcaatgcttttgctttatgacatgggaatgttctgtcatcaatggagtgtattcttgtaatagaattctttatatcgttctcaattctatagactttcaagcctatgtatgaatatgaaggggtttttttttttttgctttgttttctttttagattttgtacattccatctttataggtctgtttcatatgttttatgtatagaacactaagtcttgcactctctgacattgatactgatatattctcgtcatttgttcttttatgaatcaaaatgttgactgcctatttaaagaaaagaatgaacgctgtgcatcaaagtgtttgtatgttcgtagctacatacgtaccacagtattttggatgctttagtctacaatgaaactttcaattaattctgtcttgaaacataggagaaacaggattcatgtgtatctctttaccatgcacaaaatctcaaatcattataataaagcttgttttctcca

SEQ ID NO: 457956 - DNA, 6652 bp, Homo sapiens
agcattttgagtgagcttgcagaaaatgaggggctttcagctggtcgcctgcttgtcacctctcgctgcctgaaaggcagctctcagagccctttcctgtccttctaattacagcggcgggggcagtgcgcgcttcgggacgcaattggaaaccagcagcgtgcagggtcaaagacagccggccccccatgtcagtggtctaggatggccagtgaaggcaccaacatcccaagtcctgtggtgcgccagattgacaagcagtttctgatttgcagtatatgcctggaacggtacaagaatcccaaggttctcccctgtctgcacactttctgcgagaggtgcctgcagaactacattcctgcccacagtttaaccctctcctgcccagtgtgccgccagacctccatcctgcccgagaaaggggtggccgcgctccagaacaatttcttcatcacaaacctgatggacgtgctgcagcgaactccaggcagcaacgctgaggagtcttccatcctggagacagtcactgctgtggctgcgggaaagcctctctcttgcccaaaccacgatgggaatgtgatggaattttactgccagtcctgtgagactgccatgtgtcgggagtgcacggagggggagcacgcagagcaccccacagttccactcaaggatgtggtggaacagcacaaggcctcgctccaggtccagctggatgctgtcaacaaaaggctcccagaaatagattctgctcttcagttcatctctgaaatcattcatcagttaaccaaccaaaaggccagcatcgtggatgacattcattccacctttgatgagctccagaagactttaaatgtgcgcaagagtgtgctgcttatggaattggaggtcaactatggcctcaaacacaaagtcctccagtcgcagctggatactctgctccaggggcaggagagcattaagagctgcagcaacttcacagcgcaggccctcaaccatggcacggagaccgaggtcctactggtgaagaagcagatgagcgagaagctgaacgagctggccgaccaggacttccccttgcacccgcgggagaacgaccagctggatttcatcgtggaaaccgaggggctgaagaagtccatccacaacctcgggacgatcttaaccaccaacgccgttgcctcagagacagtggccacgggcgaggggctgcggcagaccatcatcgggcagcccatgtccgtcaccatcaccaccaaggacaaagacggtgagctgtgcaaaaccggcaacgcctacctcaccgccgaactgagcacccccgacgggagcgtggcagacggggagatcctggacaacaagaacggcacctatgagtttttgtacactgtccagaaggaaggggactttaccctgtctctgagactctatgaccagcacatccgaggcagcccgtttaagctgaaagtgatccgatccgctgatgtgtctcccaccacagaaggcgtgaagaggcgcgttaagtccccggggagcggccacgtcaagcagaaagctgtgaaaagacccgcaagcatgtacagcactggaaaacgaaaagagaatcccatcgaagacgatttgatctttcgagtgggtaccaaaggaagaaataaaggagagtttacaaatcttcagggggtagctgcatctacaaatggaaagatattaattgcagacagtaacaaccaatgtgtgcagatattttccaatgatggccagttcaaaagtcgttttggcatacggggacgctctccggggcagctgcagcggcccacaggagtggctgtacatcccagtggggacataatcattgccgattatgataataaatgggtcagcattttctcctccgatgggaaatttaagacaaaaattggatcaggaaagctgatgggacccaaaggagtttctgtggaccgcaatgggcacattattgttgtggacaacaaggcgtgctgcgtgtttatcttccagccaaacgggaaaatagtcaccaggtttggtagccgaggaaatggggacaggcagtttgcaggtccccattttgcagctgtaaatagcaataatgagattattattacagatttccataatcattctgtcaaggtgtttaatcaggaaggagaattcatgttgaagtttggctcaaatggagaaggaaatgggcagtttaatgctccaacaggtgtagcagtggattcaaatggaaacatcattgtggccgactggggaaacagcaggatccaggtttttgatgggagtggatcatttttgtcctacattaacacatctgctgacccactctatggcccccaaggcctggccctaacttcagatggtcatgttgtggttgcagactctggaaatcactgtttcaaagtctatcgatacttacagtaatggtgggcaggtggatacccgcttccatggtcttgcactataaactggaatggatttctcaatgcgggaccagattatgactagagtttttatgccagaaggaatcattggtgaactttccaaggttatttctgaatgtaacaatttccttaaaaatgacttatccaatttctgtatttcacctttagggttaaaaaaaactcttctactgaatctataaaaactgcagttttacatctgtgaactatggcttaagggacaggatttatgtagctaaactaattttgcaaatcaaacagacacttaaaaaaactagcatatgtaaaggtattcgttaatcctgtgaatggtagcttttgcacagaacttccaaaagcaaaacaaaaacaaaatctattgtagttatatacttcatttaacctaggtcacaagacccagggaatcttctaacctcacttttacagtaggtattactcttgtgacatttttttggttatcaacaactaaatataaattactttggaaaaagtaaggctgtcttgcaaaatgatcccagctctgattagcagccctctggagttcagaacttaagtatcagtgcaaatttctcaacctttctgggttagacaaagatccttttttgtgtgttcttttcaccacccctttggctcaccttgtatcagcaaacaaagtacttcttcagggaaacctgaaatttctaatgccttgaaaagcatattacaaaagtaatgctaccttttgggaaacaaactgccccgttaactccagatcattgcactggaatgtaatcaagaaagttagtcatgttttatgtaccatgttttcacacgtgtctcttctcttcgacttcctgaaagcgaaagctttacctcctgcaaatgtcagcacatgtagtaggacaccagtatcctaggacagagagccataagtagccctttggaggactgatggtgtcaaccaaaggcatgtgattgattaatgattcccccttagaaagcaagtgttaccaaagttgtgttatcttgaaagcattacaggtaagggcatgttatggttatttatcattgtttaatgaatagtagaggtgtcaagggactatgtatacatgattagggtaagatagaatgtattatatatatatatatatacacacacacatatatatagctgaatctttggtgtattgaaataggcagcactctgaaagacagaagcttcgtccagccactcttcagcacattcctttactaagcagtttaaagccgtcctagtggagcaagccctaaagcagatttaatttttgccattttccaagaatgacggtggtggcttttagtcagaaaatggccttctgtgctttcaaaaaaaaaacaaaaaaaaaaccacacacacacataaaaaacccaacaggtcaaaataaaagttgaacttgagttacatttaatttaaatataaatgcattttgagaaatgttaagaacaatttagtcaatcgttcatctgtcattggtactgtaaaataagctgtggtctatttccactgtttaattttctactcagttctaccaaataggatgtcatgtttgacatttttgatagtgactttggggtcttcttcactgaaagcaccttagaactgtactataagaaaacatttcccctatgtataattatatgaatgtgatgtttattgcttattaatttataattcagtcattctctatataggacttcttaaaatttagaagggaaatctagctacttcaaattgtctgttaaatttattatgcccaaatcaacctctgaaaaaaggtttttccaggaagatttacatttaggtttaatatttttttagttaggtagagttttaaaaaatacttgagcctgtccgtgataaagctataaaattcaataactttttagaatgttaaatgaagacactgtttcctaacatcagtgagatacatctttgaatttaaacattcatatttactgagtacctactaggtaccaagtactcttttaggcactggaaatacagtgatggacaaaacaggtaaaaaatcgctgccccctcagagctgacattctggggtgggaatttcattttgccacgtactaacgttctgcacaaaagacaggctagactcttgtctagattgtttaaaagaaacttttcaaattggttacattaattttagtttattttcacaagtaaaaatggctttttatttagattctttctgtcccaggctgttgatcttaaaactagttgatttaaagagtttttttgcacaacatttcaattatatttgtgaacttagaaattaacttacaatctaaccagccatcatatcatatcctatcaggctagatatctcaatagtagactgaatacaaagctaattttttttacatgtcaatattggcacaaactggaatgaaagaatagtttgattcagacctgctccactatgtgttgctaaaacacatgctatgagcactccaggaaacactatattttttccaaaaaatatgtgattatatatgttaaagtatagataacatttcacacttggatacatatgtgcatttactgtatttcttggtaagcatatttttgggggaaagtgctgctgatatgatacaagtagacaaaatttaaatgaaattttgtcacattctatggaaaatggtttctggtaaactgagaaggatattaaaataagtggcttttttctgggctaccattattgtttgatttctctttgtcaagtgtatagaacctgtcatacattcatgataagtagcactgaaaaattactcattcaaatttcccctgggcacgtaaggcaaaatattgccggttgggatttcaaggtcagtgacgacgcatttcctcccagtacagaccccccagccccccttgctggacatggggaggcagagagtcacttgaccatccagaaatacatgactacaagtcctttatgactgtttgccattttttttaatggtacttagtattttgatcaaactttagtctccagaactaaacaagtccctaagtttccttattttaatttactgtgactagatttgaagcaaataaatactccagatccatgcagctagaacacacttgcttccactactaaatatacagggtatgtcctaacatggagttaactggaatagcagtacactagcaagtatctgtgaatccttagcactgacgggttaacagaaatgctttggtaatacctacttagttaattggaggaagtagtaaataaacattaggtaatctgcagattacttcaaatgggaaaaatctttttgtagactctatagtaccctctctattcactagcttctgaaaagggaggagtatttttagtttgacaatttaataatttaaaaacaagacatctccaggtaggaaaaaatgaaagctatttcatgcaaacattatctaatttagcttaaaagtgaaagtggtaatactgttggtttctgtaaatgttgcagggttttaaactttataaaaactttctaaagatgaattgtgtggcagtgattggtctgtttgtggagaatgtatgaaagctattaatattctagaatagattaataaattggctatgttgttccaatgaatgtacagcacttccattaacttttgaaagcaacacagccttaaactcaatgcttttgctttatgacatgggaatgttctgtcatcaatggagtgtattcttgtaatagaattctttatatcgttctcaattctatagactttcaagcctatgtatgaatatgaaggggtttttttttttttgctttgttttctttttagattttgtacattccatctttataggtctgtttcatatgttttatgtatagaacactaagtcttgcactctctgacattgatactgatatattctcgtcatttgttcttttatgaatcaaaatgttgactgcctatttaaagaaaagaatgaacgctgtgcatcaaagtgtttgtatgttcgtagctacatacgtaccacagtattttggatgctttagtctacaatgaaactttcaattaattctgtcttgaaacataggagaaacaggattcatgtgtatctctttaccatgcacaaaatctcaaatcattataataaagcttgttttctcca

SEQ ID NO: 457957 - DNA, 6209 bp, Homo sapiens
agcattttgagtgagcttgcagaaaatgaggggctttcagctggtcgcctgcttgtcacctctcgctgcctgaaaggcagctctcagagccctttcctgtccttctaattacagcggcgggggcagtgcgcgcttcgggacgcaattggaaaccagcagcgtgcagggtcaaagacagccggccccccatgtcagtggtctaggatggccagtgaaggcaccaacatcccaagtcctgtggtgcgccagattgacaagcagtttctgatttgcagtatatgcctggaacggtacaagaatcccaaggttctcccctgtctgcacactttctgcgagaggtgcctgcagaactacattcctgcccacagtttaaccctctcctgcccagtgtgccgccagacctccatcctgcccgagaaaggggtggccgcgctccagaacaatttcttcatcacaaacctgatggacgtgctgcagcgaactccaggcagcaacgctgaggagtcttccatcctggagacagtcactgctgtggctgcgggaaagcctctctcttgcccaaaccacgatgggaatgtgatggaattttactgccagtcctgtgagactgccatgtgtcgggagtgcacggagggggagcacgcagagcaccccacagttccactcaaggatgtggtggaacagcacaaggcctcgctccaggtccagctggatgctgtcaacaaaaggctcccagaaatagattctgctcttcagttcatctctgaaatcattcatcagttaaccaaccaaaaggccagcatcgtggatgacattcattccacctttgatgagctccagaagactttaaatgtgcgcaagagtgtgctgcttatggaattggaggtcaactatggcctcaaacacaaagtcctccagtcgcagctggatactctgctccaggggcaggagagcattaagagctgcagcaacttcacagcgcaggccctcaaccatggcacggagaccgaggtcctactggtgaagaagcagatgagcgagaagctgaacgagctggccgaccaggacttccccttgcacccgcgggagaacgaccagctggatttcatcgtggaaaccgaggggctgaagaagtccatccacaacctcgggacgatcttaaccaccaacgccgttgcctcagagacagtggccacgggcgaggggctgcggcagaccatcatcgggcagcccatgtccgtcaccatcaccaccaaggacaaagacggtgagctgtgcaaaaccggcaacgcctacctcaccgccgaactgagcacccccgacgggagcgtggcagacggggagatcctggacaacaagaacggcacctatgagtttttgtacactgtccagaaggaaggggactttaccctgtctctgagactctatgaccagcacatccgaggcagcccgtttaagctgaaagtgatccgatccgctgatgtgtctcccaccacagaaggcgtgaagaggcgcgttaagtccccggggagcggccacgtcaagcagaaagctgtgaaaagacccgcaagcatgtacagcactggaaaacgaaaagagaatcccatcgaagacgatttgatctttcgagtgggtaccaaaggaagaaataaaggagagtttacaaatcttcagggggtagctgcatctacaaatggaaagatattaattgcagacagtaacaaccaatgtgtgcagatattttccaatgatggccagttcaaaagtcgttttggcatacggggacgctctccggggcagctgcagcggcccacaggagtggctgtacatcccagtggggacataatcattgccgattatgataataaatgggtcagcattttctcctccgatgggaaatttaagacaaaaattggatcaggaaagctgatgggacccaaaggagtttctgtggaccgcaatgggcacattattgttgtggacaacaaggcgtgctgcgtgtttatcttccagccaaacgggaaaatagtcaccaggtttggtagccgaggaaatggggacaggcagtttgcaggtccccattttgcagctgtaaatagcaataatgagattattattacagatttccataatcattctgtcaaggtgtttaatcaggaaggagaattcatgttgaagtttggctcaaatggagaaggaaatgggcagtttaatgctccaacaggtgtagcagtggattcaaatggaaacatcattgtggccgactggggaaacagcaggatccaggtttttgatgggagtggatcatttttgtcctacattaacacatctgctgacccactctatggcccccaaggcctggccctaacttcagatggtcatgttgtggttgcagactctggaaatcactgtttcaaagtctatcgatacttacagtaatggtgggcaggtggatacccgcttccatggtcttgcactataaactggaatggatttctcaatgcgggaccagattatgactagagtttttatgccagaaggaatcattggtgaactttccaaggttatttctgaatgtaacaatttccttaaaaatgacttatccaatttctgtatttcacctttagggttaaaaaaaactcttctactgaatctataaaaactgcagttttacatctgtgaactatggcttaagggacaggatttatgtagctaaactaattttgcaaatcaaacagacacttaaaaaaactagcatatgtaaaggtattcgttaatcctgtgaatggtagcttttgcacagaacttccaaaagcaaaacaaaaacaaaatctattgtagttatatacttcatttaacctaggtcacaagacccagggaatcttctaacctcacttttacagtaggtattactcttgtgacatttttttggttatcaacaactaaatataaattactttggaaaaagtaaggctgtcttgcaaaatgatcccagctctgattagcagccctctggagttcagaacttaagtatcagtgcaaatttctcaacctttctgggttagacaaagatccttttttgtgtgttcttttcaccacccctttggctcaccttgtatcagcaaacaaagtacttcttcagggaaacctgaaatttctaatgccttgaaaagcatattacaaaagtaatgctaccttttgggaaacaaactgccccgttaactccagatcattgcactggaatgtaatcaagaaagttagtcatgttttatgtaccatgttttcacacgtgtctcttctcttcgacttcctgaaagcgaaagctttacctcctgcaaatgtcagcacatgtagtaggacaccagtatcctaggacagagagccataagtagccctttggaggactgatggtgtcaaccaaaggcatgtgattgattaatgattcccccttagaaagcaagtgttaccaaagttgtgttatcttgaaagcattacaggtaagggcatgttatggttatttatcattgtttaatgaatagtagaggtgtcaagggactatgtatacatgattagggtaagatagaatgtattatatatatatatatatacacacacacatatatatagctgaatctttggtgtattgaaataggcagcactctgaaagacagaagcttcgtccagccactcttcagcacattcctttactaagcagtttaaagccgtcctagtggagcaagccctaaagcagatttaatttttgccattttccaagaatgacggtggtggcttttagtcagaaaatggccttctgtgctttcaaaaaaaaaacaaaaaaaaaaccacacacacacataaaaaacccaacaggtcaaaataaaagttgaacttgagttacatttaatttaaatataaatgcattttgagaaatgttaagaacaatttagtcaatcgttcatctgtcattggtactgtaaaataagctgtggtctatttccactgtttaattttctactcagttctaccaaataggatgtcatgtttgacatttttgatagtgactttggggtcttcttcactgaaagcaccttagaactgtactataagaaaacatttcccctatgtataattatatgaatgtgatgtttattgcttattaatttataattcagtcattctctatataggacttcttaaaatttagaagggaaatctagctacttcaaattgtctgttaaatttattatgcccaaatcaacctctgaaaaaaggtttttccaggaagatttacatttaggtttaatatttttttagttaggtagagttttaaaaaatacttgagcctgtccgtgataaagctataaaattcaataactttttagaatgttaaatgaagacactgtttcctaacatcagtgagatacatctttgaatttaaacattcatatttactgagtacctactaggtaccaagtactcttttaggcactggaaatacagtgatggacaaaacaggtaaaaaatcgctgccccctcagagctgacattctggggtgggaatttcattttgccacgtactaacgttctgcacaaaagacaggctagactcttgtctagattgtttaaaagaaacttttcaaattggttacattaattttagtttattttcacaagtaaaaatggctttttatttagattctttctgtcccaggctgttgatcttaaaactagttgatttaaagagtttttttgcacaacatttcaattatatttgtgaacttagaaattaacttacaatctaaccagccatcatatcatatcctatcaggctagatatctcaatagtagactgaatacaaagctaattttttttacatgtcaatattggcacaaactggaatgaaagaatagtttgattcagacctgctccactatgtgttgctaaaacacatgctatgagcactccaggaaacactatattttttccaaaaaatatgtgattatatatgttaaagtatagataacatttcacacttggatacatatgtgcatttactgtatttcttggtaagcatatttttgggggaaagtgctgctgatatgatacaagtagacaaaatttaaatgaaattttgtcacattctatggaaaatggtttctggtaaactgagaaggatattaaaataagtggcttttttctgggctaccattattgtttgatttctctttgtcaagtgtatagaacctgtcatacattcatgataagtagcactgaaaaattactcattcaaatttcccctgggcacgtaaggcaaaatattgccggttgggatttcaaggtcagtgacgacgcatttcctcccagtacagaccccccagccccccttgctggacatggggaggcagagagtcacttgaccatccagaaatacatgactacaagtcctttatgactgtttgccattttttttaatggtacttagtattttgatcaaactttagtctccagaactaaacaagtccctaagtttccttattttaatttactgtgactagatttgaagcaaataaatactccagatccatgcagctagaacacacttgcttccactactaaatatacagggtatgtcctaacatggagttaactggaatagcagtacactagcaagtatctgtgaatccttagcactgacgggttaacagaaatgctttggtaatacctacttagttaattggaggaagtagtaaataaacattaggtaatctgcagattacttcaaatgggaaaaatctttttgtagactctatagtaccctctctattcactagcttctgaaaagggaggagtatttttagtttgacaatttaataatttaaaaacaagacatctccaggtaggaaaaaatgaaagctatttcatgcaaacattatctaatttagcttaaaagtgaaagtggtaatactgttggtttctgtaaatgttgcagggttttaaactttataattactttaatatttttgataactagaaatctagtattgccataaaggaaactaagtgcccatcaaagatttgtttggtataaataaagaattatttgttttgttttcaatgacagtaagctacaaatcatgatgctgagacaggagaatcgcttgaaccggggaggcagaggttgcagtgagccgagatcacgccattgcac

SEQ ID NO: 457958 - DNA, 6086 bp, Homo sapiens
  misc_feature (5955)..(5955): n is a, c, g, or t
  misc_feature (5960)..(5960): n is a, c, g, or t
  misc_feature (5964)..(5964): n is a, c, g, or t
  misc_feature (5966)..(5966): n is a, c, g, or t
  misc_feature (5968)..(5968): n is a, c, g, or t
  misc_feature (5970)..(5970): n is a, c, g, or t
agcattttgagtgagcttgcagaaaatgaggggctttcagctggtcgcctgcttgtcacctctcgctgcctgaaaggcagctctcagagccctttcctgtccttctaattacagcggcgggggcagtgcgcgcttcgggacgcaattggaaaccagcagcgtgcagggtcaaagacagccggccccccatgtcagtggtctaggatggccagtgaaggcaccaacatcccaagtcctgtggtgcgccagattgacaagcagtttctgatttgcagtatatgcctggaacggtacaagaatcccaaggttctcccctgtctgcacactttctgcgagaggtgcctgcagaactacattcctgcccacagtttaaccctctcctgcccagtgtgccgccagacctccatcctgcccgagaaaggggtggccgcgctccagaacaatttcttcatcacaaacctgatggacgtgctgcagcgaactccaggcagcaacgctgaggagtcttccatcctggagacagtcactgctgtggctgcgggaaagcctctctcttgcccaaaccacgatgggaatgtgatggaattttactgccagtcctgtgagactgccatgtgtcgggagtgcacggagggggagcacgcagagcaccccacagttccactcaaggatgtggtggaacagcacaaggcctcgctccaggtccagctggatgctgtcaacaaaaggctcccagaaatagattctgctcttcagttcatctctgaaatcattcatcagttaaccaaccaaaaggccagcatcgtggatgacattcattccacctttgatgagctccagaagactttaaatgtgcgcaagagtgtgctgcttatggaattggaggtcaactatggcctcaaacacaaagtcctccagtcgcagctggatactctgctccaggggcaggagagcattaagagctgcagcaacttcacagcgcaggccctcaaccatggcacggagaccgaggtcctactggtgaagaagcagatgagcgagaagctgaacgagctggccgaccaggacttccccttgcacccgcgggagaacgaccagctggatttcatcgtggaaaccgaggggctgaagaagtccatccacaacctcgggacgatcttaaccaccaacgccgttgcctcagagacagtggccacgggcgaggggctgcggcagaccatcatcgggcagcccatgtccgtcaccatcaccaccaaggacaaagacggtgagctgtgcaaaaccggcaacgcctacctcaccgccgaactgagcacccccgacgggagcgtggcagacggggagatcctggacaacaagaacggcacctatgagtttttgtacactgtccagaaggaaggggactttaccctgtctctgagactctatgaccagcacatccgaggcagcccgtttaagctgaaagtgatccgatccgctgatgtgtctcccaccacagaaggcgtgaagaggcgcgttaagtccccggggagcggccacgtcaagcagaaagctgtgaaaagacccgcaagcatgtacagcactggaaaacgaaaagagaatcccatcgaagacgatttgatctttcgagtgggtaccaaaggaagaaataaaggagagtttacaaatcttcagggggtagctgcatctacaaatggaaagatattaattgcagacagtaacaaccaatgtgtgcagatattttccaatgatggccagttcaaaagtcgttttggcatacggggacgctctccggggcagctgcagcggcccacaggagtggctgtacatcccagtggggacataatcattgccgattatgataataaatgggtcagcattttctcctccgatgggaaatttaagacaaaaattggatcaggaaagctgatgggacccaaaggagtttctgtggaccgcaatgggcacattattgttgtggacaacaaggcgtgctgcgtgtttatcttccagccaaacgggaaaatagtcaccaggtttggtagccgaggaaatggggacaggcagtttgcaggtccccattttgcagctgtaaatagcaataatgagattattattacagatttccataatcattctgtcaaggtgtttaatcaggaaggagaattcatgttgaagtttggctcaaatggagaaggaaatgggcagtttaatgctccaacaggtgtagcagtggattcaaatggaaacatcattgtggccgactggggaaacagcaggatccaggtttttgatgggagtggatcatttttgtcctacattaacacatctgctgacccactctatggcccccaaggcctggccctaacttcagatggtcatgttgtggttgcagactctggaaatcactgtttcaaagtctatcgatacttacagtaatggtgggcaggtggatacccgcttccatggtcttgcactataaactggaatggatttctcaatgcgggaccagattatgactagagtttttatgccagaaggaatcattggtgaactttccaaggttatttctgaatgtaacaatttccttaaaaatgacttatccaatttctgtatttcacctttagggttaaaaaaaactcttctactgaatctataaaaactgcagttttacatctgtgaactatggcttaagggacaggatttatgtagctaaactaattttgcaaatcaaacagacacttaaaaaaactagcatatgtaaaggtattcgttaatcctgtgaatggtagcttttgcacagaacttccaaaagcaaaacaaaaacaaaatctattgtagttatatacttcatttaacctaggtcacaagacccagggaatcttctaacctcacttttacagtaggtattactcttgtgacatttttttggttatcaacaactaaatataaattactttggaaaaagtaaggctgtcttgcaaaatgatcccagctctgattagcagccctctggagttcagaacttaagtatcagtgcaaatttctcaacctttctgggttagacaaagatccttttttgtgtgttcttttcaccacccctttggctcaccttgtatcagcaaacaaagtacttcttcagggaaacctgaaatttctaatgccttgaaaagcatattacaaaagtaatgctaccttttgggaaacaaactgccccgttaactccagatcattgcactggaatgtaatcaagaaagttagtcatgttttatgtaccatgttttcacacgtgtctcttctcttcgacttcctgaaagcgaaagctttacctcctgcaaatgtcagcacatgtagtaggacaccagtatcctaggacagagagccataagtagccctttggaggactgatggtgtcaaccaaaggcatgtgattgattaatgattcccccttagaaagcaagtgttaccaaagttgtgttatcttgaaagcattacaggtaagggcatgttatggttatttatcattgtttaatgaatagtagaggtgtcaagggactatgtatacatgattagggtaagatagaatgtattatatatatatatatatacacacacacatatatatagctgaatctttggtgtattgaaataggcagcactctgaaagacagaagcttcgtccagccactcttcagcacattcctttactaagcagtttaaagccgtcctagtggagcaagccctaaagcagatttaatttttgccattttccaagaatgacggtggtggcttttagtcagaaaatggccttctgtgctttcaaaaaaaaaacaaaaaaaaaaccacacacacacataaaaaacccaacaggtcaaaataaaagttgaacttgagttacatttaatttaaatataaatgcattttgagaaatgttaagaacaatttagtcaatcgttcatctgtcattggtactgtaaaataagctgtggtctatttccactgtttaattttctactcagttctaccaaataggatgtcatgtttgacatttttgatagtgactttggggtcttcttcactgaaagcaccttagaactgtactataagaaaacatttcccctatgtataattatatgaatgtgatgtttattgcttattaatttataattcagtcattctctatataggacttcttaaaatttagaagggaaatctagctacttcaaattgtctgttaaatttattatgcccaaatcaacctctgaaaaaaggtttttccaggaagatttacatttaggtttaatatttttttagttaggtagagttttaaaaaatacttgagcctgtccgtgataaagctataaaattcaataactttttagaatgttaaatgaagacactgtttcctaacatcagtgagatacatctttgaatttaaacattcatatttactgagtacctactaggtaccaagtactcttttaggcactggaaatacagtgatggacaaaacaggtaaaaaatcgctgccccctcagagctgacattctggggtgggaatttcattttgccacgtactaacgttctgcacaaaagacaggctagactcttgtctagattgtttaaaagaaacttttcaaattggttacattaattttagtttattttcacaagtaaaaatggctttttatttagattctttctgtcccaggctgttgatcttaaaactagttgatttaaagagtttttttgcacaacatttcaattatatttgtgaacttagaaattaacttacaatctaaccagccatcatatcatatcctatcaggctagatatctcaatagtagactgaatacaaagctaattttttttacatgtcaatattggcacaaactggaatgaaagaatagtttgattcagacctgctccactatgtgttgctaaaacacatgctatgagcactccaggaaacactatattttttccaaaaaatatgtgattatatatgttaaagtatagataacatttcacacttggatacatatgtgcatttactgtatttcttggtaagcatatttttgggggaaagtgctgctgatatgatacaagtagacaaaatttaaatgaaattttgtcacattctatggaaaatggtttctggtaaactgagaaggatattaaaataagtggcttttttctgggctaccattattgtttgatttctctttgtcaagtgtatagaacctgtcatacattcatgataagtagcactgaaaaattactcattcaaatttcccctgggcacgtaaggcaaaatattgccggttgggatttcaaggtcagtgacgacgcatttcctcccagtacagaccccccagccccccttgctggacatggggaggcagagagtcacttgaccatccagaaatacatgactacaagtcctttatgactgtttgccattttttttaatggtacttagtattttgatcaaactttagtctccagaactaaacaagtccctaagtttccttattttaatttactgtgactagatttgaagcaaataaatactccagatccatgcagctagaacacacttgcttccactactaaatatacagggtatgtcctaacatggagttaactggaatagcagtacactagcaagtatctgtgaatccttagcactgacgggttaacagaaatgctttggtaatacctacttagttaattggaggaagtagtaaataaacattaggtaatctgcagattacttcaaatgggaaaaatctttttgtagactctatagtaccctctctattcactagcttctgaaaagggaggagtatttttagtttgacaatttaataatttaaaaacaagacatctccaggtaggaaaaaatgaaagctatttcatgcaaacattatctaatttagcttaaaaggganggganagcngngncngaagtggcgggtaactttatacttaacttgggacagaaaacttgcggcaggacagcccagttgtggcacaccaaagtgtggcaaccgggccaccggagacaatagtggggcagggg

SEQ ID NO: 457959 - DNA, 4668 bp, Homo sapiens
aatttaaaaatatttcatacaggtgtttaatcaggaaggagaattcatgttgaagtttggctcaaatggagaaggaaatgggcagtttaatgctccaacaggtgtagcagtggattcaaatggaaacatcattgtggccgactggggaaacagcaggatccaggtttttgatgggagtggatcatttttgtcctacattaacacatctgctgacccactctatggcccccaaggcctggccctaacttcagatggtcatgttgtggttgcagactctggaaatcactgtttcaaagtctatcgatacttacagtaatggtgggcaggtggatacccgcttccatggtcttgcactataaactggaatggatttctcaatgcgggaccagattatgactagagtttttatgccagaaggaatcattggtgaactttccaaggttatttctgaatgtaacaatttccttaaaaatgacttatccaatttctgtatttcacctttagggttaaaaaaaactcttctactgaatctataaaaactgcagttttacatctgtgaactatggcttaagggacaggatttatgtagctaaactaattttgcaaatcaaacagacacttaaaaaaactagcatatgtaaaggtattcgttaatcctgtgaatggtagcttttgcacagaacttccaaaagcaaaacaaaaacaaaatctattgtagttatatacttcatttaacctaggtcacaagacccagggaatcttctaacctcacttttacagtaggtattactcttgtgacatttttttggttatcaacaactaaatataaattactttggaaaaagtaaggctgtcttgcaaaatgatcccagctctgattagcagccctctggagttcagaacttaagtatcagtgcaaatttctcaacctttctgggttagacaaagatccttttttgtgtgttcttttcaccacccctttggctcaccttgtatcagcaaacaaagtacttcttcagggaaacctgaaatttctaatgccttgaaaagcatattacaaaagtaatgctaccttttgggaaacaaactgccccgttaactccagatcattgcactggaatgtaatcaagaaagttagtcatgttttatgtaccatgttttcacacgtgtctcttctcttcgacttcctgaaagcgaaagctttacctcctgcaaatgtcagcacatgtagtaggacaccagtatcctaggacagagagccataagtagccctttggaggactgatggtgtcaaccaaaggcatgtgattgattaatgattcccccttagaaagcaagtgttaccaaagttgtgttatcttgaaagcattacaggtaagggcatgttatggttatttatcattgtttaatgaatagtagaggtgtcaagggactatgtatacatgattagggtaagatagaatgtattatatatatatatatatacacacacacatatatatagctgaatctttggtgtattgaaataggcagcactctgaaagacagaagcttcgtccagccactcttcagcacattcctttactaagcagtttaaagccgtcctagtggagcaagccctaaagcagatttaatttttgccattttccaagaatgacggtggtggcttttagtcagaaaatggccttctgtgctttcaaaaaaaaaacaaaaaaaaaaccacacacacacataaaaaacccaacaggtcaaaataaaagttgaacttgagttacatttaatttaaatataaatgcattttgagaaatgttaagaacaatttagtcaatcgttcatctgtcattggtactgtaaaataagctgtggtctatttccactgtttaattttctactcagttctaccaaataggatgtcatgtttgacatttttgatagtgactttggggtcttcttcactgaaagcaccttagaactgtactataagaaaacatttcccctatgtataattatatgaatgtgatgtttattgcttattaatttataattcagtcattctctatataggacttcttaaaatttagaagggaaatctagctacttcaaattgtctgttaaatttattatgcccaaatcaacctctgaaaaaaggtttttccaggaagatttacatttaggtttaatatttttttagttaggtagagttttaaaaaatacttgagcctgtccgtgataaagctataaaattcaataactttttagaatgttaaatgaagacactgtttcctaacatcagtgagatacatctttgaatttaaacattcatatttactgagtacctactaggtaccaagtactcttttaggcactggaaatacagtgatggacaaaacaggtaaaaaatcgctgccccctcagagctgacattctggggtgggaatttcattttgccacgtactaacgttctgcacaaaagacaggctagactcttgtctagattgtttaaaagaaacttttcaaattggttacattaattttagtttattttcacaagtaaaaatggctttttatttagattctttctgtcccaggctgttgatcttaaaactagttgatttaaagagtttttttgcacaacatttcaattatatttgtgaacttagaaattaacttacaatctaaccagccatcatatcatatcctatcaggctagatatctcaatagtagactgaatacaaagctaattttttttacatgtcaatattggcacaaactggaatgaaagaatagtttgattcagacctgctccactatgtgttgctaaaacacatgctatgagcactccaggaaacactatattttttccaaaaaatatgtgattatatatgttaaagtatagataacatttcacacttggatacatatgtgcatttactgtatttcttggtaagcatatttttgggggaaagtgctgctgatatgatacaagtagacaaaatttaaatgaaattttgtcacattctatggaaaatggtttctggtaaactgagaaggatattaaaataagtggcttttttctgggctaccattattgtttgatttctctttgtcaagtgtatagaacctgtcatacattcatgataagtagcactgaaaaattactcattcaaatttcccctgggcacgtaaggcaaaatattgccggttgggatttcaaggtcagtgacgacgcatttcctcccagtacagaccccccagccccccttgctggacatggggaggcagagagtcacttgaccatccagaaatacatgactacaagtcctttatgactgtttgccattttttttaatggtacttagtattttgatcaaactttagtctccagaactaaacaagtccctaagtttccttattttaatttactgtgactagatttgaagcaaataaatactccagatccatgcagctagaacacacttgcttccactactaaatatacagggtatgtcctaacatggagttaactggaatagcagtacactagcaagtatctgtgaatccttagcactgacgggttaacagaaatgctttggtaatacctacttagttaattggaggaagtagtaaataaacattaggtaatctgcagattacttcaaatgggaaaaatctttttgtagactctatagtaccctctctattcactagcttctgaaaagggaggagtatttttagtttgacaatttaataatttaaaaacaagacatctccaggtaggaaaaaatgaaagctatttcatgcaaacattatctaatttagcttaaaagtgaaagtggtaatactgttggtttctgtaaatgttgcagggttttaaactttataattactttaatatttttgataactagaaatctagtattgccataaaggaaactaagtgcccatcaaagatttgtttggtataaataaagaattatttgttttgttttcaatgacagtaagctacaaatcatgatgcttaaaaactttctaaagatgaattgtgtggcagtgattggtctgtttgtggagaatgtatgaaagctattaatattctagaatagattaataaattggctatgttgttccaatgaatgtacagcacttccattaacttttgaaagcaacacagccttaaactcaatgcttttgctttatgacatgggaatgttctgtcatcaatggagtgtattcttgtaatagaattctttatatcgttctcaattctatagactttcaagcctatgtatgaatatgaaggggtttttttttttttgctttgttttctttttagattttgtacattccatctttataggtctgtttcatatgttttatgtatagaacactaagtcttgcactctctgacattgatactgatatattctcgtcatttgttcttttatgaatcaaaatgttgactgcctatttaaagaaaagaatgaacgctgtgcatcaaagtgtttgtatgttcgtagctacatacgtaccacagtattttggatgctttagtctacaatgaaactttcaattaattctgtcttgaaacataggagaaacaggattcatgtgtatctctttaccatgcacaaaatctcaaatcattataataaagcttgttttctcca

SEQ ID NO: 457960 - DNA, 1755 bp, Homo sapiens
  misc_feature (18)..(18): n is a, c, g, or t
  misc_feature (35)..(35): n is a, c, g, or t
  misc_feature (44)..(44): n is a, c, g, or t
aagtgccttactttaggnggctggaccacctcaantttagaaanacaccccttgcggtgttttaaaaaaaagcagtcgtacggtcggaattcccgggatatcgattctatggaaaatggtttctggtaaactgagaaggatattaaaataagtggcttttttctgggctaccattattgtttgatttctctttgtcaagtgtatagaacctgtcatacattcatgataagtagcactgaaaaattactcattcaaatttcccctgggcacgtaaggcaaaatattgccggttgggatttcaaggtcagtgacgacgcatttcctcccagtacagaccccccagccccccttgctggacatggggaggcagagagtcacttgaccatccagaaatacatgactacaagtcctttatgactgtttgccattttttttaatggtacttagtattttgatcaaactttagtctccagaactaaacaagtccctaagtttccttattttaatttactgtgactagatttgaagcaaataaatactccagatccatgcagctagaacacacttgcttccactactaaatatacagggtatgtcctaacatggagttaactggaatagcagtacactagcaagtatctgtgaatccttagcactgacgggttaacagaaatgctttggtaatacctacttagttaattggaggaagtagtaaataaacattaggtaatctgcagattacttcaaatgggaaaaatctttttgtagactctatagtaccctctctattcactagcttctgaaaagggaggagtatttttagtttgacaatttaataatttaaaaacaagacatctccaggtaggaaaaaatgaaagctatttcatgcaaacattatctaatttagcttaaaagtgaaagtggtaatactgttggtttctgtaaatgttgcagggttttaaactttataattactttaatatttttgataactagaaatctagtattgccataaaggaaactaagtgcccatcaaagatttgtttggtataaataaagaattatttgttttgttttcaatgacagtaagctacaaatcatgatgcttaaaaactttctaaagatgaattgtgtggcagtgattggtctgtttgtggagaatgtatgaaagctattaatattctagaatagattaataaattggctatgttgttccaatgaatgtacagcacttccattaacttttgaaagcaacacagccttaaactcaatgcttttgctttatgacatgggaatgttctgtcatcaatggagtgtattcttgtaatagaattctttatatcgttctcaattctatagactttcaagcctatgtatgaatatgaaggggtttttttttttttgctttgttttctttttagattttgtacattccatctttataggtctgtttcatatgttttatgtatagaacactaagtcttgcactctctgacattgatactgatatattctcgtcatttgttcttttatgaatcaaaatgttgactgcctatttaaagaaaagaatgaacgctgtgcatcaaagtgtttgtatgttcgtagctacatacgtaccacagtattttggatgctttagtctacaatgaaactttcaattaattctgtcttgaaacataggagaaacaggattcatgtgtatctctttaccatgcacaaaatctcaaatcattataataaagcttgttttctcca

SEQ ID NO: 457961 - DNA, 853 bp, Homo sapiens
agcggcgtcatcgcacagggaaatctttctggaaccgggcaccaacttgcgtgtttgttttcatgctctttgtgcggggattagctgtcgtgccgggcctgaaaatgctgcgagcgccgggcgacatctaatccaggatttgcctctgcctcgcggttgatggaaaacagatgtcttactgctctgggcctgagcacagaatggaaatgaccgaccagagagccatttggagccgaggacacccggtgaaagccattcagagtccagccaggaggccgactttcctcctctgcagcagcgtgcagggtcaaagacagccggccccccatgtcagtggtctaggatggccagtgaaggcaccaacatcccaagtcctgtggtgcgccagattgacaagcagtttctgatttgcagtatatgcctggaacggtacaagaatcccaaggttctcccctgtctgcacactttctgcgagaggtgcctgcagaactacattcctgcccacagtttaaccctctcctgcccagtgtgccgccagacctccatcctgcccgagaaaggggtggccgcgctccagaacaatttcttcatcacaaacctgatggacgtgctgcagcgaactccaggcagcaacgctgaggagtcttccatcctggagacagtcactgctgtggctgcgggaaagcctctctcttgcccaaaccacgatgggaatgtaagtggctgggatggcagatactgcccgggagcatgactactgtggccttggggaggctttgggtacatcagagattacagattgaaacagaactccatgtggaaaaatcagtaattaaaaaagatttttaccagc

SEQ ID NO: 457962 - DNA, 2727 bp, Homo sapiens
gaaaagatgtcctgtaagatcaagaccgattggtgtgaatactgaagggggtcttccacttgttaatgacccagaaacattcctgccgacttccagccttctctcatttcctccatttttctcttcctctgttctgtgcatgaactggcacatcactacttagagcagaagatatgctgggcttctgatgatggctgcactgcatgcagcagcgtgcagggtcaaagacagccggccccccatgtcagtggtctaggatggccagtgaaggcaccaacatcccaagtcctgtggtgcgccagattgacaagcagtttctgatttgcagtatatgcctggaacggtacaagaatcccaaggttctcccctgtctgcacactttctgcgagaggtgcctgcagaactacattcctgcccacagtttaaccctctcctgcccagtgtgccgccagacctccatcctgcccgagaaaggggtggccgcgctccagaacaatttcttcatcacaaacctgatggacgtgctgcagcgaactccaggcagcaacgctgaggagtcttccatcctggagacagtcactgctgtggctgcgggaaagcctctctcttgcccaaaccacgatgggaatgtaagtggctgggatggcagatactgcccgggagcatgactactgtggccttggggaggctttgggtacatcagagattacagattgaaacagaactccatgtggaaaaatcagtaattaaaaaagatttttaccagcaaaaagactacctgctcactttctttgaccagaactatttaaataacgaaatcaatctccactgtgtctccttcacacatattgttggtatccccaggacagcaaaccagtagctatttgcaagctgacctacataaacatctgtgtaataaatttatggatacggatttaacaatggataagttctgtaagttgagaatgattattaaaatgttaattagagttctttatttttcttgggagggaaattttctcatgctacattagaccttattccttattaatagatagaatttgaagctatgtgaatccctgatagtagattatagattatgaattccaaacatatttcttgctactagtgagtacaataactgttagaagctcaggaggacctgtgggtaccatcaagtaactgattcacaatagctatgtaacctgaagaggcagcattgtgtagcgtctaaggacattggctttggagtcaggctgcctgattcaaatcctgctcttaaacttattccctgtgccagctttggtaagtttattaaactctctgcgtctcatttctttatcagttaaaaaaaagtaataatagtatttaccatatagaatattggaagaattaaatgttcaagtcatgtaaatcatatagtaggatcttgataaatgtcagctttaacattttttcattaattactttatattcatctcatttgtatattggtcacttcaaaagtatttgaaactgcttaaaacaaaaggcccaggtataacaaaaccactaagacaagcaagcaatcattagagcaaagcaattcttattagccacactactgtttgtttacctcatctcccagcattctctctgcacactgtgctggagcctcaccagcctcctagaacctgccaaatggtttccctcctcggggcctggctgttctgttccttctgcctgggttgctctttgtttcctctttatgtggcgagcttattctcttccttgaagtctcactgcaaatttctcctgcacacagcagtcttctccacctgtaccgtctaacacaggttgcctcttacagctggttaccctccatcatgtccctgctttctttcctccctggtgctcactgtggtctgcttgccatcagctgtgtatttgtgtacttattagtcctggctttccctctagaatgtgagctctgggagggcaaggacctgtcattagacccctagcactgagggcagtgtcttatacatagaagtcaataaatatttgttgaacaaatttgccagacaccgtatttggctccttaaacccccctctgcaaagtagttgttggttactttcactttataagatgaagaaactgaggctgaaacagtttaagtcacaaagcttgctgggcacattgtaaaagctagccctggaagaaatagcatcctgagctttctggtagccaaaacaagagaaggacaccatggcttacacatctgtaataatttaattgaaagcacaccaggctattaatagctatcagttttccatgcattttatgccaagggaaattgatcatctaaattttgtaaaaagaacttttaaatgctgcttttgaaagcaggttgagtattttcctcatgaccacttctcacactggtgcttagtgaatgctgaggctgtctatgcctggagcttgcactctaaatactagttatgggaaggtatttctatcaggtgtaagagtgccccttaaaatgaggctctctggagacgtgacttgatagaggagtaaagtcttagaaacattaggttgttttattttttatgggttttttagtttttgtttttgtttctgagacagagtctcaatctgtcatccaggctggagcttcagtgagccatgattgcgcctctgcgctccaacccaggtgacagagcaagactctatctcaaaaaaaa

SEQ ID NO: 457963 - DNA, 1120 bp, Homo sapiens
  misc_feature (945)..(945): n is a, c, g, or t
  misc_feature (972)..(972): n is a, c, g, or t
  misc_feature (1013)..(1013): n is a, c, g, or t
  misc_feature (1031)..(1032): n is a, c, g, or t
  misc_feature (1064)..(1064): n is a, c, g, or t
  misc_feature (1077)..(1077): n is a, c, g, or t
  misc_feature (1086)..(1087): n is a, c, g, or t
aattcggcactagggcttgatgactataatgggcccagttgtctgcgggctgcggggagctaagtccccagattggaggaggctggctctggtcttcgatgcacaggagtggccgttatggaacgccagcagcgtgcagggtcaaagacagccggccccccatgtcagtggtctaggatggccagtgaaggcaccaacatcccaagtcctgtggtgcgccagattgacaagcagtttctgatttgcagtatatgcctggaacggtacaagaatcccaaggttctcccctgtctgcacactttctgcgagaggtgcctgcagaactacattcctgcccacagtttaaccctctcctgcccagtgtgccgccagacctccatcctgcccgagaaaggggtggccgcgctccagaacaatttcttcatcacaaacctgatggacgtgctgcagcgaactccaggcagcaacgctgaggagtcttccatcctggagacagtcactgctgtggctgcgggaaagcctctctcttgcccaaaccacgatgggaatgtgatggaattttactgccagtcctgtgagactgccatgtgtcgggagtgcacggagggggagcacgcagagcaccccacagttccactcaaggatgtggtggaacagcacaaggcctcgctccaggtccagctggatgctgtcaacaaaaggctcccagaaatagattctgctcttcagttcatctctgaaatcattcatcagttaaccaaccaaaaggccagcatcgtggatgacattcattccacctttgatgagctccagaagactttaaatgtgcgcaagagtgtgctgcttatggaattggaggtcaactatggcctcaaacacaaagtcctccagtcgcagctggatactctgctccaggggcaggagagcattaagagctgcagcgtnccacaactggaacgctgcagtgcagtngtgagggcagttagcagccgccccttctgcatcctgtcaantctgattagttagagttnnggctcaaaagagtgggtggactgagattgaanttgggttgtgcangagaaaggnnaggagacacttagtaccaccagtttcagcaata

SEQ ID NO: 457964 - DNA, 2746 bp, Homo sapiens
  misc_feature (409)..(409): n is a, c, g, or t
  misc_feature (526)..(526): n is a, c, g, or t
agcggcgtcatcgcacagggaaatctttctggaaccgggcaccaacttgcgtgtttgttttcatgctctttgtgcggggattagctgtcgtgccgggcctgaaaatgctgcgagcgccgggcgacatctaatccaggatttgcctctgcctcgcggttgatggaaaacagatgtcttactgctctgggcctgagcacagaatggaaatgaccgaccagagagccatttggagccgaggacacccggtgaaagccattcagagtccagccaggaggccgactttcctcctctggtctgtttttactacttgagccgctcgctcagaaaacggccttagataaagcagtttcaccttcagatcgcctgaggctgcagaagggcggctgcgggggaggaaggaggaggcggngaggagcgggtgcgaagtcctgggtcgcctgcccgctgcctgatgtcgtgagctagggcacctcggccctggctgggcgcgcagcgaggcccaggcccgaggggtgaggcccaggcnactccggagcgcgcgctgttcccgcgaagcgagtcgccgtctcgtacagcagcgtgcagggtcaaagacagccggccccccatgtcagtggtctaggatggccagtgaaggcaccaacatcccaagtcctgtggtgcgccagattgacaagcagtttctgatttgcagtatatgcctggaacggtacgtacatcagagattacagattgaaacagaactccatgtggaaaaatcagtaattaaaaaagatttttaccagcaaaaagactacctgctcactttctttgaccagaactatttaaataacgaaatcaatctccactgtgtctccttcacacatattgttggtatccccaggacagcaaaccagtagctatttgcaagctgacctacataaacatctgtgtaataaatttatggatacggatttaacaatggataagttctgtaagttgagaatgattattaaaatgttaattagagttctttatttttcttgggagggaaattttctcatgctacattagaccttattccttattaatagatagaatttgaagctatgtgaatccctgatagtagattatagattatgaattccaaacatatttcttgctactagtgagtacaataactgttagaagctcaggaggacctgtgggtaccatcaagtaactgattcacaatagctatgtaacctgaagaggcagcattgtgtagcgtctaaggacattggctttggagtcaggctgcctgattcaaatcctgctcttaaacttattccctgtgccagctttggtaagtttattaaactctctgcgtctcatttctttatcagttaaaaaaaagtaataatagtatttaccatatagaatattggaagaattaaatgttcaagtcatgtaaatcatatagtaggatcttgataaatgtcagctttaacattttttcattaattactttatattcatctcatttgtatattggtcacttcaaaagtatttgaaactgcttaaaacaaaaggcccaggtataacaaaaccactaagacaagcaagcaatcattagagcaaagcaattcttattagccacactactgtttgtttacctcatctcccagcattctctctgcacactgtgctggagcctcaccagcctcctagaacctgccaaatggtttccctcctcggggcctggctgttctgttccttctgcctgggttgctctttgtttcctctttatgtggcgagcttattctcttccttgaagtctcactgcaaatttctcctgcacacagcagtcttctccacctgtaccgtctaacacaggttgcctcttacagctggttaccctccatcatgtccctgctttctttcctccctggtgctcactgtggtctgcttgccatcagctgtgtatttgtgtacttattagtcctggctttccctctagaatgtgagctctgggagggcaaggacctgtcattagacccctagcactgagggcagtgtcttatacatagaagtcaataaatatttgttgaacaaatttgccagacaccgtatttggctccttaaacccccctctgcaaagtagttgttggttactttcactttataagatgaagaaactgaggctgaaacagtttaagtcacaaagcttgctgggcacattgtaaaagctagccctggaagaaatagcatcctgagctttctggtagccaaaacaagagaaggacaccatggcttacacatctgtaataatttaattgaaagcacaccaggctattaatagctatcagttttccatgcattttatgccaagggaaattgatcatctaaattttgtaaaaagaacttttaaatgctgcttttgaaagcaggttgagtattttcctcatgaccacttctcacactggtgcttagtgaatgctgaggctgtctatgcctggagcttgcactctaaatactagttatgggaaggtatttctatcaggtgtaagagtgccccttaaaatgaggctctctggagacgtgacttgatagaggagtaaagtcttagaaacattaggttgttttattttttatgggttttttagtttttgtttttgtttctgagacagagtctcaatctgtcatccaggctggagcttcagtgagccatgattgcgcctctgcgctccaacccaggtgacagagcaagactctatctcaaaaaaaa

SEQ ID NO: 457965 - DNA, 2383 bp, Homo sapiens
gtccttgactacccaagtgagaagtcagcagagcctggggacgccatgtgcctgcagaactacattcctgcccacagtttaaccctctcctgcccagtgtgccgccagacctccatcctgcccgagaaaggggtggccgcgctccagaacaatttcttcatcacaaacctgatggacgtgctgcagcgaactccaggcagcaacgctgaggagtcttccatcctggagacagtcactgctgtggctgcgggaaagcctctctcttgcccaaaccacgatgggaatgtaagtggctgggatggcagatactgcccgggagcatgactactgtggccttggggaggctttgggtacatcagagattacagattgaaacagaactccatgtggaaaaatcagtaattaaaaaagatttttaccagcaaaaagactacctgctcactttctttgaccagaactatttaaataacgaaatcaatctccactgtgtctccttcacacatattgttggtatccccaggacagcaaaccagtagctatttgcaagctgacctacataaacatctgtgtaataaatttatggatacggatttaacaatggataagttctgtaagttgagaatgattattaaaatgttaattagagttctttatttttcttgggagggaaattttctcatgctacattagaccttattccttattaatagatagaatttgaagctatgtgaatccctgatagtagattatagattatgaattccaaacatatttcttgctactagtgagtacaataactgttagaagctcaggaggacctgtgggtaccatcaagtaactgattcacaatagctatgtaacctgaagaggcagcattgtgtagcgtctaaggacattggctttggagtcaggctgcctgattcaaatcctgctcttaaacttattccctgtgccagctttggtaagtttattaaactctctgcgtctcatttctttatcagttaaaaaaaagtaataatagtatttaccatatagaatattggaagaattaaatgttcaagtcatgtaaatcatatagtaggatcttgataaatgtcagctttaacattttttcattaattactttatattcatctcatttgtatattggtcacttcaaaagtatttgaaactgcttaaaacaaaaggcccaggtataacaaaaccactaagacaagcaagcaatcattagagcaaagcaattcttattagccacactactgtttgtttacctcatctcccagcattctctctgcacactgtgctggagcctcaccagcctcctagaacctgccaaatggtttccctcctcggggcctggctgttctgttccttctgcctgggttgctctttgtttcctctttatgtggcgagcttattctcttccttgaagtctcactgcaaatttctcctgcacacagcagtcttctccacctgtaccgtctaacacaggttgcctcttacagctggttaccctccatcatgtccctgctttctttcctccctggtgctcactgtggtctgcttgccatcagctgtgtatttgtgtacttattagtcctggctttccctctagaatgtgagctctgggagggcaaggacctgtcattagacccctagcactgagggcagtgtcttatacatagaagtcaataaatatttgttgaacaaatttgccagacaccgtatttggctccttaaacccccctctgcaaagtagttgttggttactttcactttataagatgaagaaactgaggctgaaacagtttaagtcacaaagcttgctgggcacattgtaaaagctagccctggaagaaatagcatcctgagctttctggtagccaaaacaagagaaggacaccatggcttacacatctgtaataatttaattgaaagcacaccaggctattaatagctatcagttttccatgcattttatgccaagggaaattgatcatctaaattttgtaaaaagaacttttaaatgctgcttttgaaagcaggttgagtattttcctcatgaccacttctcacactggtgcttagtgaatgctgaggctgtctatgcctggagcttgcactctaaatactagttatgggaaggtatttctatcaggtgtaagagtgccccttaaaatgaggctctctggagacgtgacttgatagaggagtaaagtcttagaaacattaggttgttttattttttatgggttttttagtttttgtttttgtttctgagacagagtctcaatctgtcatccaggctggagcttcagtgagccatgattgcgcctctgcgctccaacccaggtgacagagcaagactctatctcaaaaaaaa

SEQ ID NO: 457966 - DNA, 597 bp, Homo sapiens
ggtaccatatttggttggacgacaccaaggacaaagacggtgagctgtgcaaaaccggcaacgcctacctcaccgccgaactgagcacccccgacgggagcgtggcagacggggagatcctggacaacaagaacggcacctatgagtttttgtacactgtccagaaggaaggggactttaccctgtctctgagactctatgaccagcacatccgaggcagcccgtttaagctgaaagtgatccgatccgctgatgtgtctcccaccacagaaggcgtgaagaggcgcgttaagtccccggggagcggccacgtcaagcagaaagctgtgaaaagacccgcaagcatgtacagcactggaaaacgaaaagagaatcccatcgaagacgatttgatctttcgagtgggtaaggagagggcttctgtgcccgacgcctgagctggcactggttaaggggtaactgggcacgtgtcattgcaaatagcaacactgcagcccagaactctacctgcaggtgttaggagatgtactgctataaaatttgatatattttgttagtcgagcttatgcagtctcctccagagatggtatttccttc

SEQ ID NO: 457967 - DNA, 6844 bp, Homo sapiens
gaaaagatgtcctgtaagatcaagaccgattggtgtgaatactgaagggggtcttccacttgttaatgacccagaaacattcctgccgacttccagccttctctcatttcctccatttttctcttcctctgttctgtgcatgaactggcacatcactacttagagcagaagatatgctgggcttctgatgatggctgcactgcatgcagcagcgtgcagggtcaaagacagccggccccccatgtcagtggtctaggatggccagtgaaggcaccaacatcccaagtcctgtggtgcgccagattgacaagcagtttctgatttgcagtatatgcctggaacggtacaagaatcccaaggttctcccctgtctgcacactttctgcgagaggtgcctgcagaactacattcctgcccacagtttaaccctctcctgcccagtgtgccgccagacctccatcctgcccgagaaaggggtggccgcgctccagaacaatttcttcatcacaaacctgatggacgtgctgcagcgaactccaggcagcaacgctgaggagtcttccatcctggagacagtcactgctgtggctgcgggaaagcctctctcttgcccaaaccacgatgggaatgtgatggaattttactgccagtcctgtgagactgccatgtgtcgggagtgcacggagggggagcacgcagagcaccccacagttccactcaaggatgtggtggaacagcacaaggcctcgctccaggtccagctggatgctgtcaacaaaaggctcccagaaatagattctgctcttcagttcatctctgaaatcattcatcagttaaccaaccaaaaggccagcatcgtggatgacattcattccacctttgatgagctccagaagactttaaatgtgcgcaagagtgtgctgcttatggaattggaggtcaactatggcctcaaacacaaagtcctccagtcgcagctggatactctgctccaggggcaggagagcattaagagctgcagcaacttcacagcgcaggccctcaaccatggcacggagaccgaggtcctactggtgaagaagcagatgagcgagaagctgaacgagctggccgaccaggacttccccttgcacccgcgggagaacgaccagctggatttcatcgtggaaaccgaggggctgaagaagtccatccacaacctcgggacgatcttaaccaccaacgccgttgcctcagagacagtggccacgggcgaggggctgcggcagaccatcatcgggcagcccatgtccgtcaccatcaccaccaaggacaaagacggtgagctgtgcaaaaccggcaacgcctacctcaccgccgaactgagcacccccgacgggagcgtggcagacggggagatcctggacaacaagaacggcacctatgagtttttgtacactgtccagaaggaaggggactttaccctgtctctgagactctatgaccagcacatccgaggcagcccgtttaagctgaaagtgatccgatccgctgatgtgtctcccaccacagaaggcgtgaagaggcgcgttaagtccccggggagcggccacgtcaagcagaaagctgtgaaaagacccgcaagcatgtacagcactggaaaacgaaaagagaatcccatcgaagacgatttgatctttcgagtgggtaccaaaggaagaaataaaggagagtttacaaatcttcagggggtagctgcatctacaaatggaaagatattaattgcagacagtaacaaccaatgtgtgcagatattttccaatgatggccagttcaaaagtcgttttggcatacggggacgctctccggggcagctgcagcggcccacaggagtggctgtacatcccagtggggacataatcattgccgattatgataataaatgggtcagcattttctcctccgatgggaaatttaagacaaaaattggatcaggaaagctgatgggacccaaaggagtttctgtggaccgcaatgggcacattattgttgtggacaacaaggcgtgctgcgtgtttatcttccagccaaacgggaaaatagtcaccaggtttggtagccgaggaaatggggacaggcagtttgcaggtccccattttgcagctgtaaatagcaataatgagattattattacagatttccataatcattctgtcaaggtgtttaatcaggaaggagaattcatgttgaagtttggctcaaatggagaaggaaatgggcagtttaatgctccaacaggtgtagcagtggattcaaatggaaacatcattgtggccgactggggaaacagcaggatccaggtttttgatgggagtggatcatttttgtcctacattaacacatctgctgacccactctatggcccccaaggcctggccctaacttcagatggtcatgttgtggttgcagactctggaaatcactgtttcaaagtctatcgatacttacagtaatggtgggcaggtggatacccgcttccatggtcttgcactataaactggaatggatttctcaatgcgggaccagattatgactagagtttttatgccagaaggaatcattggtgaactttccaaggttatttctgaatgtaacaatttccttaaaaatgacttatccaatttctgtatttcacctttagggttaaaaaaaactcttctactgaatctataaaaactgcagttttacatctgtgaactatggcttaagggacaggatttatgtagctaaactaattttgcaaatcaaacagacacttaaaaaaactagcatatgtaaaggtattcgttaatcctgtgaatggtagcttttgcacagaacttccaaaagcaaaacaaaaacaaaatctattgtagttatatacttcatttaacctaggtcacaagacccagggaatcttctaacctcacttttacagtaggtattactcttgtgacatttttttggttatcaacaactaaatataaattactttggaaaaagtaaggctgtcttgcaaaatgatcccagctctgattagcagccctctggagttcagaacttaagtatcagtgcaaatttctcaacctttctgggttagacaaagatccttttttgtgtgttcttttcaccacccctttggctcaccttgtatcagcaaacaaagtacttcttcagggaaacctgaaatttctaatgccttgaaaagcatattacaaaagtaatgctaccttttgggaaacaaactgccccgttaactccagatcattgcactggaatgtaatcaagaaagttagtcatgttttatgtaccatgttttcacacgtgtctcttctcttcgacttcctgaaagcgaaagctttacctcctgcaaatgtcagcacatgtagtaggacaccagtatcctaggacagagagccataagtagccctttggaggactgatggtgtcaaccaaaggcatgtgattgattaatgattcccccttagaaagcaagtgttaccaaagttgtgttatcttgaaagcattacaggtaagggcatgttatggttatttatcattgtttaatgaatagtagaggtgtcaagggactatgtatacatgattagggtaagatagaatgtattatatatatatatatatacacacacacatatatatagctgaatctttggtgtattgaaataggcagcactctgaaagacagaagcttcgtccagccactcttcagcacattcctttactaagcagtttaaagccgtcctagtggagcaagccctaaagcagatttaatttttgccattttccaagaatgacggtggtggcttttagtcagaaaatggccttctgtgctttcaaaaaaaaaacaaaaaaaaaaccacacacacacataaaaaacccaacaggtcaaaataaaagttgaacttgagttacatttaatttaaatataaatgcattttgagaaatgttaagaacaatttagtcaatcgttcatctgtcattggtactgtaaaataagctgtggtctatttccactgtttaattttctactcagttctaccaaataggatgtcatgtttgacatttttgatagtgactttggggtcttcttcactgaaagcaccttagaactgtactataagaaaacatttcccctatgtataattatatgaatgtgatgtttattgcttattaatttataattcagtcattctctatataggacttcttaaaatttagaagggaaatctagctacttcaaattgtctgttaaatttattatgcccaaatcaacctctgaaaaaaggtttttccaggaagatttacatttaggtttaatatttttttagttaggtagagttttaaaaaatacttgagcctgtccgtgataaagctataaaattcaataactttttagaatgttaaatgaagacactgtttcctaacatcagtgagatacatctttgaatttaaacattcatatttactgagtacctactaggtaccaagtactcttttaggcactggaaatacagtgatggacaaaacaggtaaaaaatcgctgccccctcagagctgacattctggggtgggaatttcattttgccacgtactaacgttctgcacaaaagacaggctagactcttgtctagattgtttaaaagaaacttttcaaattggttacattaattttagtttattttcacaagtaaaaatggctttttatttagattctttctgtcccaggctgttgatcttaaaactagttgatttaaagagtttttttgcacaacatttcaattatatttgtgaacttagaaattaacttacaatctaaccagccatcatatcatatcctatcaggctagatatctcaatagtagactgaatacaaagctaattttttttacatgtcaatattggcacaaactggaatgaaagaatagtttgattcagacctgctccactatgtgttgctaaaacacatgctatgagcactccaggaaacactatattttttccaaaaaatatgtgattatatatgttaaagtatagataacatttcacacttggatacatatgtgcatttactgtatttcttggtaagcatatttttgggggaaagtgctgctgatatgatacaagtagacaaaatttaaatgaaattttgtcacattctatggaaaatggtttctggtaaactgagaaggatattaaaataagtggcttttttctgggctaccattattgtttgatttctctttgtcaagtgtatagaacctgtcatacattcatgataagtagcactgaaaaattactcattcaaatttcccctgggcacgtaaggcaaaatattgccggttgggatttcaaggtcagtgacgacgcatttcctcccagtacagaccccccagccccccttgctggacatggggaggcagagagtcacttgaccatccagaaatacatgactacaagtcctttatgactgtttgccattttttttaatggtacttagtattttgatcaaactttagtctccagaactaaacaagtccctaagtttccttattttaatttactgtgactagatttgaagcaaataaatactccagatccatgcagctagaacacacttgcttccactactaaatatacagggtatgtcctaacatggagttaactggaatagcagtacactagcaagtatctgtgaatccttagcactgacgggttaacagaaatgctttggtaatacctacttagttaattggaggaagtagtaaataaacattaggtaatctgcagattacttcaaatgggaaaaatctttttgtagactctatagtaccctctctattcactagcttctgaaaagggaggagtatttttagtttgacaatttaataatttaaaaacaagacatctccaggtaggaaaaaatgaaagctatttcatgcaaacattatctaatttagcttaaaagtgaaagtggtaatactgttggtttctgtaaatgttgcagggttttaaactttataattactttaatatttttgataactagaaatctagtattgccataaaggaaactaagtgcccatcaaagatttgtttggtataaataaagaattatttgttttgttttcaatgacagtaagctacaaatcatgatgcttaaaaactttctaaagatgaattgtgtggcagtgattggtctgtttgtggagaatgtatgaaagctattaatattctagaatagattaataaattggctatgttgttccaatgaatgtacagcacttccattaacttttgaaagcaacacagccttaaactcaatgcttttgctttatgacatgggaatgttctgtcatcaatggagtgtattcttgtaatagaattctttatatcgttctcaattctatagactttcaagcctatgtatgaatatgaaggggtttttttttttttgctttgttttctttttagattttgtacattccatctttataggtctgtttcatatgttttatgtatagaacactaagtcttgcactctctgacattgatactgatatattctcgtcatttgttcttttatgaatcaaaatgttgactgcctatttaaagaaaagaatgaacgctgtgcatcaaagtgtttgtatgttcgtagctacatacgtaccacagtattttggatgctttagtctacaatgaaactttcaattaattctgtcttgaaacataggagaaacaggattcatgtgtatctctttaccatgcacaaaatctcaaatcattataataaagcttgttttctcca

SEQ ID NO: 457968 - DNA, 7512 bp, Homo sapiens
agcattttgagtgagcttgcagaaaatgaggggctttcagctggtcgcctgcttgtcacctctcgctgcctgaaaggcagctctcagagccctttcctgtccttctaattacagcggcgggggcagtgcgcgcttcgggacgcaattggaaaccagcagcgtgcagggtcaaagacagccggccccccatgtcagtggtctaggatggccagtgaaggcaccaacatcccaagtcctgtggtgcgccagattgacaagcagtttctgatttgcagtatatgcctggaacggtacaagaatcccaaggttctcccctgtctgcacactttctgcgagaggtgcctgcagaactacattcctgcccacagtttaaccctctcctgcccagtgtgccgccagacctccatcctgcccgagaaaggggtggccgcgctccagaacaatttcttcatcacaaacctgatggacgtgctgcagcgaactccaggcagcaacgctgaggagtcttccatcctggagacagtcactgctgtggctgcgggaaagcctctctcttgcccaaaccacgatgggaatgtgatggaattttactgccagtcctgtgagactgccatgtgtcgggagtgcacggagggggagcacgcagagcaccccacagttccactcaaggatgtggtggaacagcacaaggcctcgctccaggtccagctggatgctgtcaacaaaaggctcccagaaatagattctgctcttcagttcatctctgaaatcattcatcagttaaccaaccaaaaggccagcatcgtggatgacattcattccacctttgatgagctccagaagactttaaatgtgcgcaagagtgtgctgcttatggaattggaggtcaactatggcctcaaacacaaagtcctccagtcgcagctggatactctgctccaggggcaggagagcattaagagctgcagcaacttcacagcgcaggccctcaaccatggcacggagaccgaggtcctactggtgaagaagcagatgagcgagaagctgaacgagctggccgaccaggacttccccttgcacccgcgggagaacgaccagctggatttcatcgtggaaaccgaggggctgaagaagtccatccacaacctcgggacgatcttaaccaccaacgccgttgcctcagagacagtggccacgggcgaggggctgcggcagaccatcatcgggcagcccatgtccgtcaccatcaccaccaaggacaaagacggtgagctgtgcaaaaccggcaacgcctacctcaccgccgaactgagcacccccgacgggagcgtggcagacggggagatcctggacaacaagaacggcacctatgagtttttgtacactgtccagaaggaaggggactttaccctgtctctgagactctatgaccagcacatccgaggcagcccgtttaagctgaaagtgatccgatccgctgatgtgtctcccaccacagaaggcgtgaagaggcgcgttaagtccccggggagcggccacgtcaagcagaaagctgtgaaaagacccgcaagcatgtacagcactggaaaacgaaaagagaatcccatcgaagacgatttgatctttcgagtgggtaccaaaggaagaaataaaggagagtttacaaatcttcagggggtagctgcatctacaaatggaaagatattaattgcagacagtaacaaccaatgtgtgcagatattttccaatgatggccagttcaaaagtcgttttggcatacggggacgctctccggggcagctgcagcggcccacaggagtggctgtacatcccagtggggacataatcattgccgattatgataataaatgggtcagcattttctcctccgatgggaaatttaagacaaaaattggatcaggaaagctgatgggacccaaaggagtttctgtggaccgcaatgggcacattattgttgtggacaacaaggcgtgctgcgtgtttatcttccagccaaacgggaaaatagtcaccaggtttggtagccgaggaaatggggacaggcagtttgcaggtccccattttgcagctgtaaatagcaataatgagattattattacagatttccataatcattctgtcaaggtgtttaatcaggaaggagaattcatgttgaagtttggctcaaatggagaaggaaatgggcagtttaatgctccaacaggtgtagcagtggattcaaatggaaacatcattgtggccgactggggaaacagcaggatccaggtttttgatgggagtggatcatttttgtcctacattaacacatctgctgacccactctatggcccccaaggcctggccctaacttcagatggtcatgttgtggttgcagactctggaaatcactgtttcaaagtctatcgatacttacagtaatggtgggcaggtggatacccgcttccatggtcttgcactataaactggaatggatttctcaatgcgggaccagattatgactagagtttttatgccagaaggaatcattggtgaactttccaaggttatttctgaatgtaacaatttccttaaaaatgacttatccaatttctgtatttcacctttagggttaaaaaaaactcttctactgaatctataaaaactgcagttttacatctgtgaactatggcttaagggacaggatttatgtagctaaactaattttgcaaatcaaacagacacttaaaaaaactagcatatgtaaaggtattcgttaatcctgtgaatggtagcttttgcacagaacttccaaaagcaaaacaaaaacaaaatctattgtagttatatacttcatttaacctaggtcacaagacccagggaatcttctaacctcacttttacagtaggtattactcttgtgacatttttttggttatcaacaactaaatataaattactttggaaaaagtaaggctgtcttgcaaaatgatcccagctctgattagcagccctctggagttcagaacttaagtatcagtgcaaatttctcaacctttctgggttagacaaagatccttttttgtgtgttcttttcaccacccctttggctcaccttgtatcagcaaacaaagtacttcttcagggaaacctgaaatttctaatgccttgaaaagcatattacaaaagtaatgctaccttttgggaaacaaactgccccgttaactccagatcattgcactggaatgtaatcaagaaagttagtcatgttttatgtaccatgttttcacacgtgtctcttctcttcgacttcctgaaagcgaaagctttacctcctgcaaatgtcagcacatgtagtaggacaccagtatcctaggacagagagccataagtagccctttggaggactgatggtgtcaaccaaaggcatgtgattgattaatgattcccccttagaaagcaagtgttaccaaagttgtgttatcttgaaagcattacaggtaagggcatgttatggttatttatcattgtttaatgaatagtagaggtgtcaagggactatgtatacatgattagggtaagatagaatgtattatatatatatatatatacacacacacatatatatagctgaatctttggtgtattgaaataggcagcactctgaaagacagaagcttcgtccagccactcttcagcacattcctttactaagcagtttaaagccgtcctagtggagcaagccctaaagcagatttaatttttgccattttccaagaatgacggtggtggcttttagtcagaaaatggccttctgtgctttcaaaaaaaaaacaaaaaaaaaaccacacacacacataaaaaacccaacaggtcaaaataaaagttgaacttgagttacatttaatttaaatataaatgcattttgagaaatgttaagaacaatttagtcaatcgttcatctgtcattggtactgtaaaataagctgtggtctatttccactgtttaattttctactcagttctaccaaataggatgtcatgtttgacatttttgatagtgactttggggtcttcttcactgaaagcaccttagaactgtactataagaaaacatttcccctatgtataattatatgaatgtgatgtttattgcttattaatttataattcagtcattctctatataggacttcttaaaatttagaagggaaatctagctacttcaaattgtctgttaaatttattatgcccaaatcaacctctgaaaaaaggtttttccaggaagatttacatttaggtttaatatttttttagttaggtagagttttaaaaaatacttgagcctgtccgtgataaagctataaaattcaataactttttagaatgttaaatgaagacactgtttcctaacatcagtgagatacatctttgaatttaaacattcatatttactgagtacctactaggtaccaagtactcttttaggcactggaaatacagtgatggacaaaacaggtaaaaaatcgctgccccctcagagctgacattctggggtgggaatttcattttgccacgtactaacgttctgcacaaaagacaggctagactcttgtctagattgtttaaaagaaacttttcaaattggttacattaattttagtttattttcacaagtaaaaatggctttttatttagattctttctgtcccaggctgttgatcttaaaactagttgatttaaagagtttttttgcacaacatttcaattatatttgtgaacttagaaattaacttacaatctaaccagccatcatatcatatcctatcaggctagatatctcaatagtagactgaatacaaagctaattttttttacatgtcaatattggcacaaactggaatgaaagaatagtttgattcagacctgctccactatgtgttgctaaaacacatgctatgagcactccaggaaacactatattttttccaaaaaatatgtgattatatatgttaaagtatagataacatttcacacttggatacatatgtgcatttactgtatttcttggtaagcatatttttgggggaaagtgctgctgatatgatacaagtagacaaaatttaaatgaaattttgtcacattctatggaaaatggtttctggtaaactgagaaggatattaaaataagtggcttttttctgggctaccattattgtttgatttctctttgtcaagtgtatagaacctgtcatacattcatgataagtagcactgaaaaattactcattcaaatttcccctgggcacgtaaggcaaaatattgccggttgggatttcaaggtcagtgacgacgcatttcctcccagtacagaccccccagccccccttgctggacatggggaggcagagagtcacttgaccatccagaaatacatgactacaagtcctttatgactgtttgccattttttttaatggtacttagtattttgatcaaactttagtctccagaactaaacaagtccctaagtttccttattttaatttactgtgactagatttgaagcaaataaatactccagatccatgcagctagaacacacttgcttccactactaaatatacagggtatgtcctaacatggagttaactggaatagcagtacactagcaagtatctgtgaatccttagcactgacgggttaacagaaatgctttggtaatacctacttagttaattggaggaagtagtaaataaacattaggtaatctgcagattacttcaaatgggaaaaatctttttgtagactctatagtaccctctctattcactagcttctgaaaagggaggagtatttttagtttgacaatttaataatttaaaaacaagacatctccaggtaggaaaaaatgaaagctatttcatgcaaacattatctaatttagcttaaaagtgaaagtggtaatactgttggtttctgtaaatgttgcagggttttaaactttataattactttaatatttttgataactagaaatctagtattgccataaaggaaactaagtgcccatcaaagatttgtttggtataaataaagaattatttgttttgttttcaatgacagtaagctacaaatcatgatgcttaaaaactttctaaagatgaattgtgtggcagtgattggtctgtttgtggagaatgtatgaaagctattaatattctagaatagattaataaattggctatgttgttccaatgaatgtacagcacttccattaacttttgaaagcaacacagccttaaactcaatgcttttgctttatgacatgggaatgttctgtcatcaatggagtgtattcttgtaatagaattctttatatcgttctcaattctatagactttcaagcctatgtatgaatatgaaggggtttttttttttttgctttgttttctttttagattttgtacattccatctttataggtctgtttcatatgttttatgtatagaacactaagtcttgcactctctgacattgatactgatatattctcgtcatttgttcttttatgaatcaaaatgttgactgcctatttaaagaaaagaatgaacgctgtgcatcaaagtgtttgtatgttcgtagctacatacgtaccacagtattttggatgctttagtctacaatgaaactttcaattaattctgtcttgaaacataggagaaacaggattcatgtgtatctctttaccatgcacaaaatctcaaatcattataataaagcttgttttctccaaaaaaaaaaaaaagaaaaaaaaaaaaaaaatttttgggcggtttgggcctaggaaaaggtttttaagaaacaattttggttggggggggggccaggaggtaggggaaaagggaaagggggtccacaaggaaaatcccggggccacgaacaacaggagcgtgggagattccatccccaaattaaaaaaaggccggtcgagaacaaccaggagcgtttgtagaacaaattcaacaatggcgagttcagcagcgcacaatacgggactctatcacacaggggaccaaggaaaacgctcgatattatcaaaataaccccccgaccagtggagaattcaaaaataacacaagaaaagctacacacacgatcacacaccgaacagatagcaatgtcaacagaaacaaggaggcagagggagaacgggagaggggatccgagcagtgaacagacatagtgcgagaagacagagaagagaggaggagaacaaaagaacagccgaagatctcgacaaaacagagcggacgaggacgaagagaagctacgacagcggaacgacaagagggaaaaaagacggcggtagaggagagcaagaaagagcagaaggacaagagcgtgataggagagacagacggagaggggaagggagaagaacagaaagcaaaggcgcaggggagccgcaaggaaagaggaagatgagaagagagaaaaaagaaaatagagaagg

SEQ ID NO: 457969 - DNA, 6160 bp, Homo sapiens
  misc_feature (409)..(409): n is a, c, g, or t
  misc_feature (526)..(526): n is a, c, g, or t
agcggcgtcatcgcacagggaaatctttctggaaccgggcaccaacttgcgtgtttgttttcatgctctttgtgcggggattagctgtcgtgccgggcctgaaaatgctgcgagcgccgggcgacatctaatccaggatttgcctctgcctcgcggttgatggaaaacagatgtcttactgctctgggcctgagcacagaatggaaatgaccgaccagagagccatttggagccgaggacacccggtgaaagccattcagagtccagccaggaggccgactttcctcctctggtctgtttttactacttgagccgctcgctcagaaaacggccttagataaagcagtttcaccttcagatcgcctgaggctgcagaagggcggctgcgggggaggaaggaggaggcggngaggagcgggtgcgaagtcctgggtcgcctgcccgctgcctgatgtcgtgagctagggcacctcggccctggctgggcgcgcagcgaggcccaggcccgaggggtgaggcccaggcnactccggagcgcgcgctgttcccgcgaagcgagtcgccgtctcgtacagcagcgtgcagggtcaaagacagccggccccccatgtcagtggtctaggatggccagtgaaggcaccaacatcccaagtcctgtggtgcgccagattgacaagcagtttctgatttgcagtatatgcctggaacggtacatcctggacaacaagaacggcacctatgagtttttgtacactgtccagaaggaaggggactttaccctgtctctgagactctatgaccagcacatccgaggcagcccgtttaagctgaaagtgatccgatccgctgatgtgtctcccaccacagaaggcgtgaagaggcgcgttaagtccccggggagcggccacgtcaagcagaaagctgtgaaaagacccgcaagcatgtacagcactggaaaacgaaaagagaatcccatcgaagacgatttgatctttcgagtgggtaccaaaggaagaaataaaggagagtttacaaatcttcagggggtagctgcatctacaaatggaaagatattaattgcagacagtaacaaccaatgtgtgcagatattttccaatgatggccagttcaaaagtcgttttggcatacggggacgctctccggggcagctgcagcggcccacaggagtggctgtacatcccagtggggacataatcattgccgattatgataataaatgggtcagcattttctcctccgatgggaaatttaagacaaaaattggatcaggaaagctgatgggacccaaaggagtttctgtggaccgcaatgggcacattattgttgtggacaacaaggcgtgctgcgtgtttatcttccagccaaacgggaaaatagtcaccaggtttggtagccgaggaaatggggacaggcagtttgcaggtccccattttgcagctgtaaatagcaataatgagattattattacagatttccataatcattctgtcaaggtgtttaatcaggaaggagaattcatgttgaagtttggctcaaatggagaaggaaatgggcagtttaatgctccaacaggtgtagcagtggattcaaatggaaacatcattgtggccgactggggaaacagcaggatccaggtttttgatgggagtggatcatttttgtcctacattaacacatctgctgacccactctatggcccccaaggcctggccctaacttcagatggtcatgttgtggttgcagactctggaaatcactgtttcaaagtctatcgatacttacagtaatggtgggcaggtggatacccgcttccatggtcttgcactataaactggaatggatttctcaatgcgggaccagattatgactagagtttttatgccagaaggaatcattggtgaactttccaaggttatttctgaatgtaacaatttccttaaaaatgacttatccaatttctgtatttcacctttagggttaaaaaaaactcttctactgaatctataaaaactgcagttttacatctgtgaactatggcttaagggacaggatttatgtagctaaactaattttgcaaatcaaacagacacttaaaaaaactagcatatgtaaaggtattcgttaatcctgtgaatggtagcttttgcacagaacttccaaaagcaaaacaaaaacaaaatctattgtagttatatacttcatttaacctaggtcacaagacccagggaatcttctaacctcacttttacagtaggtattactcttgtgacatttttttggttatcaacaactaaatataaattactttggaaaaagtaaggctgtcttgcaaaatgatcccagctctgattagcagccctctggagttcagaacttaagtatcagtgcaaatttctcaacctttctgggttagacaaagatccttttttgtgtgttcttttcaccacccctttggctcaccttgtatcagcaaacaaagtacttcttcagggaaacctgaaatttctaatgccttgaaaagcatattacaaaagtaatgctaccttttgggaaacaaactgccccgttaactccagatcattgcactggaatgtaatcaagaaagttagtcatgttttatgtaccatgttttcacacgtgtctcttctcttcgacttcctgaaagcgaaagctttacctcctgcaaatgtcagcacatgtagtaggacaccagtatcctaggacagagagccataagtagccctttggaggactgatggtgtcaaccaaaggcatgtgattgattaatgattcccccttagaaagcaagtgttaccaaagttgtgttatcttgaaagcattacaggtaagggcatgttatggttatttatcattgtttaatgaatagtagaggtgtcaagggactatgtatacatgattagggtaagatagaatgtattatatatatatatatatacacacacacatatatatagctgaatctttggtgtattgaaataggcagcactctgaaagacagaagcttcgtccagccactcttcagcacattcctttactaagcagtttaaagccgtcctagtggagcaagccctaaagcagatttaatttttgccattttccaagaatgacggtggtggcttttagtcagaaaatggccttctgtgctttcaaaaaaaaaacaaaaaaaaaaccacacacacacataaaaaacccaacaggtcaaaataaaagttgaacttgagttacatttaatttaaatataaatgcattttgagaaatgttaagaacaatttagtcaatcgttcatctgtcattggtactgtaaaataagctgtggtctatttccactgtttaattttctactcagttctaccaaataggatgtcatgtttgacatttttgatagtgactttggggtcttcttcactgaaagcaccttagaactgtactataagaaaacatttcccctatgtataattatatgaatgtgatgtttattgcttattaatttataattcagtcattctctatataggacttcttaaaatttagaagggaaatctagctacttcaaattgtctgttaaatttattatgcccaaatcaacctctgaaaaaaggtttttccaggaagatttacatttaggtttaatatttttttagttaggtagagttttaaaaaatacttgagcctgtccgtgataaagctataaaattcaataactttttagaatgttaaatgaagacactgtttcctaacatcagtgagatacatctttgaatttaaacattcatatttactgagtacctactaggtaccaagtactcttttaggcactggaaatacagtgatggacaaaacaggtaaaaaatcgctgccccctcagagctgacattctggggtgggaatttcattttgccacgtactaacgttctgcacaaaagacaggctagactcttgtctagattgtttaaaagaaacttttcaaattggttacattaattttagtttattttcacaagtaaaaatggctttttatttagattctttctgtcccaggctgttgatcttaaaactagttgatttaaagagtttttttgcacaacatttcaattatatttgtgaacttagaaattaacttacaatctaaccagccatcatatcatatcctatcaggctagatatctcaatagtagactgaatacaaagctaattttttttacatgtcaatattggcacaaactggaatgaaagaatagtttgattcagacctgctccactatgtgttgctaaaacacatgctatgagcactccaggaaacactatattttttccaaaaaatatgtgattatatatgttaaagtatagataacatttcacacttggatacatatgtgcatttactgtatttcttggtaagcatatttttgggggaaagtgctgctgatatgatacaagtagacaaaatttaaatgaaattttgtcacattctatggaaaatggtttctggtaaactgagaaggatattaaaataagtggcttttttctgggctaccattattgtttgatttctctttgtcaagtgtatagaacctgtcatacattcatgataagtagcactgaaaaattactcattcaaatttcccctgggcacgtaaggcaaaatattgccggttgggatttcaaggtcagtgacgacgcatttcctcccagtacagaccccccagccccccttgctggacatggggaggcagagagtcacttgaccatccagaaatacatgactacaagtcctttatgactgtttgccattttttttaatggtacttagtattttgatcaaactttagtctccagaactaaacaagtccctaagtttccttattttaatttactgtgactagatttgaagcaaataaatactccagatccatgcagctagaacacacttgcttccactactaaatatacagggtatgtcctaacatggagttaactggaatagcagtacactagcaagtatctgtgaatccttagcactgacgggttaacagaaatgctttggtaatacctacttagttaattggaggaagtagtaaataaacattaggtaatctgcagattacttcaaatgggaaaaatctttttgtagactctatagtaccctctctattcactagcttctgaaaagggaggagtatttttagtttgacaatttaataatttaaaaacaagacatctccaggtaggaaaaaatgaaagctatttcatgcaaacattatctaatttagcttaaaagtgaaagtggtaatactgttggtttctgtaaatgttgcagggttttaaactttataattactttaatatttttgataactagaaatctagtattgccataaaggaaactaagtgcccatcaaagatttgtttggtataaataaagaattatttgttttgttttcaatgacagtaagctacaaatcatgatgcttaaaaactttctaaagatgaattgtgtggcagtgattggtctgtttgtggagaatgtatgaaagctattaatattctagaatagattaataaattggctatgttgttccaatgaatgtacagcacttccattaacttttgaaagcaacacagccttaaactcaatgcttttgctttatgacatgggaatgttctgtcatcaatggagtgtattcttgtaatagaattctttatatcgttctcaattctatagactttcaagcctatgtatgaatatgaaggggtttttttttttttgctttgttttctttttagattttgtacattccatctttataggtctgtttcatatgttttatgtatagaacactaagtcttgcactctctgacattgatactgatatattctcgtcatttgttcttttatgaatcaaaatgttgactgcctatttaaagaaaagaatgaacgctgtgcatcaaagtgtttgtatgttcgtagctacatacgtaccacagtattttggatgctttagtctacaatgaaactttcaattaattctgtcttgaaacataggagaaacaggattcatgtgtatctctttaccatgcacaaaatctcaaatcattataataaagcttgttttctcca

SEQ ID NO: 457970 - DNA, 6415 bp, Homo sapiens
agcattttgagtgagcttgcagaaaatgaggggctttcagctggtcgcctgcttgtcacctctcgctgcctgaaaggcagctctcagagccctttcctgtccttctaattacagcggcgggggcagtgcgcgcttcgggacgcaattggaaaccagcagcgtgcagggtcaaagacagccggccccccatgtcagtggtctaggatggccagtgaaggcaccaacatcccaagtcctgtggtgcgccagattgacaagcagtttctgatttgcagtatatgcctggaacggtacaagaatcccaaggttctcccctgtctgcacactttctgcgagaggtgcctgcagaactacattcctgcccacagtttaaccctctcctgcccagtgtgccgccagacctccatcctgcccgagaaaggggtggccgcgctccagaacaatttcttcatcacaaacctgatggacgtgctgcagcgaactccaggcagcaacgctgaggagtcttccatcctggagacagtcactgctgtggctgcgggaaagcctctctcttgcccaaaccacgatgggaatgtgatggaattttactgccagtcctgtgagactgccatgtgtcgggagtgcacggagggggagcacgcagagcaccccacagttccactcaaggatgtggtggaacagcacaaggcctcgctccaggtccagctggatgctgtcaacaaaaggctcccagaaatagattctgctcttcagttcatctctgaaatcattcatcagttaaccaaccaaaaggccagcatcgtggatgacattcattccacctttgatgagctccagaagactttaaatgtgcgcaagagtgtgctgcttatggaattggaggtcaactatggcctcaaacacaaagtcctccagtcgcagctggatactctgctccaggggcaggagagcattaagagctgcagcaacttcacagcgcaggccctcaaccatggcacggagaccgaggtcctactggtgaagaagcagatgagcgagaagctgaacgagctggccgaccaggacttccccttgcacccgcgggagaacgaccagctggatttcatcgtggaaaccgaggggctgaagaagtccatccacaacctcgggacgatcttaaccaccaacgccgttgcctcagagacagtggccacgggcgaggggctgcggcagaccatcatcgggcagcccatgtccgtcaccatcaccaccaaggacaaagacggtgagctgtgcaaaaccggcaacgcctacctcaccgccgaactgagcacccccgacgggagcgtggcagacggggagatcctggacaacaagaacggcacctatgagtttttgtacactgtccagaaggaaggggactttaccctgtctctgagactctatgaccagcacatccgaggcagcccgtttaagctgaaagtgatccgatccgctgatgtgtctcccaccacagaaggcgtgaagaggcgcgttaagtccccggggagcggccacgtcaagcagaaagctgtgaaaagacccgcaagcatgtacagcactggaaaacgaaaagagaatcccatcgaagacgatttgatctttcgagtgggtaccaaaggaagaaataaaggagagtttacaaatcttcagggggtagctgcatctacaaatggaaagatattaattgcagacagtaacaaccaatgtgtgcagatattttccaatgatggccagttcaaaagtcgttttggcatacggggacgctctccggggcagctgcagcggcccacaggagtggctgtacatcccagtggggacataatcattgccgattatgataataaatgggtcagcattttctcctccgatgggaaatttaagacaaaaattggatcaggaaagctgatgggacccaaaggagtttctgtggaccgcaatgggcacattattgttgtggacaacaaggcgtgctgcgtgtttatcttccagccaaacgggaaaatagtcaccaggtttggtagccgaggaaatggggacaggcagtttgcaggtccccattttgcagctgtaaatagcaataatgagattattattacagatttccataatcattctgtcaaggtgtttaatcaggaaggagaattcatgttgaagtttggctcaaatggagaaggaaatgggcagtttaatgctccaacaggtgtagcagtggattcaaatggaaacatcattgtggccgactggggaaacagcaggatccaggtttttgatgggagtggatcatttttgtcctacattaacacatctgctgacccactctatggcccccaaggcctggccctaacttcagatggtcatgttgtggttgcagactctggaaatcactgtttcaaagtctatcgatacttacagtaatggtgggcaggtggatacccgcttccatggtcttgcactataaactggaatggatttctcaatgcgggaccagattatgactagagtttttatgccagaaggaatcattggtgaactttccaaggttatttctgaatgtaacaatttccttaaaaatgacttatccaatttctgtatttcacctttagggttaaaaaaaactcttctactgaatctataaaaactgcagttttacatctgtgaactatggcttaagggacaggatttatgtagctaaactaattttgcaaatcaaacagacacttaaaaaaactagcatatgtaaaggtattcgttaatcctgtgaatggtagcttttgcacagaacttccaaaagcaaaacaaaaacaaaatctattgtagttatatacttcatttaacctaggtcacaagacccagggaatcttctaacctcacttttacagtaggtattactcttgtgacatttttttggttatcaacaactaaatataaattactttggaaaaagtaaggctgtcttgcaaaatgatcccagctctgattagcagccctctggagttcagaacttaagtatcagtgcaaatttctcaacctttctgggttagacaaagatccttttttgtgtgttcttttcaccacccctttggctcaccttgtatcagcaaacaaagtacttcttcagggaaacctgaaatttctaatgccttgaaaagcatattacaaaagtaatgctaccttttgggaaacaaactgccccgttaactccagatcattgcactggaatgtaatcaagaaagttagtcatgttttatgtaccatgttttcacacgtgtctcttctcttcgacttcctgaaagcgaaagctttacctcctgcaaatgtcagcacatgtagtaggacaccagtatcctaggacagagagccataagtagccctttggaggactgatggtgtcaaccaaaggcatgtgattgattaatgattcccccttagaaagcaagtgttaccaaagttgtgttatcttgaaagcattacaggtaagggcatgttatggttatttatcattgtttaatgaatagtagaggtgtcaagggactatgtatacatgattagggtaagatagaatgtattatatatatatatatatacacacacacatatatatagctgaatctttggtgtattgaaataggcagcactctgaaagacagaagcttcgtccagccactcttcagcacattcctttactaagcagtttaaagccgtcctagtggagcaagccctaaagcagatttaatttttgccattttccaagaatgacggtggtggcttttagtcagaaaatggccttctgtgctttcaaaaaaaaaacaaaaaaaaaaccacacacacacataaaaaacccaacaggtcaaaataaaagttgaacttgagttacatttaatttaaatataaatgcattttgagaaatgttaagaacaatttagtcaatcgttcatctgtcattggtactgtaaaataagctgtggtctatttccactgtttaattttctactcagttctaccaaataggatgtcatgtttgacatttttgatagtgactttggggtcttcttcactgaaagcaccttagaactgtactataagaaaacatttcccctatgtataattatatgaatgtgatgtttattgcttattaatttataattcagtcattctctatataggacttcttaaaatttagaagggaaatctagctacttcaaattgtctgttaaatttattatgcccaaatcaacctctgaaaaaaggtttttccaggaagatttacatttaggtttaatatttttttagttaggtagagttttaaaaaatacttgagcctgtccgtgataaagctataaaattcaataactttttagaatgttaaatgaagacactgtttcctaacatcagtgagatacatctttgaatttaaacattcatatttactgagtacctactaggtaccaagtactcttttaggcactggaaatacagtgatggacaaaacaggtaaaaaatcgctgccccctcagagctgacattctggggtgggaatttcattttgccacgtactaacgttctgcacaaaagacaggctagactcttgtctagattgtttaaaagaaacttttcaaattggttacattaattttagtttattttcacaagtaaaaatggctttttatttagattctttctgtcccaggctgttgatcttaaaactagttgatttaaagagtttttttgcacaacatttcaattatatttgtgaacttagaaattaacttacaatctaaccagccatcatatcatatcctatcaggctagatatctcaatagtagactgaatacaaagctaattttttttacatgtcaatattggcacaaactggaatgaaagaatagtttgattcagacctgctccactatgtgttgctaaaacacatgctatgagcactccaggaaacactatattttttccaaaaaatatgtgattatatatgttaaagtatagataacatttcacacttggatacatatgtgcatttactgtatttcttggtaagcatatttttgggggaaagtgctgctgatatgatacaagtagacaaaatttaaatgaaattttgtcacattctatggaaaatggtttctggtaaactgagaaggatattaaaataagtggcttttttctgggctaccattattgtttgatttctctttgtcaagtgtatagaacctgtcatacattcatgataagtagcactgaaaaattactcattcaaatttcccctgggcacgtaaggcaaaatattgccggttgggatttcaaggtcagtgacgacgcatttcctcccagtacagaccccccagccccccttgctggacatggggaggcagagagtcacttgaccatccagaaatacatgactacaagtcctttatgactgtttgccattttttttaatggtacttagtattttgatcaaactttagtctccagaactaaacaagtccctaagtttccttattttaatttactgtgactagatttgaagcaaataaatactccagatccatgcagctagaacacacttgcttccactactaaatatacagggtatgtcctaacatggagttaactggaatagcagtacactagcaagtatctgtgaatccttagcactgacgggttaacagaaatgctttggtaatacctacttagttaattggaggaagtagtaaataaacattaggtaatctgcagattacttcaaatgggaaaaatctttttgtagactctatagtaccctctctattcactagcttctgaaaagggaggagtatttttagtttgacaatttaataatttaaaaacaagacatctccaggtaggaaaaaatgaaagctatttcatgcaaacattatctaatttagcttaaaagtgaaagtggtaatactgttggtttctgtaaatgttgcagggttttaaactttataattactttaatatttttgataactagaaatctagtattgccataaaggaaactaagtgcccatcaaagatttgtttggtataaataaagaattatttgttttgttttcaatgacagtaagctacaaatcatgatgcttaaaaactttctaaagatgaattgtgtggcagtgattggtctgtttgtggagaatgtatgaaagctattaatattctagaatagattaataaattggctatgttgttccaatgaatgtacagcacttccattaacttttgaaagcaacacagccttaaatcatgtttgttttggaatgggatgtctgcaccaagggggtctggaaaaatcttaaacgtcgcaattttgattaagctttttaataagggttaggggggtttaatgggacatta

SEQ ID NO: 457971 - DNA, 2642 bp, Homo sapiens
aattcggcactagggcttgatgactataatgggcccagttgtctgcgggctgcggggagctaagtccccagattggaggaggctggctctggtcttcgatgcacaggagtggccgttatggaacgccagcagcgtgcagggtcaaagacagccggccccccatgtcagtggtctaggatggccagtgaaggcaccaacatcccaagtcctgtggtgcgccagattgacaagcagtttctgatttgcagtatatgcctggaacggtacaagaatcccaaggttctcccctgtctgcacactttctgcgagaggtgcctgcagaactacattcctgcccacagtttaaccctctcctgcccagtgtgccgccagacctccatcctgcccgagaaaggggtggccgcgctccagaacaatttcttcatcacaaacctgatggacgtgctgcagcgaactccaggcagcaacgctgaggagtcttccatcctggagacagtcactgctgtggctgcgggaaagcctctctcttgcccaaaccacgatgggaatgtgatggaattttactgccagtcctgtgagactgccatgtgtcgggagtgcacggagggggagcacgcagagcaccccacagttccactcaaggatgtggtggaacagcacaaggcctcgctccaggtccagctggatgctgtcaacaaaaggctcccagaaatagattctgctcttcagttcatctctgaaatcattcatcagttaaccaaccaaaaggccagcatcgtggatgacattcattccacctttgatgagctccagaagactttaaatgtgcgcaagagtgtgctgcttatggaattggaggtcaactatggcctcaaacacaaagtcctccagtcgcagctggatactctgctccaggggcaggagagcattaagagctgcagcaacttcacagcgcaggccctcaaccatggcacggagaccgaggtcctactggtgaagaagcagatgagcgagaagctgaacgagctggccgaccaggacttccccttgcacccgcgggagaacgaccagctggatttcatcgtggaaaccgaggggctgaagaagtccatccacaacctcgggacgatcttaaccaccaacgccgttgcctcagagacagtggccacgggcgaggggctgcggcagaccatcatcgggcagcccatgtccgtcaccatcaccaccaaggacaaagacggtgagctgtgcaaaaccggcaacgcctacctcaccgccgaactgagcacccccgacgggagcgtggcagacggggagatcctggacaacaagaacggcacctatgagtttttgtacactgtccagaaggaaggggactttaccctgtctctgagactctatgaccagcacatccgaggcagcccgtttaagctgaaagtgatccgatccgctgatgtgtctcccaccacagaaggcgtgaagaggcgcgttaagtccccggggagcggccacgtcaagcagaaagctgtgaaaagacccgcaagcatgtacagcactggaaaacgaaaagagaatcccatcgaagacgatttgatctttcgagtgggtaccaaaggaagaaataaaggagagtttacaaatcttcagggggtagctgcatctacaaatggaaagatattaattgcagacagtaacaaccaatgtgtgcagatattttccaatgatggccagttcaaaagtcgttttggcatacggggacgctctccggggcagctgcagcggcccacaggagtggctgtacatcccagtggggacataatcattgccgattatgataataaatgggtcagcattttctcctccgatgggaaatttaagacaaaaattggatcaggaaagctgatgggacccaaaggagtttctgtggaccgcaatgggcacattattgttgtggacaacaaggcgtgctgcgtgtttatcttccagccaaacgggaaaatagtcaccaggtttggtagccgaggaaatggggacaggcagtttgcaggtccccattttgcagctgtaaatagcaataatgagattattattacagatttccataatcattctgtcaaggtgtttaatcaggaaggagaattcatgttgaagtttggctcaaatggagaaggaaatgggcagtttaatgctccaacaggtgtagcagtggattcaaatggaaacatcattgtggccgactggggaaacagcaggatccaggtttttgatgggagtggatcatttttgtcctacattaacacatctgctgacccactctatggcccccaaggcctggccctaacttcagatggtcatgttgtggttgcagactctggaaatcactattgatactgatatattctcgtcatttgttcttttatgaatcaaaatgttgactgcctatttaaagaaaagaatgaacgctgtgcatcaaagtgtttgtatgttcgtagctacatacgtaccacagtattttggatgctttagtctacaatgaaactttcaattaattctgtcttgaaacataggagaaacaggattcatgtgtatctctttaccatgcacaaaatctcaaatcattataataaagcttgttttctcca

SEQ ID NO: 457972 - DNA, 2465 bp, Homo sapiens
aattcggcactagggcttgatgactataatgggcccagttgtctgcgggctgcggggagctaagtccccagattggaggaggctggctctggtcttcgatgcacaggagtggccgttatggaacgccagcagcgtgcagggtcaaagacagccggccccccatgtcagtggtctaggatggccagtgaaggcaccaacatcccaagtcctgtggtgcgccagattgacaagcagtttctgatttgcagtatatgcctggaacggtacaagaatcccaaggttctcccctgtctgcacactttctgcgagaggtgcctgcagaactacattcctgcccacagtttaaccctctcctgcccagtgtgccgccagacctccatcctgcccgagaaaggggtggccgcgctccagaacaatttcttcatcacaaacctgatggacgtgctgcagcgaactccaggcagcaacgctgaggagtcttccatcctggagacagtcactgctgtggctgcgggaaagcctctctcttgcccaaaccacgatgggaatgtgatggaattttactgccagtcctgtgagactgccatgtgtcgggagtgcacggagggggagcacgcagagcaccccacagttccactcaaggatgtggtggaacagcacaaggcctcgctccaggtccagctggatgctgtcaacaaaaggctcccagaaatagattctgctcttcagttcatctctgaaatcattcatcagttaaccaaccaaaaggccagcatcgtggatgacattcattccacctttgatgagctccagaagactttaaatgtgcgcaagagtgtgctgcttatggaattggaggtcaactatggcctcaaacacaaagtcctccagtcgcagctggatactctgctccaggggcaggagagcattaagagctgcagcaacttcacagcgcaggccctcaaccatggcacggagaccgaggtcctactggtgaagaagcagatgagcgagaagctgaacgagctggccgaccaggacttccccttgcacccgcgggagaacgaccagctggatttcatcgtggaaaccgaggggctgaagaagtccatccacaacctcgggacgatcttaaccaccaacgccgttgcctcagagacagtggccacgggcgaggggctgcggcagaccatcatcgggcagcccatgtccgtcaccatcaccaccaaggacaaagacggtgagctgtgcaaaaccggcaacgcctacctcaccgccgaactgagcacccccgacgggagcgtggcagacggggagatcctggacaacaagaacggcacctatgagtttttgtacactgtccagaaggaaggggactttaccctgtctctgagactctatgaccagcacatccgaggcagcccgtttaagctgaaagtgatccgatccgctgatgtgtctcccaccacagaaggcgtgaagaggcgcgttaagtccccggggagcggccacgtcaagcagaaagctgtgaaaagacccgcaagcatgtacagcactggaaaacgaaaagagaatcccatcgaagacgatttgatctttcgagtgggtaccaaaggaagaaataaaggagagtttacaaatcttcagggggtagctgcatctacaaatggaaagatattaattgcagacagtaacaaccaatgtgtgcagatattttccaatgatggccagttcaaaagtcgttttggcatacggggacgctctccggggcagctgcagcggcccacaggagtggctgtacatcccagtggggacataatcattgccgattatgataataaatgggtcagcattttctcctccgatgggaaatttaagacaaaaattggatcaggaaagctgatgggacccaaaggagtttctgtggaccgcaatgggcacattattgttgtggacaacaaggcgtgctgcgtgtttatcttccagccaaacgggaaaatagtcaccaggtttggtagccgaggaaatggggacaggcagtttgcaggtccccattttgcagctgtaaatagcaataatgagattattattacagatttccataatcattctgtcaaggtactacaagcacatgagttgttgttaacttttaactgcttttatggagaaattggtctgcgagaaaataatgcaatacttacatatggcaccaaagggagttaaccagcagagtagactttgttctgctcaaagatgccggttttaacttggacttacagaccttggaaagtcaggaaattgaataaaatgtggtggcaataagttgcttaatttgaaactggtgcaaatgaagaggacttgaaaattaaattttaaaaagcaattcgttgaacttagaggcagaactttctgaagcttaatgttttgtggctagtcaataaattaaaatcactttttcaattttc

SEQ ID NO: 457973 - DNA, 1469 bp, Homo sapiens
aattcggcactagggcttgatgactataatgggcccagttgtctgcgggctgcggggagctaagtccccagattggaggaggctggctctggtcttcgatgcacaggagtggccgttatggaacgccagcagcgtgcagggtcaaagacagccggccccccatgtcagtggtctaggatggccagtgaaggcaccaacatcccaagtcctgtggtgcgccagattgacaagcagtttctgatttgcagtatatgcctggaacggtacaagaatcccaaggttctcccctgtctgcacactttctgcgagaggtgcctgcagaactacattcctgcccacagtttaaccctctcctgcccagtgtgccgccagacctccatcctgcccgagaaaggggtggccgcgctccagaacaatttcttcatcacaaacctgatggacgtgctgcagcgaactccaggcagcaacgctgaggagtcttccatcctggagacagtcactgctgtggctgcgggaaagcctctctcttgcccaaaccacgatgggaatgtgatggaattttactgccagtcctgtgagactgccatgtgtcgggagtgcacggagggggagcacgcagagcaccccacagttccactcaaggatgtggtggaacagcacaaggcctcgctccaggtccagctggatgctgtcaacaaaaggctcccagaaatagattctgctcttcagttcatctctgaaatcattcatcagttaaccaaccaaaaggccagcatcgtggatgacattcattccacctttgatgagctccagaagactttaaatgtgcgcaagagtgtgctgcttatggaattggaggtcaactatggcctcaaacacaaagtcctccagtcgcagctggatactctgctccaggggcaggagagcattaagagctgcagcaacttcacagcgcaggccctcaaccatggcacggagaccgaggtcctactggtgaagaagcagatgagcgagaagctgaacgagctggccgaccaggacttccccttgcacccgcgggagaacgaccagctggatttcatcgtggaaaccgaggggctgaagaagtccatccacaacctcgggacgatcttaaccaccaacgccgttgcctcagagacagtggccacgggcgaggggctgcactgcatgcagcgtgcagggtcaaagacagccggccccccatgtcagtggtctaggatggccagtgaaggcaccaacatcccaagtcctgtggtgcgccagattgacaagcagtttctgatttgcagtatatgcctggaacggtacaagaatcccaaggttctcccctgtctgcacactttctgcgagaggtgcctgcagaactacattcctgcccacagtttaaccctctcctgcccagcctcgtgccgcctcgtgccggcacgaggctgatgttggagcggccg

SEQ ID NO: 457974 - DNA, 712 bp, Homo sapiens
cattactctattgatacaatattgtgcatgctagtgttgtatttctatacagtagcttgaaattgattaacttatactgtaggagtaatggaggagtaatcatttcactggagagacagtatcatgattactcctccattactctattgatacaatattgtgcatgctagtgttgtatttctatacagtagcttgaaattgattaacttatactgtaggtgttatgtattcctatgacaaaaaaaattaagtcttcaaattttttaaaggttttttttttttaatttaatttttccttttgggggtaaagtttgctctaccaaatagtgattgtaacaaattgatctgttttggatgttgctatagtgacatgcagttatatattttgtttttaaaagggggggagcaaaagaaacaccagtgttagcttaatcttaatgtctggtgtttgtcatggtgaaattataactattacagtgttggagaacaacaaatatgttctctgaatgagcctttgtgctttttgtcatgttatgcagtgaactatttttaaggtctaatcagtgattatttttccagctccgtgtttctctaaggaattatttcacacacggaccatctttagcagtttcctcagtgatggaatatcatgaatgtgagtcattatgtagctgtcgtacattgagcaaataaacttacagatctgacgcca

SEQ ID NO: 457975 - DNA, 623 bp, Homo sapiens
attgatacaatattgtgcaagctactgtatagaaatacaacactagcatgcaccaatatgtatcaatattgtgcatgctagtgttgtatttctatacagtagcttgaaattgattaacttatactgtaggtgttatgtattcctatgacaaaaaaaattaagtcttcaaattttttaaaggttttttttttttaatttaatttttccttttgggggtaaagtttgctctaccaaatagtgattgtaacaaattgatctgttttggatgttgctatagtgacatgcagttatatattttgtttttaaaagggggggagcaaaagaaacaccagtgttagcttaatcttaatgtctggtgtttgtcatggtgaaattataactattacagtgttggagaacaacaaatatgttctctgaatgagcctttgtgctttttgtcatgttatgcagtgaactatttttaaggtctaatcagtgattatttttccagctccgtgtttctctaaggaattatttcacacacggaccatctttagcagtttcctcagtgatggaatatcatgaatgtgagtcattatgtagctgtcgtacattgagcaaataaacttacagatctgacgcca

SEQ ID NO: 457976 - DNA, 242 bp, Homo sapiens
  misc_feature (19)..(19): n is a, c, g, or t
  misc_feature (23)..(23): n is a, c, g, or t
tctggtgttgtcatggtgnaatnaccccccccctccccccgaatattatcttatatacatgttatgcagtgaactatttttaaggtctaatcagtgattatttttccagctccgtgtttctctaaggaattatttcacacacggaccatctttagcagtttcctcagtgatggaatatcatgaatgtgagtcattatgtagctgtcgtacattgagcaaataaacttacagatctgacgcca

SEQ ID NO: 457977 - DNA, 3767 bp, Homo sapiens
gcagggggttgtccgtcagtggcacgcacagcagcgcgcagccgcctcgcgcccggtcccgcggtcgcagctccagccgcctcctccgcgcagccgccgcctcagctgctcgctctgtgggtcggtcctctccggcacttgggctccagtcgcgccctccaagcccttcaggccgccccagtgtcctcctccttctccggccagacccagccccgcgaagatggtggaccgcgagcaactggtgcagaaagcccggctggccgagcaggcggagcgctacgacgacatggccgcggccatgaagaacgtgacagagctgaatgagccactgtcgaatgaggaacgaaaccttctgtctgtggcctacaagaacgttgtgggggcacgccgctcttcctggagggtcatcagtagcattgagcagaagacatctgcagacggcaatgagaagaagattgagatggtccgtgcgtaccgggagaagatagagaaggagttggaggctgtgtgccaggatgtgctgagcctgctggataactacctgatcaagaattgcagcgagacccagtacgagagcaaagtgttctacctgaagatgaaaggggactactaccgctacctggctgaagtggccaccggagagaaaagggcgacggtggtggagtcctccgagaaggcctacagcgaagcccacgagatcagcaaagagcacatgcagcccacccaccccatccgattaggcctggctcttaactactccgtcttctactatgagatccagaacgccccagagcaagcgtgccacttggccaagaccgcgttcgacgacgccatcgccgagcttgacaccctcaacgaggactcctacaaggactccacgctcatcatgcagctcctccgcgacaacctcacgctctggacgagcgaccagcaggacgacgatggcggcgaaggcaacaattaaggccccaggggaactggcagcgcacgcggatgctactactgcagtctttatttttttcccatgagttgggggtcgggtgggggagggaaagggagggatgaccttcccagggagaaacccacgacctgtcctgtctttgatcgcctctttgacatttttgccaaaataccactagtggaaagtcaggctagctgtgctggtattggaatagcagcctcacactggcgtctggactgttctgtagattcatgcaagtggagctgtctgtctctaatttaacttattgctagataatagggttttcagatgaaaagaaaacttaaagaggaatggccctcattcagtaagttctgtggttccagtaaggatttttatgtacatacgctctcgtctctcgttttgggtactttctatctcatctgtctcggctctgcatgttttccagggtgtagcctacagacatggaacagtgtaaatcccagactgacagacttagaacctgaggtctcattcatccttatggtttaggccttgccagttttccgaagtctctgattagttgacagtattaacactaaattgcagtttacagtatttctacattacagccatatgtaacatcaagccatcgattgtgtacttttcctttgctagttgtttgggctttaacatccttattcagccttatccaggttggttttgctgttgatcggtctcctaggctaaatgagaatgaaagcgacttcaggtttttggttcataggtgctcggcaggtggctgtgggattttttttttttgggtccttctttcctcttaacgtaaatccaccaccaaaattattaatcctcttgagagaaacgtgaaacgccacaaaaatagagaaaattcaggtctgtatgtcatggatcgtgttggtattttcagagaacatcccgcttctgaagctgctgcagctccctcctcagggatcacactgccgtcacccactctgcactggggcgtttcctactgcgcctcgtgctggcggacgcagctgggtgcagaagctgtggggtcggagaggcgtttggagaaggtctgtggtgcagtgtgtgaaaattcaggtgctagaagcctactggtagaaaaacccaaaaggaagagctatatccttaaccattctgtccaatttcgggagccttgtcagtgtgtcagtttttcctccccgaagacactccttccccaagtaattgtaggaagataaaaaaactgttaccagataacaaacactgaactcctatttgaccagaactttttcctctcgagatagttttttctttttaatgaaaaaagcataggaattggagattggcttgtctcacgcagccagtgcacatttggaattgacggaaacaacgttgctatttccacccatttgttttcggcagccttaaggccctcattctcatttcgggtgaatctgtctatctgtgaacgtggcccgcatgtgcattcttttttttatatatataaagtcagtgacgaggaactcccgagacgtgtaatgacaccacacttgttttctttgtttctttgttttatttaggcaagaagaggtgtgagtaattgaggaaaaactgacagatgcttttgctaataccaaaattgagcttacaattaggaactgagtatgtgtaacaggatacaggtgacagtgaagatagaagaaccacgatgaccacagactcaatgtgctctgtaacatcgcacagtttacccagcatgactttccttaggaggccccctcctcacgctagagtaaaagtcccagttaagtgaagcctaccagaagaactagtagaagaagctttgccgcttttgtgcctctcacaggcgcctaaagtcattgccatgggaggaagacgatttgggggggggggggggggggcagggtaggtggggctttccctaatttatcttcatgtccagtgagcagtgttgcgtttttccttgtagcatttggaaatgatttactggaattacaaaacctatttttcctttaaatttcagctttggctctggctgctttttagaataatgcaagataaaaatcacacctgagggctgaaaacggagagggaatgggagacttgatatttaagcagcttgaatggtttttcttttctttatttttaaagaaatgcacttgcctatgatactgtctctccagtgaaatgattactcctccattactctattgatacaatattgtgcatgctagtgttgtatttctatacagtagcttgaaattgattaacttatactgtaggtgttatgtattcctatgacaaaaaaaattaagtcttcaaattttttaaaggttttttttttttaatttaatttttccttttgggggtaaagtttgctctaccaaatagtgattgtaacaaattgatctgttttggatgttgctatagtgacatgcagttatatattttgtttttaaaagggggggagcaaaagaaacaccagtgttagcttaatcttaatgtctggtgtttgtcatggtgaaattataactattacagtgttggagaacaacaaatatgttctctgaatgagcctttgtgctttttgtcatgttatgcagtgaactatttttaaggtctaatcagtgattatttttccagctccgtgtttctctaaggaattatttcacacacggaccatctttagcagtttcctcagtgatggaatatcatgaatgtgagtcattatgtagctgtcgtacattgagcaaataaacttacagatctgacgcca

SEQ ID NO: 457978 - DNA, 4041 bp, Homo sapiens
gcagggggttgtccgtcagtggcacgcacagcagcgcgcagccgcctcgcgcccggtcccgcggtcgcagctccagccgcctcctccgcgcagccgccgcctcagctgctcgctctgtgggtcggtcctctccggcacttgggctccagtcgcgccctccaagcccttcaggccgccccagtgtcctcctccttctccggccagacccagccccgcgaagatggtggaccgcgagcaactggtgcagaaagcccggctggccgagcaggcggagcgctacgacgacatggccgcggccatgaagaacgtgacagagctgaatgagccactgtcgaatgaggaacgaaaccttctgtctgtggcctacaagaacgttgtgggggcacgccgctcttcctggagggtcatcagtagcattgagcagaagacatctgcagacggcaatgagaagaagattgagatggtccgtgcgtaccgggagaagatagagaaggagttggaggctgtgtgccaggatgtgctgagcctgctggataactacctgatcaagaattgcagcgagacccagtacgagagcaaagtgttctacctgaagatgaaaggggactactaccgctacctggctgaagtggccaccggagagaaaagggcgacggtggtggagtcctccgagaaggcctacagcgaagcccacgagatcagcaaagagcacatgcagcccacccaccccatccgattaggcctggctcttaactactccgtcttctactatgagatccagaacgccccagagcaagcgtgccacttggccaagaccgcgttcgacgacgccatcgccgagcttgacaccctcaacgaggactcctacaaggactccacgctcatcatgcagctcctccgcgacaacctcacgctctggacgagcgaccagcaggacgacgatggcggcgaaggcaacaattaaggccccaggggaactggcagcgcacgcggatgctactactgcagtctttatttttttcccatgagttgggggtcgggtgggggagggaaagggagggatgaccttcccagggagaaacccacgacctgtcctgtctttgatcgcctctttgacatttttgccaaaataccactagtggaaagtcaggctagctgtgctggtattggaatagcagcctcacactggcgtctggactgttctgtagattcatgcaagtggagctgtctgtctctaatttaacttattgctagataatagggttttcagatgaaaagaaaacttaaagaggaatggccctcattcagtaagttctgtggttccagtaaggatttttatgtacatacgctctcgtctctcgttttgggtactttctatctcatctgtctcggctctgcatgttttccagggtgtagcctacagacatggaacagtgtaaatcccagactgacagacttagaacctgaggtctcattcatccttatggtttaggccttgccagttttccgaagtctctgattagttgacagtattaacactaaattgcagtttacagtatttctacattacagccatatgtaacatcaagccatcgattgtgtacttttcctttgctagttgtttgggctttaacatccttattcagccttatccaggttggttttgctgttgatcggtctcctaggctaaatgagaatgaaagcgacttcaggtttttggttcataggtgctcggcaggtggctgtgggattttttttttttgggtccttctttcctcttaacgtaaatccaccaccaaaattattaatcctcttgagagaaacgtgaaacgccacaaaaatagagaaaattcaggtctgtatgtcatggatcgtgttggtattttcagagaacatcccgcttctgaagctgctgcagctccctcctcagggatcacactgccgtcacccactctgcactggggcgtttcctactgcgcctcgtgctggcggacgcagctgggtgcagaagctgtggggtcggagaggcgtttggagaaggtctgtggtgcagtgtgtgaaaattcaggtgctagaagcctactggtagaaaaacccaaaaggaagagctatatccttaaccattctgtccaatttcgggagccttgtcagtgtgtcagtttttcctccccgaagacactccttccccaagtaattgtaggaagataaaaaaactgttaccagataacaaacactgaactcctatttgaccagaactttttcctctcgagatagttttttctttttaatgaaaaaagcataggaattggagattggcttgtctcacgcagccagtgcacatttggaattgacggaaacaacgttgctatttccacccatttgttttcggcagccttaaggccctcattctcatttcgggtgaatctgtctatctgtgaacgtggcccgcatgtgcattcttttttttatatatataaagtcagtgacgaggaactcccgagacgtgtaatgacaccacacttgttttctttgtttctttgttttatttaggcaagaagaggtgtgagtaattgaggaaaaactgacagatgcttttgctaataccaaaattgagcttacaattaggaactgagtatgtgtaacaggatacaggtgacagtgaagatagaagaaccacgatgaccacagactcaatgtgctctgtaacatcgcacagtttacccagcatgactttccttaggaggccccctcctcacgctagagtaaaagtcccagttaagtgaagcctaccagaagaactagtagaagaagctttgccgcttttgtgcctctcacaggcgcctaaagtcattgccatgggaggaagacgatttgggggggggggggggggggcagggtaggtggggctttccctaatttatcttcatgtccagtgagcagtgttgcgtttttccttgtagcatttggaaatgatttactggaattacaaaacctatttttcctttaaatttcagctttggctctggctgctttttagaataatgcaagataaaaatcacacctgagggctgaaaacggagagggaatgggagacttgatatttaagcagcttgaatggtttttcttttctttatttttaaagaaatgcacttgcctatgatactgtctctccagtgaaatgattactcctccattactctattgatacaatattgtgcatgctagtgttgtatttctatacagtagcttgaaattgattaacttatactgtaggtgttatgtattcctatgacaaaaaaaattaagtcttcaaattttttaaaggttttttttttttaatttaatttttccttttgggggtaaagtttgctctaccaaatagtgattgtaacaaattgatctgttttggatgttgctatagtgacatgcagttatatattttgtttttaaaagggggggagcaaaagaaacaccagtgttagcttaatcttaatgtctggtgtttgtcatggtgaaattataactattacagtgttggagaacaacaaatatgttctctgaatgagcctttgtgctttttgtcatgttatgcagtgaactatttttaaggtctaatcagtgattatttttccagctccgtgtttctctaaggaattatttcacacacggaccatctttagcagtttcctcagtgatggaatatcatgaatgtgagtcattatgtagctgtcgtacattgagcaaataaacttacagatctgacgccaaaaaaaaaacacaacaacacagaacaaaaaaacaaaaccttgtgcggggccgcccctcgaccccgcagaaaaaggctttttaaacaccaatctgctgggggggggggggccccagtgtgtgattatgtgaccctgggccccacgcgggtcccagaagaacaccggcgcgacacaccggcttggcttccctcccaataaaaaacccgggcggcaccggcgtctgaacaactcaagtgggtcgaggcgtccggcctctccgcgcacagacgaaaat

SEQ ID NO: 457979 - DNA, 4040 bp, Homo sapiens
gcagggggttgtccgtcagtggcacgcacagcagcgcgcagccgcctcgcgcccggtcccgcggtcgcagctccagccgcctcctccgcgcagccgccgcctcagctgctcgctctgtgggtcggtcctctccggcacttgggctccagtcgcgccctccaagcccttcaggccgccccagtgtcctcctccttctccggccagacccagccccgcgaagatggtggaccgcgagcaactggtgcagaaagcccggctggccgagcaggcggagcgctacgacgacatggccgcggccatgaagaacgtgacagagctgaatgagccactgtcgaatgaggaacgaaaccttctgtctgtggcctacaagaacgttgtgggggcacgccgctcttcctggagggtcatcagtagcattgagcagaagacatctgcagacggcaatgagaagaagattgagatggtccgtgcgtaccgggagaagatagagaaggagttggaggctgtgtgccaggatgtgctgagcctgctggataactacctgatcaagaattgcagcgagacccagtacgagagcaaagtgttctacctgaagatgaaaggggactactaccgctacctggctgaagtggccaccggagagaaaagggcgacggtggtggagtcctccgagaaggcctacagcgaagcccacgagatcagcaaagagcacatgcagcccacccaccccatccgattaggcctggctcttaactactccgtcttctactatgagatccagaacgccccagagcaagcgtgccacttggccaagaccgcgttcgacgacgccatcgccgagcttgacaccctcaacgaggactcctacaaggactccacgctcatcatgcagctcctccgcgacaacctcacgctctggacgagcgaccagcaggacgacgatggcggcgaaggcaacaattaaggccccaggggaactggcagcgcacgcggatgctactactgcagtctttatttttttcccatgagttgggggtcgggtgggggagggaaagggagggatgaccttcccagggagaaacccacgacctgtcctgtctttgatcgcctctttgacatttttgccaaaataccactagtggaaagtcaggctagctgtgctggtattggaatagcagcctcacactggcgtctggactgttctgtagattcatgcaagtggagctgtctgtctctaatttaacttattgctagataatagggttttcagatgaaaagaaaacttaaagaggaatggccctcattcagtaagttctgtggttccagtaaggatttttatgtacatacgctctcgtctctcgttttgggtactttctatctcatctgtctcggctctgcatgttttccagggtgtagcctacagacatggaacagtgtaaatcccagactgacagacttagaacctgaggtctcattcatccttatggtttaggccttgccagttttccgaagtctctgattagttgacagtattaacactaaattgcagtttacagtatttctacattacagccatatgtaacatcaagccatcgattgtgtacttttcctttgctagttgtttgggctttaacatccttattcagccttatccaggttggttttgctgttgatcggtctcctaggctaaatgagaatgaaagcgacttcaggtttttggttcataggtgctcggcaggtggctgtgggattttttttttttgggtccttctttcctcttaacgtaaatccaccaccaaaattattaatcctcttgagagaaacgtgaaacgccacaaaaatagagaaaattcaggtctgtatgtcatggatcgtgttggtattttcagagaacatcccgcttctgaagctgctgcagctccctcctcagggatcacactgccgtcacccactctgcactggggcgtttcctactgcgcctcgtgctggcggacgcagctgggtgcagaagctgtggggtcggagaggcgtttggagaaggtctgtggtgcagtgtgtgaaaattcaggtgctagaagcctactggtagaaaaacccaaaaggaagagctatatccttaaccattctgtccaatttcgggagccttgtcagtgtgtcagtttttcctccccgaagacactccttccccaagtaattgtaggaagataaaaaaactgttaccagataacaaacactgaactcctatttgaccagaactttttcctctcgagatagttttttctttttaatgaaaaaagcataggaattggagattggcttgtctcacgcagccagtgcacatttggaattgacggaaacaacgttgctatttccacccatttgttttcggcagccttaaggccctcattctcatttcgggtgaatctgtctatctgtgaacgtggcccgcatgtgcattcttttttttatatatataaagtcagtgacgaggaactcccgagacgtgtaatgacaccacacttgttttctttgtttctttgttttatttaggcaagaagaggtgtgagtaattgaggaaaaactgacagatgcttttgctaataccaaaattgagcttacaattaggaactgagtatgtgtaacaggatacaggtgacagtgaagatagaagaaccacgatgaccacagactcaatgtgctctgtaacatcgcacagtttacccagcatgactttccttaggaggccccctcctcacgctagagtaaaagtcccagttaagtgaagcctaccagaagaactagtagaagaagctttgccgcttttgtgcctctcacaggcgcctaaagtcattgccatgggaggaagacgatttgggggggggggggggggggcagggtaggtggggctttccctaatttatcttcatgtccagtgagcagtgttgcgtttttccttgtagcatttggaaatgatttactggaattacaaaacctatttttcctttaaatttcagctttggctctggctgctttttagaataatgcaagataaaaatcacacctgagggctgaaaacggagagggaatgggagacttgatatttaagcagcttgaatggtttttcttttctttatttttaaagaaatgcacttgcctatgatactgtctctccagtgaaatgattactcctccattactctattgatacaatattgtgcatgctagtgttgtatttctatacagtagcttgaaattgattaacttatactgtaggtgttatgtattcctatgacaaaaaaaattaagtcttcaaattttttaaaggttttttttttttaatttaatttttccttttgggggtaaagtttgctctaccaaatagtgattgtaacaaattgatctgttttggatgttgctatagtgacatgcagttatatattttgtttttaaaagggggggagcaaaagaaacaccagtgttagcttaatcttaatgtctggtgtttgtcatggtgaaattataactattacagtgttggagaacaacaaatatgttctctgaatgagcctttgtgctttttgtcatgttatgcagtgaactatttttaaggtctaatcagtgattatttttccagctccgtgtttctctaaggaattatttcacacacggaccatctttagcagtttcctcagtgatggaatatcatgaatgtgagtcattatgtagctgtcgtacattgagcaaataaacttacagatctgacgccactccgatctcgcaacacacagtccagcaaaacacaaaaaaaagggggggcgcccaaaaacccgaggggggccaccttctgcacacccaattgttgtacaagggccccaagagagcggcataataaacacagcagggcggggtaacaaccgcggtgggaaacgacgatcggctggtagcagacccacccggggtggtagtgagacacaccacaaacggccggagacaaagcttgtgtcaaccaactgtgagagctgtaatcaacagactatcag

SEQ ID NO: 457980 - DNA, 3884 bp, Homo sapiens
  misc_feature (3783)..(3783): n is a, c, g, or t
  misc_feature (3793)..(3793): n is a, c, g, or t
  misc_feature (3805)..(3805): n is a, c, g, or t
  misc_feature (3839)..(3839): n is a, c, g, or t
gcagggggttgtccgtcagtggcacgcacagcagcgcgcagccgcctcgcgcccggtcccgcggtcgcagctccagccgcctcctccgcgcagccgccgcctcagctgctcgctctgtgggtcggtcctctccggcacttgggctccagtcgcgccctccaagcccttcaggccgccccagtgtcctcctccttctccggccagacccagccccgcgaagatggtggaccgcgagcaactggtgcagaaagcccggctggccgagcaggcggagcgctacgacgacatggccgcggccatgaagaacgtgacagagctgaatgagccactgtcgaatgaggaacgaaaccttctgtctgtggcctacaagaacgttgtgggggcacgccgctcttcctggagggtcatcagtagcattgagcagaagacatctgcagacggcaatgagaagaagattgagatggtccgtgcgtaccgggagaagatagagaaggagttggaggctgtgtgccaggatgtgctgagcctgctggataactacctgatcaagaattgcagcgagacccagtacgagagcaaagtgttctacctgaagatgaaaggggactactaccgctacctggctgaagtggccaccggagagaaaagggcgacggtggtggagtcctccgagaaggcctacagcgaagcccacgagatcagcaaagagcacatgcagcccacccaccccatccgattaggcctggctcttaactactccgtcttctactatgagatccagaacgccccagagcaagcgtgccacttggccaagaccgcgttcgacgacgccatcgccgagcttgacaccctcaacgaggactcctacaaggactccacgctcatcatgcagctcctccgcgacaacctcacgctctggacgagcgaccagcaggacgacgatggcggcgaaggcaacaattaaggccccaggggaactggcagcgcacgcggatgctactactgcagtctttatttttttcccatgagttgggggtcgggtgggggagggaaagggagggatgaccttcccagggagaaacccacgacctgtcctgtctttgatcgcctctttgacatttttgccaaaataccactagtggaaagtcaggctagctgtgctggtattggaatagcagcctcacactggcgtctggactgttctgtagattcatgcaagtggagctgtctgtctctaatttaacttattgctagataatagggttttcagatgaaaagaaaacttaaagaggaatggccctcattcagtaagttctgtggttccagtaaggatttttatgtacatacgctctcgtctctcgttttgggtactttctatctcatctgtctcggctctgcatgttttccagggtgtagcctacagacatggaacagtgtaaatcccagactgacagacttagaacctgaggtctcattcatccttatggtttaggccttgccagttttccgaagtctctgattagttgacagtattaacactaaattgcagtttacagtatttctacattacagccatatgtaacatcaagccatcgattgtgtacttttcctttgctagttgtttgggctttaacatccttattcagccttatccaggttggttttgctgttgatcggtctcctaggctaaatgagaatgaaagcgacttcaggtttttggttcataggtgctcggcaggtggctgtgggattttttttttttgggtccttctttcctcttaacgtaaatccaccaccaaaattattaatcctcttgagagaaacgtgaaacgccacaaaaatagagaaaattcaggtctgtatgtcatggatcgtgttggtattttcagagaacatcccgcttctgaagctgctgcagctccctcctcagggatcacactgccgtcacccactctgcactggggcgtttcctactgcgcctcgtgctggcggacgcagctgggtgcagaagctgtggggtcggagaggcgtttggagaaggtctgtggtgcagtgtgtgaaaattcaggtgctagaagcctactggtagaaaaacccaaaaggaagagctatatccttaaccattctgtccaatttcgggagccttgtcagtgtgtcagtttttcctccccgaagacactccttccccaagtaattgtaggaagataaaaaaactgttaccagataacaaacactgaactcctatttgaccagaactttttcctctcgagatagttttttctttttaatgaaaaaagcataggaattggagattggcttgtctcacgcagccagtgcacatttggaattgacggaaacaacgttgctatttccacccatttgttttcggcagccttaaggccctcattctcatttcgggtgaatctgtctatctgtgaacgtggcccgcatgtgcattcttttttttatatatataaagtcagtgacgaggaactcccgagacgtgtaatgacaccacacttgttttctttgtttctttgttttatttaggcaagaagaggtgtgagtaattgaggaaaaactgacagatgcttttgctaataccaaaattgagcttacaattaggaactgagtatgtgtaacaggatacaggtgacagtgaagatagaagaaccacgatgaccacagactcaatgtgctctgtaacatcgcacagtttacccagcatgactttccttaggaggccccctcctcacgctagagtaaaagtcccagttaagtgaagcctaccagaagaactagtagaagaagctttgccgcttttgtgcctctcacaggcgcctaaagtcattgccatgggaggaagacgatttgggggggggggggggggggcagggtaggtggggctttccctaatttatcttcatgtccagtgagcagtgttgcgtttttccttgtagcatttggaaatgatttactggaattacaaaacctatttttcctttaaatttcagctttggctctggctgctttttagaataatgcaagataaaaatcacacctgagggctgaaaacggagagggaatgggagacttgatatttaagcagcttgaatggtttttcttttctttatttttaaagaaatgcacttgcctatgatactgtctctccagtgaaatgattactcctccattactctattgatacaatattgtgcatgctagtgttgtatttctatacagtagcttgaaattgattaacttatactgtaggtgttatgtattcctatgacaaaaaaaattaagtcttcaaattttttaaaggttttttttttttaatttaatttttccttttgggggtaaagtttgctctaccaaatagtgattgtaacaaattgatctgttttggatgttgctatagtgacatgcagttatatattttgtttttaaaagggggggagcaaaagaaacaccagtgttagcttaatcttaatgtctggtgtttgtcatggtgaaattataactattacagtgttggagaacaacaaatatgttctctgaatgagcctttgtgctttttgtcatgttatgcagtgaactatttttaaggtctaatcagtgattatttttccagctccgtgtttctctaaggaattatttcacacacggaccatctttagcagtttcctcagtgatggaatatcatgaatgtgagtcattatgtagctgtcgtacattgagcaaataaacttacagatctgacgccaaataaaaaaaaataanaattaattantatttataattntattatatttaaaatatatttttatatattattntattataaattaaaaaaaaaaatggccgatttttaacacattgag

SEQ ID NO: 457981 - DNA, 3709 bp, Homo sapiens
gcagggggttgtccgtcagtggcacgcacagcagcgcgcagccgcctcgcgcccggtcccgcggtcgcagctccagccgcctcctccgcgcagccgccgcctcagctgctcgctctgtgggtcggtcctctccggcacttgggctccagtcgcgccctccaagcccttcaggccgccccagtgtcctcctccttctccggccagacccagccccgcgaagatggtggaccgcgagcaactggtgcagaaagcccggctggccgagcaggcggagcgctacgacgacatggccgcggccatgaagaacgtgacagagctgaatgagccactgtcgaatgaggaacgaaaccttctgtctgtggcctacaagaacgttgtgggggcacgccgctcttcctggagggtcatcagtagcattgagcagaagacatctgcagacggcaatgagaagaagattgagatggtccgtgcgtaccgggagaagatagagaaggagttggaggctgtgtgccaggatgtgctgagcctgctggataactacctgatcaagaattgcagcgagacccagtacgagagcaaagtgttctacctgaagatgaaaggggactactaccgctacctggctgaagtggccaccggagagaaaagggcgacggtggtggagtcctccgagaaggcctacagcgaagcccacgagatcagcaaagagcacatgcagcccacccaccccatccgattaggcctggctcttaactactccgtcttctactatgagatccagaacgccccagagcaagcgtgccacttggccaagaccgcgttcgacgacgccatcgccgagcttgacaccctcaacgaggactcctacaaggactccacgctcatcatgcagctcctccgcgacaacctcacgctctggacgagcgaccagcaggacgacgatggcggcgaaggcaacaattaaggccccaggggaactggcagcgcacgcggatgctactactgcagtctttatttttttcccatgagttgggggtcgggtgggggagggaaagggagggatgaccttcccagggagaaacccacgacctgtcctgtctttgatcgcctctttgacatttttgccaaaataccactagtggaaagtcaggctagctgtgctggtattggaatagcagcctcacactggcgtctggactgttctgtagattcatgcaagtggagctgtctgtctctaatttaacttattgctagataatagggttttcagatgaaaagaaaacttaaagaggaatggccctcattcagtaagttctgtggttccagtaaggatttttatgtacatacgctctcgtctctcgttttgggtactttctatctcatctgtctcggctctgcatgttttccagggtgtagcctacagacatggaacagtgtaaatcccagactgacagacttagaacctgaggtctcattcatccttatggtttaggccttgccagttttccgaagtctctgattagttgacagtattaacactaaattgcagtttacagtatttctacattacagccatatgtaacatcaagccatcgattgtgtacttttcctttgctagttgtttgggctttaacatccttattcagccttatccaggttggttttgctgttgatcggtctcctaggctaaatgagaatgaaagcgacttcaggtttttggttcataggtgctcggcaggtggctgtgggattttttttttttgggtccttctttcctcttaacgtaaatccaccaccaaaattattaatcctcttgagagaaacgtgaaacgccacaaaaatagagaaaattcaggtctgtatgtcatggatcgtgttggtattttcagagaacatcccgcttctgaagctgctgcagctccctcctcagggatcacactgccgtcacccactctgcactggggcgtttcctactgcgcctcgtgctggcggacgcagctgggtgcagaagctgtggggtcggagaggcgtttggagaaggtctgtggtgcagtgtgtgaaaattcaggtgctagaagcctactggtagaaaaacccaaaaggaagagctatatccttaaccattctgtccaatttcgggagccttgtcagtgtgtcagtttttcctccccgaagacactccttccccaagtaattgtaggaagataaaaaaactgttaccagataacaaacactgaactcctatttgaccagaactttttcctctcgagatagttttttctttttaatgaaaaaagcataggaattggagattggcttgtctcacgcagccagtgcacatttggaattgacggaaacaacgttgctatttccacccatttgttttcggcagccttaaggccctcattctcatttcgggtgaatctgtctatctgtgaacgtggcccgcatgtgcattcttttttttatatatataaagtcagtgacgaggaactcccgagacgtgtaatgacaccacacttgttttctttgtttctttgttttatttaggcaagaagaggtgtgagtaattgaggaaaaactgacagatgcttttgctaataccaaaattgagcttacaattaggaactgagtatgtgtaacaggatacaggtgacagtgaagatagaagaaccacgatgaccacagactcaatgtgctctgtaacatcgcacagtttacccagcatgactttccttaggaggccccctcctcacgctagagtaaaagtcccagttaagtgaagcctaccagaagaactagtagaagaagctttgccgcttttgtgcctctcacaggcgcctaaagtcattgccatgggaggaagacgatttgggggggggggggggggggcagggtaggtggggctttccctaatttatcttcatgtccagtgagcagtgttgcgtttttccttgtagcatttggaaatgatttactggaattacaaaacctatttttcctttaaatttcagctttggctctggctgctttttagaataatgcaagataaaaatcacacctgagggctgaaaacggagagggaatgggagacttgatatttaagcagcttgaatggtttttcttttctttatttttaaagaaatgcacttgcctatgatactgtctctccagtgaaatgattactcctccattactctattgatacaatattgtgcatgctagtgttgtatttctatacagtagcttgaaattgattaacttatactgtaggtgttatgtattcctatgacttttgggggtaaagtttgctctaccaaatagtgattgtaacaaattgatctgttttggatgttgctatagtgacatgcagttatatattttgtttttaaaagggggggagcaaaagaaacaccagtgttagcttaatcttaatgtctggtgtttgtcatggtgaaattataactattacagtgttggagaacaacaaatatgttctctgaatgagcctttgtgctttttgtcatgttatgcagtgaactatttttaaggtctaatcagtgattatttttccagctccgtgtttctctaaggaattatttcacacacggaccatctttagcagtttcctcagtgatggaatatcatgaatgtgagtcattatgtagctgtcgtacattgagcaaataaacttacagatctgacgcca

SEQ ID NO: 457982 - DNA, 885 bp, Homo sapiens
ccggttaagttttttctcattaaccgaaggatacactctggagtcgacccacgcgtcctgttgcgtttttccttgtagcatttggaaatgatttactggaattacaaaacctatttttcctttaaatttcagctttggctctggctgctttttagaataatgcaagataaaaatcacacctgagggctgaaaacggagagggaatgggagacttgatatttaagcagcttgaatggtttttcttttctttatttttaaagaaatgcacttgcctatgatactgtctctccagtgaaatgattactcctccattactctattgatacaatattgtgcatgctagtgttgtatttctatacagtagcttgaaattgattaacttatactgtaggtgttatgtattcctatgacaaaaaaaattaagtcttcaaattttttaaaggttttttttttttaatttaatttttccttttgggggtaaagtttgctctaccaaatagtgattgtaacaaattgatctgttttggatgttgctatagtgacatgcagttatatattttgtttttaaaagggggggagcaaaagaaacaccagtgttagcttaatcttaatgtctggtgtttgtcatggtgaaattataactattacagtgttggagaacaacaaatatgttctctgaatgagcctttgtgctttttgtcatgttatgcagtgaactatttttaaggtctaatcagtgattatttttccagctccgtgtttctctaaggaattatttcacacacggaccatctttagcagtttcctcagtgatggaatatcatgaatgtgagtcattatgtagctgtcgtacattgagcaaataaacttacagatctgacgcca

SEQ ID NO: 457983 - DNA, 3532 bp, Homo sapiens
gcagggggttgtccgtcagtggcacgcacagcagcgcgcagccgcctcgcgcccggtcccgcggtcgcagctccagccgcctcctccgcgcagccgccgcctcagctgctcgctctgtgggtcggtcctctccggcacttgggctccagtcgcgccctccaagcccttcaggccgccccagtgtcctcctccttctccggccagacccagccccgcgaagatggtggaccgcgagcaactggtgcagaaagcccggctggccgagcaggcggagcgctacgacgacatggccgcggccatgaagaacgtgacagagctgaatgagccactgtcgaatgaggaacgaaaccttctgtctgtggcctacaagaacgttgtgggggcacgccgctcttcctggagggtcatcagtagcattgagcagaagacatctgcagacggcaatgagaagaagattgagatggtccgtgcgtaccgggagaagatagagaaggagttggaggctgtgtgccaggatgtgctgagcctgctggataactacctgatcaagaattgcagcgagacccagtacgagagcaaagtgttctacctgaagatgaaaggggactactaccgctacctggctgaagtggccaccggagagaaaagggcgacggtggtggagtcctccgagaaggcctacagcgaagcccacgagatcagcaaagagcacatgcagcccacccaccccatccgattaggcctggctcttaactactccgtcttctactatgagatccagaacgccccagagcaagcgtgccacttggccaagaccgcgttcgacgacgccatcgccgagcttgacaccctcaacgaggactcctacaaggactccacgctcatcatgcagctcctccgcgacaacctcacgctctggacgagcgaccagcaggacgacgatggcggcgaaggcaacaattaaggccccaggggaactggcagcgcacgcggatgctactactgcagtctttatttttttcccatgagttgggggtcgggtgggggagggaaagggagggatgaccttcccagggagaaacccacgacctgtcctgtctttgatcgcctctttgacatttttgccaaaataccactagtggaaagtcaggctagctgtgctggtattggaatagcagcctcacactggcgtctggactgttctgtagattcatgcaagtggagctgtctgtctctaatttaacttattgctagataatagggttttcagatgaaaagaaaacttaaagaggaatggccctcattcagtaagttctgtggttccagtaaggatttttatgtacatacgctctcgtctctcgttttgggtactttctatctcatctgtctcggctctgcatgttttccagggtgtagcctacagacatggaacagtgtaaatcccagactgacagacttagaacctgaggtctcattcatccttatggtttaggccttgccagttttccgaagtctctgattagttgacagtattaacactaaattgcagtttacagtatttctacattacagccatatgtaacatcaagccatcgattgtgtacttttcctttgctagttgtttgggctttaacatccttattcagccttatccaggttggttttgctgttgatcggtctcctaggctaaatgagaatgaaagcgacttcaggtttttggttcataggtgctcggcaggtggctgtgggattttttttttttgggtccttctttcctcttaacgtaaatccaccaccaaaattattaatcctcttgagagaaacgtgaaacgccacaaaaatagagaaaattcaggtctgtatgtcatggatcgtgttggtattttcagagaacatcccgcttctgaagctgctgcagctccctcctcagggatcacactgccgtcacccactctgcactggggcgtttcctactgcgcctcgtgctggcggacgcagctgggtgcagaagctgtggggtcggagaggcgtttggagaaggtctgtggtgcagtgtgtgaaaattcaggtgctagaagcctactggtagaaaaacccaaaaggaagagctatatccttaaccattctgtccaatttcgggagccttgtcagtgtgtcagtttttcctccccgaagacactccttccccaagtaattgtaggaagataaaaaaactgttaccagataacaaacactgaactcctatttgaccagaactttttcctctcgagatagttttttctttttaatgaaaaaagcataggaattggagattggcttgtctcacgcagccagtgcacatttggaattgacggaaacaacgttgctatttccacccatttgttttcggcagccttaaggccctcattctcatttcgggtgaatctgtctatctgtgaacgtggcccgcatgtgcattcttttttttatatatataaagtcagtgacgaggaactcccgagacgtgtaatgacaccacacttgttttctttgtttctttgttttatttaggcaagaagaggtgtgagtaattgaggaaaaactgacagatgcttttgctaataccaaaattgagcttacaattaggaactgagtatgtgtaacaggatacaggtgacagtgaagatagaagaaccacgatgaccacagactcaatgtgctctgtaacatcgcacagtttacccagcatgatttccctaatttatcttcatgtccagtgagcagtgttgcgtttttccttgtagcatttggaaatgatttactggaattacaaaacctatttttcctttaaatttcagctttggctctggctgctttttagaataatgcaagataaaaatcacacctgagggctgaaaacggagagggaatgggagacttgatatttaagcagcttgaatggtttttcttttctttatttttaaagaaatgcacttgcctatgatactgtctctccagtgaaatgattactcctccattactctattgatacaatattgtgcatgctagtgttgtatttctatacagtagcttgaaattgattaacttatactgtaggtgttatgtattcctatgacttttgggggtaaagtttgctctaccaaatagtgattgtaacaaattgatctgttttggatgttgctatagtgacatgcagttatatattttgtttttaaaagggggggagcaaaagaaacaccagtgttagcttaatcttaatgtctggtgtttgtcatggtgaaattataactattacagtgttggagaacaacaaatatgttctctgaatgagcctttgtgctttttgtcatgttatgcagtgaactatttttaaggtctaatcagtgattatttttccagctccgtgtttctctaaggaattatttcacacacggaccatctttagcagtttcctcagtgatggaatatcatgaatgtgagtcattatgtagctgtcgtacattgagcaaataaacttacagatctgacgcca

SEQ ID NO: 457984 - DNA, 3713 bp, Homo sapiens
gcagggggttgtccgtcagtggcacgcacagcagcgcgcagccgcctcgcgcccggtcccgcggtcgcagctccagccgcctcctccgcgcagccgccgcctcagctgctcgctctgtgggtcggtcctctccggcacttgggctccagtcgcgccctccaagcccttcaggccgccccagtgtcctcctccttctccggccagacccagccccgcgaagatggtggaccgcgagcaactggtgcagaaagcccggctggccgagcaggcggagcgctacgacgacatggccgcggccatgaagaacgtgacagagctgaatgagccactgtcgaatgaggaacgaaaccttctgtctgtggcctacaagaacgttgtgggggcacgccgctcttcctggagggtcatcagtagcattgagcagaagacatctgcagacggcaatgagaagaagattgagatggtccgtgcgtaccgggagaagatagagaaggagttggaggctgtgtgccaggatgtgctgagcctgctggataactacctgatcaagaattgcagcgagacccagtacgagagcaaagtgttctacctgaagatgaaaggggactactaccgctacctggctgaagtggccaccggagagaaaagggcgacggtggtggagtcctccgagaaggcctacagcgaagcccacgagatcagcaaagagcacatgcagcccacccaccccatccgattaggcctggctcttaactactccgtcttctactatgagatccagaacgccccagagcaagcgtgccacttggccaagaccgcgttcgacgacgccatcgccgagcttgacaccctcaacgaggactcctacaaggactccacgctcatcatgcagctcctccgcgacaacctcacgctctggacgagcgaccagcaggacgacgatggcggcgaaggcaacaattaaggccccaggggaactggcagcgcacgcggatgctactactgcagtctttatttttttcccatgagttgggggtcgggtgggggagggaaagggagggatgaccttcccagggagaaacccacgacctgtcctgtctttgatcgcctctttgacatttttgccaaaataccactagtggaaagtcaggctagctgtgctggtattggaatagcagcctcacactggcgtctggactgttctgtagattcatgcaagtggagctgtctgtctctaatttaacttattgctagataatagggttttcagatgaaaagaaaacttaaagaggaatggccctcattcagtaagttctgtggttccagtaaggatttttatgtacatacgctctcgtctctcgttttgggtactttctatctcatctgtctcggctctgcatgttttccagggtgtagcctacagacatggaacagtgtaaatcccagactgacagacttagaacctgaggtctcattcatccttatggtttaggccttgccagttttccgaagtctctgattagttgacagtattaacactaaattgcagtttacagtatttctacattacagccatatgtaacatcaagccatcgattgtgtacttttcctttgctagttgtttgggctttaacatccttattcagccttatccaggttggttttgctgttgatcggtctcctaggctaaatgagaatgaaagcgacttcaggtttttggttcataggtgctcggcaggtggctgtgggattttttttttttgggtccttctttcctcttaacgtaaatccaccaccaaaattattaatcctcttgagagaaacgtgaaacgccacaaaaatagagaaaattcaggtctgtatgtcatggatcgtgttggtattttcagagaacatcccgcttctgaagctgctgcagctccctcctcagggatcacactgccgtcacccactctgcactggggcgtttcctactgcgcctcgtgctggcggacgcagctgggtgcagaagctgtggggtcggagaggcgtttggagaaggtctgtggtgcagtgtgtgaaaattcaggtgctagaagcctactggtagaaaaacccaaaaggaagagctatatccttaaccattctgtccaatttcgggagccttgtcagtgtgtcagtttttcctccccgaagacactccttccccaagtaattgtaggaagataaaaaaactgttaccagataacaaacactgaactcctatttgaccagaactttttcctctcgagatagttttttctttttaatgaaaaaagcataggaattggagattggcttgtctcacgcagccagtgcacatttggaattgacggaaacaacgttgctatttccacccatttgttttcggcagccttaaggccctcattctcatttcgggtgaatctgtctatctgtgaacgtggcccgcatgtgcattcttttttttatatatataaagtcagtgacgaggaactcccgagacgtgtaatgacaccacacttgttttctttgtttctttgttttatttaggcaagaagaggtgtgagtaattgaggaaaaactgacagatgcttttgctaataccaaaattgagcttacaattaggaactgagtatgtgtaacaggatacaggtgacagtgaagatagaagaaccacgatgaccacagactcaatgtgctctgtaacatcgcacagtttacccagcatgactttccttaggaggccccctcctcacgctagagtaaaagtcccagttaagtgaagcctaccagaagaactagtagaagaagctttgccgcttttgtgcctctcacaggcgcctaaagtcattgccatgggaggaagacgatttgggggggggggggggggggcagggtaggtggggctttccctaatttatcttcatgtccagtgagcagtgttgcgtttttccttgtagcatttggaaatgatttactggaattacaaaacctatttttcctttaaatttcagctttggctctggctgctttttagaataatgcaagataaaaatcacacctgagggctgaaaacggagagggaatgggagacttgatatttaagcagcttgaatggtttttcttttctttatttttaaagaaatgcacttgcctatgatactgtctctccagtgaaatgattactcctccattactctattgatacaatattgtgcatgctagtgttgtatttctatacagtagcttgaaattgattaacttatactgtaggtgttatgtattcctatgacaaaaaaaattaagtcttcaaattttttaaaggttttttttttttaatttaatttttccttttgggggtaaagtttgctctaccaaatagtgattgtaacaaattgatctgttttggatgttgctatagtgacatgcagttatatattttgtttttaaaagggggggagcattataactattacagtgttggagaacaacaaatatgttctctgaatgagcctttgtgctttttgtcatgttatgcagtgaactatttttaaggtctaatcagtgattatttttccagctccgtgtttctctaaggaattatttcacacacggaccatctttagcagtttcctcagtgatggaatatcatgaatgtgagtcattatgtagctgtcgtacattgagcaaataaacttacagatctgacgcca

SEQ ID NO: 457985 - DNA, 2708 bp, Homo sapiens
  misc_feature (2478)..(2478): n is a, c, g, or t
gcagggggttgtccgtcagtggcacgcacagcagcgcgcagccgcctcgcgcccggtcccgcggtcgcagctccagccgcctcctccgcgcagccgccgcctcagctgctcgctctgtgggtcggtcctctccggcacttgggctccagtcgcgccctccaagcccttcaggccgccccagtgtcctcctccttctccggccagacccagccccgcgaagatggtggaccgcgagcaactggtgcagaaagcccggctggccgagcaggcggagcgctacgacgacatggccgcggccatgaagaacgtgacagagctgaatgagccactgtcgaatgaggaacgaaaccttctgtctgtggcctacaagaacgttgtgggggcacgccgctcttcctggagggtcatcagtagcattgagcagaagacatctgcagacggcaatgagaagaagattgagatggtccgtgcgtaccgggagaagatagagaaggagttggaggctgtgtgccaggatgtgctgagcctgctggataactacctgatcaagaattgcagcgagacccagtacgagagcaaagtgttctacctgaagatgaaaggggactactaccgctacctggctgaagtggccaccggagagaaaagggcgacggtggtggagtcctccgagaaggcctacagcgaagcccacgagatcagcaaagagcacatgcagcccacccaccccatccgattaggcctggctcttaactactccgtcttctactatgagatccagaacgccccagagcaagcgtgccacttggccaagaccgcgttcgacgacgccatcgccgagcttgacaccctcaacgaggactcctacaaggactccacgctcatcatgcagctcctccgcgacaacctcacgctctggacgagcgaccagcaggacgacgatggcggcgaaggcaacaattaaggccccaggggaactggcagcgcacgcggatgctactactgcagtctttatttttttcccatgagttgggggtcgggtgggggagggaaagggagggatgaccttcccagggagaaacccacgacctgtcctgtctttgatcgcctctttgacatttttgccaaaataccactagtggaaagtcaggctagctgtgctggtattggaatagcagcctcacactggcgtctggactgttctgtagattcatgcaagtggagctgtctgtctctaatttaacttattgctagataatagggttttcagatgaaaagaaaacttaaagaggaatggccctcattcagtaagttctgtggttccagtaaggatttttatgtacatacgctctcgtctctcgttttgggtactttctatctcatctgtctcggctctgcatgttttccagggtgtagcctacagacatggaacagtgtaaatcccagactgacagacttagaacctgaggtctcattcatccttatggtttaggccttgccagttttccgaagtctctgattagttgacagtattaacactaaattgcagtttacagtatttctacattacagccatatgtaacatcaagccatcgattgtgtacttttcctttgctagttgtttgggctttaacatccttattcagccttatccaggttggttttgctgttgatcggtctcctaggctaaatgagaatgaaagcgacttcaggtttttggttcataggtgctcggcaggtggctgtgggattttttttttttgggtccttctttcctcttaacgtaaatccaccaccaaaattattaatcctcttgagagaaacgtgaaacgccacaaaaatagagaaaattcaggtctgtatgtcatggatcgtgttggtattttcagagaacatcccgcttctgaagctgctgcagctccctcctcagggatcacactgccgtcacccactctgcactggggcgtttcctactgcgcctcgtgctggcggacgcagctgggtgcagaagctgtggggtcggagaggcgtttggagaaggtctgtggtgcagtgtgtgaaaattcaggtgctagaagcctactggtagaaaaacccaaaaggaagagctatatccttaaccattctgtccaatttcgggagccttgtcagtgtgtcagtttttcctccccgaagacactccttccccaagtaattgtaggaagataaaaaaactgttaccagataacaaacactgaactgacaattaacagcccaccaaaaaaaaaaaaaaaaaaaaaaaaaaacaacaacaaccaccaaaaaacaaaaaaaaaaccaaaggggggggggggcgaaaaaatccccgggggggccccataccccccccttttttttcaacgggggcccccaggggggggcaaaaaaaacagggccggggcggtaacacccgggctgcgtcgagacaccgcgctccggggcctttggagagaacccctnctctcgtggggggcgacttgcgcgcccctcccaagaattaaccgcgacggaatcaaacgcgtttcggtcgggacccctatccttcgcgacaattctgcccgattcttaataccggctgcatactaccgcatcaccaagcctcaatcgaatacgctttcacacatctctcatcaccacataacaggcaatcatgaccaacacgtctctcgacaagatacaaaatcacacgg

SEQ ID NO: 457986 - DNA, 1859 bp, Homo sapiens
  misc_feature (1715)..(1716): n is a, c, g, or t
  misc_feature (1734)..(1735): n is a, c, g, or t
gcagggggttgtccgtcagtggcacgcacagcagcgcgcagccgcctcgcgcccggtcccgcggtcgcagctccagccgcctcctccgcgcagccgccgcctcagctgctcgctctgtgggtcggtcctctccggcacttgggctccagtcgcgccctccaagcccttcaggccgccccagtgtcctcctccttctccggccagacccagccccgcgaagatggtggaccgcgagcaactggtgcagaaagcccggctggccgagcaggcggagcgctacgacgacatggccgcggccatgaagaacgtgacagagctgaatgagccactgtcgaatgaggaacgaaaccttctgtctgtggcctacaagaacgttgtgggggcacgccgctcttcctggagggtcatcagtagcattgagcagaagacatctgcagacggcaatgagaagaagattgagatggtccgtgcgtaccgggagaagatagagaaggagttggaggctgtgtgccaggatgtgctgagcctgctggataactacctgatcaagaattgcagcgagacccagtacgagagcaaagtgttctacctgaagatgaaaggggactactaccgctacctggctgaagtggccaccggagagaaaagggcgacggtggtggagtcctccgagaaggcctacagcgaagcccacgagatcagcaaagagcacatgcagcccacccaccccatccgattaggcctggctcttaactactccgtcttctactatgagatccagaacgccccagagcaagcgtgccacttggccaagaccgcgttcgacgacgccatcgccgagcttgacaccctcaacgaggactcctacaaggactccacgctcatcatgcagctcctccgcgacaacctcacgctctggacgagcgaccagcaggacgacgatggcggcgaaggcaacaattaaggccccaggggaactggcagcgcacgcggatgctactactgcagtctttatttttttcccatgagttgggggtcgggtgggggagggaaagggagggatgaccttcccagggagaaacccacgacctgtcctgtctttgatcgcctctttgacatttttgccaaaataccactagtggaaagtcaggctagctgtgctggtattggaatagcagcctcacactggcgtctggactgttctgtagattcatgcaagtggagctgtctgtctctaatttaacttattgctagataatagggttttcagatgaaaagaaaacttaaagaggaatggccctcattcagtaagttctgtggttccagtaaggatttttatgtacatacgctctcgtctctcgttttgggtactttctatctcatctgtctcggctctgcatgttttccagggtgtagcctacagacatggaacagtgtaaatcccagactgacagacttagaacctgaggtctcattcatccttatggtttaggccttgccagttttccgaagtctctgattagttgacagtattaacactaaattgcagtttacagtatttctacattacagccatatgtaacatcaagccatcgattgtgtacttttcctttgctagttgtttgggctttaacatccttattcagccttatccaggttggttttgctgttgatcggtctcctaggctaaatgagaatgaaagcgacttcaggtnntggttcataggtgctcgnnaggtggctgtgggattttttttgtgggaaggtcttaacctacaaattcaatttattaaatagatacaattggctatcaagttatctatttcttcgtgagtgatttttggtagtttgtgttgttc

SEQ ID NO: 457987 - DNA, 596 bp, Homo sapiens
gcagggggttgtccgtcagtggcacgcacagcagcgcgcagccgcctcgcgcccggtcccgcggtcgcagctccagccgcctcctccgcgcagccgccgcctcagctgctcgctctgtgggtcggtcctctccggcacttgggctccagtcgcgccctccaagcccttcaggccgccccagtgtcctcctccttctccggccagacccagccccgcgaagatggtggaccgcgagcaactggtgcagaaagcccggctggccgagcaggcggagcgctacgacgacatggccgcggccatgaagaacgtgacagagctgaatgagccactgtcgaatgaggaacgaaaccttctgtctgtggcctacaagaacgttgtgggggcacgccgctcttcctggagggtcatcagtagcattgagcagaagacatctgcagacggcaatgagaagaagattgagatgctccgtgtttctctaaggaattatttcacacacggaccatctttagcagtttcctcagtgatggaatatcatgaatgtgagtcattatgtagctgtcgtacattgagcaaataaacttacagatctgacgcca

SEQ ID NO: 457988 - DNA, 3053 bp, Homo sapiens
gcagggggttgtccgtcagtggcacgcacagcagcgcgcagccgcctcgcgcccggtcccgcggtcgcagctccagccgcctcctccgcgcagccgccgcctcagctgctcgctctgtgggtcggtcctctccggcacttgggctccagtcgcgccctccaagcccttcaggccgccccagtgtcctcctccttctccggccagacccagccccgcgaagatggtggaccgcgagcaactggtgcagaaagcccggctggccgagcaggcggagcgctacgacgacatggccgcggccatgaagaacgtgacagagctgaatgagccactgtcgaatgaggaacgaaaccttctgtctgtggcctacaagaacgttgtgggggcacgccgctcttcctggagggtcatcagtagcattgagcagaagacatctgcagacggcaatgagaagaagattgagatggtccgtgcgtaccgggagaagatagagaaggagttggaggctgtgtgccaggatgtgctgagcctgctggataactacctgatcaagaattgcagcgagacccagtacgagagcaaagtgttctacctgaagatgaaaggggactactaccgctacctggctgaagtggccaccggagagaaaagggcgacggtggtggagtcctccgagaaggcctacagcgaagcccacgagatcagcaaagagcacatgcagcccacccaccccatccgattaggcctggctcttaactactccgtcttctactatgagatccagaacgccccagagcaagcgtgccacttggccaagaccgcgttcgacgacgccatcgccgagcttgacaccctcaacgaggactcctacaaggactccacgctcatcatgcagctcctccgcgacaacctcacgctctggacgagcgaccagcaggacgacgatggcggcgaaggcaacaattaaggccccaggggaactggcagcgcacgcggatgctactactgcagtctttatttttttcccatgagttgggggtcgggtgggggagggaaagggagggatgaccttcccagggagaaacccacgacctgtcctgtctttgatcgcctctttgacatttttgccaaaataccactagtggaaagtcaggctagctgtgctggtattggaatagcagcctcacactggcgtctggactgttctgtagattcatgcaagtggagctgtctgtctctaatttaacttattgctagataatagggttttcagatgaaaagaaaacttaaagaggaatggccctcattcagtaagttctgtggttccagtaaggatttttatgtacatacgctctcgtctctcgttttgggtactttctatctcatctgtctcggctctgcatgttttccagggtgtagcctacagacatggaacagtgtaaatcccagactgacagacttagaacctgaggtctcattcatccttatggtttaggccttgccagttttccgaagtctctgattagttgacagtattaacactaaattgcagtttacagtatttctacattacagccatatgtaacatcaagccatcgattgtgtacttttcctttgctagttgtttgggctttaacatccttattcagccttatccaggttggttttgctgttgatcggtctcctaggctaaatgagaatgaaagcgacttcaggtttttggttcataggtgctcggcaggtggctgtgggattttttttttttgggtccttctttcctcttaacgtaaatccaccaccaaaattattaatcctcttgagagaaacgtgaaacgccacaaaaatagagaaaattcaggtctgtatgtcatggatcgtgttggtattttcagagaacatcccgcttctgaagctgctgcagctccctcctcagggatcacactgccgtcacccactctgcactggggcgtttcctactgcgcctcgtgctggcggacgcagctgggtgcagaagctgtggggtcggagaggcgtttggagaaggtctgtggtgcagtgtgtgaaaattcaggtgctagaagcctactggtagaaaaacccaaaaggaagagctatatccttaaccattctgtccaatttcgggagccttgtcagtgtgtcagtttttcctccccgaagacactccttccccaagtaattgtaggaagataaaaaaactgttaccagataacaaacactgaactcctatttgaccagaactttttcctctcgagatagttttttctttttaatgaaaaaagcataggaattggagattggtttttagaataatgcaagataaaaatcacacctgagggctgaaaacggagagggaatgggagacttgatatttaagcagcttgaatggtttttcttttctttatttttaaagaaatgcacttgcctatgatactgtctctccagtgaaatgattactcctccattactctattgatacaatattgtgcatgctagtgttgtatttctatacagtagcttgaaattgattaacttatactgtaggtgttatgtattcctatgacaaaaaaaattaagtcttcaaattttttaaaggttttttttttttaatttaatttttccttttgggggtaaagtttgctctaccaaatagtgattgtaacaaattgatctgttttggatgttgctatagtgacatgcagttatatattttgtttttaaaagggggggagcaaaagaaacaccagtgttagcttaatcttaatgtctggtgtttgtcatggtgaaattataactattacagtgttggagaacaacaaatatgttctctgaatgagcctttgtgctttttgtcatgttatgcagtgaactatttttaaggtctaatcagtgattatttttccagctccgtgtttctctaaggaattatttcacacacggaccatctttagcagtttcctcagtgatggaatatcatgaatgtgagtcattatgtagctgtcgtacattgagcaaataaacttacagatctgacgcca

SEQ ID NO: 457989 - DNA, 3850 bp, Homo sapiens
gcagggggttgtccgtcagtggcacgcacagcagcgcgcagccgcctcgcgcccggtcccgcggtcgcagctccagccgcctcctccgcgcagccgccgcctcagctgctcgctctgtgggtcggtcctctccggcacttgggctccagtcgcgccctccaagcccttcaggccgccccagtgtcctcctccttctccggccagacccagccccgcgaagatggtggaccgcgagcaactggtgcagaaagcccggctggccgagcaggcggagcgctacgacgacatggccgcggccatgaagaacgtgacagagctgaatgagccactgtcgaatgaggaacgaaaccttctgtctgtggcctacaagaacgttgtgggggcacgccgctcttcctggagggtcatcagtagcattgagcagaagacatctgcagacggcaatgagaagaagattgagatggtccgtgcgtaccgggagaagatagagaaggagttggaggctgtgtgccaggatgtgctgagcctgctggataactacctgatcaagaattgcagcgagacccagtacgagagcaaagtgttctacctgaagatgaaaggggactactaccgctacctggctgaagtggccaccggagagaaaagggcgacggtggtggagtcctccgagaaggcctacagcgaagcccacgagatcagcaaagagcacatgcagcccacccaccccatccgattaggcctggctcttaactactccgtcttctactatgagatccagaacgccccagagcaagcgtgccacttggccaagaccgcgttcgacgacgccatcgccgagcttgacaccctcaacgaggactcctacaaggactccacgctcatcatgcagctcctccgcgacaacctcacgctctggacgagcgaccagcaggacgacgatggcggcgaaggcaacaattaaggccccaggggaactggcagcgcacgcggatgctactactgcagtctttatttttttcccatgagttgggggtcgggtgggggagggaaagggagggatgaccttcccagggagaaacccacgacctgtcctgtctttgatcgcctctttgacatttttgccaaaataccactagtggaaagtcaggctagctgtgctggtattggaatagcagcctcacactggcgtctggactgttctgtagattcatgcaagtggagctgtctgtctctaatttaacttattgctagataatagggttttcagatgaaaagaaaacttaaagaggaatggccctcattcagtaagttctgtggttccagtaaggatttttatgtacatacgctctcgtctctcgttttgggtactttctatctcatctgtctcggctctgcatgttttccagggtgtagcctacagacatggaacagtgtaaatcccagactgacagacttagaacctgaggtctcattcatccttatggtttaggccttgccagttttccgaagtctctgattagttgacagtattaacactaaattgcagtttacagtatttctacattacagccatatgtaacatcaagccatcgattgtgtacttttcctttgctagttgtttgggctttaacatccttattcagccttatccaggttggttttgctgttgatcggtctcctaggctaaatgagaatgaaagcgacttcaggtttttggttcataggtgctcggcaggtggctgtgggattttttttttttgggtccttctttcctcttaacgtaaatccaccaccaaaattattaatcctcttgagagaaacgtgaaacgccacaaaaatagagaaaattcaggtctgtatgtcatggatcgtgttggtattttcagagaacatcccgcttctgaagctgctgcagctccctcctcagggatcacactgccgtcacccactctgcactggggcgtttcctactgcgcctcgtgctggcggacgcagctgggtgcagaagctgtggggtcggagaggcgtttggagaaggtctgtggtgcagtgtgtgaaaattcaggtgctagaagcctactggtagaaaaacccaaaaggaagagctatatccttaaccattctgtccaatttcgggagccttgtcagtgtgtcagtttttcctccccgaagacactccttccccaagtaattgtaggaagataaaaaaactgttaccagataacaaacactgaactcctatttgaccagaactttttcctctcgagatagttttttctttttaatgaaaaaagcataggaattggagattggcttgtctcacgcagccagtgcacatttggaattgacggaaacaacgttgctatttccacccatttgttttcggcagccttaaggccctcattctcatttcgggtgaatctgtctatctgtgaacgtggcccgcatgtgcattcttttttttatatatataaagtcagtgacgaggaactcccgagacgtgtaatgacaccacacttgttttctttgtttctttgttttatttaggcaagaagaggtgtgagtaattgaggaaaaactgacagatgcttttgctaataccaaaattgagcttacaattaggaactgagtatgtgtaacaggatacaggtgacagtgaagatagaagaaccacgatgaccacagactcaatgtgctctgtaacatcgcacagtttacccagcatgactttccttaggaggccccctcctcacgctagagtaaaagtcccagttaagtgaagcctaccagaagaactagtagaagaagctttgccgcttttgtgcctctcacaggcgcctaaagtcattgccatgggaggaagacgatttgggggggggggggggggggcagggtaggtggggctttccctaatttatcttcatgtccagtgagcagtgttgcgtttttccttgtagcatttggaaatgatttactggaattacaaaacctatttttcctttaaatttcagctttggctctggctgctttttagaataatgcaagataaaaatcacacctgagggctgaaaacggagagggaatgggagacttgatatttaagcagcttgaatggtttttcttttctttatttttaaagaaatgcacttgcctatgatactgtctctccagtgaaatgattactcctccattactctattgatacaatattgtgcatgctagtgttgtatttctatacagtagcttgaaattgattaacttatactgtaggtgttatgtattcctatgacaaaaaaaattaagtcttcaaattttttaaaggttttttttttttaatttaatttttccttttgggggtaaagtttgctctaccaaatagtgattgtaacaaattgatctgttttggatgttgctatagtgacatgcagttatatattttgtttttaaaagggggggagcaaaagaaacaccagtgttagcttaatcttaatgtctggtgtttgtcatggtgaaattataactattacagtgttggagaacaacaaatatgttctctgaatgagcctttgtgctttttgtcatgttatgcagtgaactatttttaaggtctaatcagtgattatttttccagctccgtgtttctctaaggaattatttcacacacggaccatctttagcagtttcctcagtgatggaatatcatgaatgtgagtcattatgtagctgtcgtacattgagcaaataaacttacagatctgacgccacggtcaaacacaaacaaatcaacacaacaaaaaaaaacaatttttggggcgccttgggctacagaaaagttcttttaaaaccg

SEQ ID NO: 457990 - DNA, 3859 bp, Homo sapiens
gcagggggttgtccgtcagtggcacgcacagcagcgcgcagccgcctcgcgcccggtcccgcggtcgcagctccagccgcctcctccgcgcagccgccgcctcagctgctcgctctgtgggtcggtcctctccggcacttgggctccagtcgcgccctccaagcccttcaggccgccccagtgtcctcctccttctccggccagacccagccccgcgaagatggtggaccgcgagcaactggtgcagaaagcccggctggccgagcaggcggagcgctacgacgacatggccgcggccatgaagaacgtgacagagctgaatgagccactgtcgaatgaggaacgaaaccttctgtctgtggcctacaagaacgttgtgggggcacgccgctcttcctggagggtcatcagtagcattgagcagaagacatctgcagacggcaatgagaagaagattgagatggtccgtgcgtaccgggagaagatagagaaggagttggaggctgtgtgccaggatgtgctgagcctgctggataactacctgatcaagaattgcagcgagacccagtacgagagcaaagtgttctacctgaagatgaaaggggactactaccgctacctggctgaagtggccaccggagagaaaagggcgacggtggtggagtcctccgagaaggcctacagcgaagcccacgagatcagcaaagagcacatgcagcccacccaccccatccgattaggcctggctcttaactactccgtcttctactatgagatccagaacgccccagagcaagcgtgccacttggccaagaccgcgttcgacgacgccatcgccgagcttgacaccctcaacgaggactcctacaaggactccacgctcatcatgcagctcctccgcgacaacctcacgctctggacgagcgaccagcaggacgacgatggcggcgaaggcaacaattaaggccccaggggaactggcagcgcacgcggatgctactactgcagtctttatttttttcccatgagttgggggtcgggtgggggagggaaagggagggatgaccttcccagggagaaacccacgacctgtcctgtctttgatcgcctctttgacatttttgccaaaataccactagtggaaagtcaggctagctgtgctggtattggaatagcagcctcacactggcgtctggactgttctgtagattcatgcaagtggagctgtctgtctctaatttaacttattgctagataatagggttttcagatgaaaagaaaacttaaagaggaatggccctcattcagtaagttctgtggttccagtaaggatttttatgtacatacgctctcgtctctcgttttgggtactttctatctcatctgtctcggctctgcatgttttccagggtgtagcctacagacatggaacagtgtaaatcccagactgacagacttagaacctgaggtctcattcatccttatggtttaggccttgccagttttccgaagtctctgattagttgacagtattaacactaaattgcagtttacagtatttctacattacagccatatgtaacatcaagccatcgattgtgtacttttcctttgctagttgtttgggctttaacatccttattcagccttatccaggttggttttgctgttgatcggtctcctaggctaaatgagaatgaaagcgacttcaggtttttggttcataggtgctcggcaggtggctgtgggattttttttttttgggtccttctttcctcttaacgtaaatccaccaccaaaattattaatcctcttgagagaaacgtgaaacgccacaaaaatagagaaaattcaggtctgtatgtcatggatcgtgttggtattttcagagaacatcccgcttctgaagctgctgcagctccctcctcagggatcacactgccgtcacccactctgcactggggcgtttcctactgcgcctcgtgctggcggacgcagctgggtgcagaagctgtggggtcggagaggcgtttggagaaggtctgtggtgcagtgtgtgaaaattcaggtgctagaagcctactggtagaaaaacccaaaaggaagagctatatccttaaccattctgtccaatttcgggagccttgtcagtgtgtcagtttttcctccccgaagacactccttccccaagtaattgtaggaagataaaaaaactgttaccagataacaaacactgaactcctatttgaccagaactttttcctctcgagatagttttttctttttaatgaaaaaagcataggaattggagattggcttgtctcacgcagccagtgcacatttggaattgacggaaacaacgttgctatttccacccatttgttttcggcagccttaaggccctcattctcatttcgggtgaatctgtctatctgtgaacgtggcccgcatgtgcattcttttttttatatatataaagtcagtgacgaggaactcccgagacgtgtaatgacaccacacttgttttctttgtttctttgttttatttaggcaagaagaggtgtgagtaattgaggaaaaactgacagatgcttttgctaataccaaaattgagcttacaattaggaactgagtatgtgtaacaggatacaggtgacagtgaagatagaagaaccacgatgaccacagactcaatgtgctctgtaacatcgcacagtttacccagcatgactttccttaggaggccccctcctcacgctagagtaaaagtcccagttaagtgaagcctaccagaagaactagtagaagaagctttgccgcttttgtgcctctcacaggcgcctaaagtcattgccatgggaggaagacgatttgggggggggggggggggggcagggtaggtggggctttccctaatttatcttcatgtccagtgagcagtgttgcgtttttccttgtagcatttggaaatgatttactggaattacaaaacctatttttcctttaaatttcagctttggctctggctgctttttagaataatgcaagataaaaatcacacctgagggctgaaaacggagagggaatgggagacttgatatttaagcagcttgaatggtttttcttttctttatttttaaagaaatgcacttgcctatgatactgtctctccagtgaaatgattactcctccattactctattgatacaatattgtgcatgctagtgttgtatttctatacagtagcttgaaattgattaacttatactgtaggtgttatgtattcctatgacaaaaaaaattaagtcttcaaattttttaaaggttttttttttttaatttaatttttccttttgggggtaaagtttgctctaccaaatagtgattgtaacaaattgatctgttttggatgttgctatagtgacatgcagttatatattttgtttttaaaagggggggagcaaaagaaacaccagtgttagcttaatcttaatgtctggtgtttgtcatggtgaaattataactattacagtgttggagaacaacaaatatgttctctgaatgagcctttgtgctttttgtcatgttatgcagtgaactatttttaaggtctaatcagtgattatttttccagctccgtgtttctctaaggaattatttcacacacggaccatctttagcagtttcctcagtgatggaatatcatgaatgtgagtcattatgtagctgtcgtacattgagcaaataaacttacagatctgacgccatgacgccagtgctccttagcttcattgtgtgagttttactgtcctttgcttttgaaggttggatcagatgttggtgttctcttccctcccca

SEQ ID NO: 457991 - DNA, 3748 bp, Homo sapiens
gcagggggttgtccgtcagtggcacgcacagcagcgcgcagccgcctcgcgcccggtcccgcggtcgcagctccagccgcctcctccgcgcagccgccgcctcagctgctcgctctgtgggtcggtcctctccggcacttgggctccagtcgcgccctccaagcccttcaggccgccccagtgtcctcctccttctccggccagacccagccccgcgaagatggtggaccgcgagcaactggtgcagaaagcccggctggccgagcaggcggagcgctacgacgacatggccgcggccatgaagaacgtgacagagctgaatgagccactgtcgaatgaggaacgaaaccttctgtctgtggcctacaagaacgttgtgggggcacgccgctcttcctggagggtcatcagtagcattgagcagaagacatctgcagacggcaatgagaagaagattgagatggtccgtgcgtaccgggagaagatagagaaggagttggaggctgtgtgccaggatgtgctgagcctgctggataactacctgatcaagaattgcagcgagacccagtacgagagcaaagtgttctacctgaagatgaaaggggactactaccgctacctggctgaagtggccaccggagagaaaagggcgacggtggtggagtcctccgagaaggcctacagcgaagcccacgagatcagcaaagagcacatgcagcccacccaccccatccgattaggcctggctcttaactactccgtcttctactatgagatccagaacgccccagagcaagcgtgccacttggccaagaccgcgttcgacgacgccatcgccgagcttgacaccctcaacgaggactcctacaaggactccacgctcatcatgcagctcctccgcgacaacctcacgctctggacgagcgaccagcaggacgacgatggcggcgaaggcaacaattaaggccccaggggaactggcagcgcacgcggatgctactactgcagtctttatttttttcccatgagttgggggtcgggtgggggagggaaagggagggatgaccttcccagggagaaacccacgacctgtcctgtctttgatcgcctctttgacatttttgccaaaataccactagtggaaagtcaggctagctgtgctggtattggaatagcagcctcacactggcgtctggactgttctgtagattcatgcaagtggagctgtctgtctctaatttaacttattgctagataatagggttttcagatgaaaagaaaacttaaagaggaatggccctcattcagtaagttctgtggttccagtaaggatttttatgtacatacgctctcgtctctcgttttgggtactttctatctcatctgtctcggctctgcatgttttccagggtgtagcctacagacatggaacagtgtaaatcccagactgacagacttagaacctgaggtctcattcatccttatggtttaggccttgccagttttccgaagtctctgattagttgacagtattaacactaaattgcagtttacagtatttctacattacagccatatgtaacatcaagccatcgattgtgtacttttcctttgctagttgtttgggctttaacatccttattcagccttatccaggttggttttgctgttgatcggtctcctaggctaaatgagaatgaaagcgacttcaggtttttggttcataggtgctcggcaggtggctgtgggattttttttttttgggtccttctttcctcttaacgtaaatccaccaccaaaattattaatcctcttgagagaaacgtgaaacgccacaaaaatagagaaaattcaggtctgtatgtcatggatcgtgttggtattttcagagaacatcccgcttctgaagctgctgcagctccctcctcagggatcacactgccgtcacccactctgcactggggcgtttcctactgcgcctcgtgctggcggacgcagctgggtgcagaagctgtggggtcggagaggcgtttggagaaggtctgtggtgcagtgtgtgaaaattcaggtgctagaagcctactggtagaaaaacccaaaaggaagagctatatccttaaccattctgtccaatttcgggagccttgtcagtgtgtcagtttttcctccccgaagacactccttccccaagtaattgtaggaagataaaaaaactgttaccagataacaaacactgaactcctatttgaccagaactttttcctctcgagatagttttttctttttaatgaaaaaagcataggaattggagattggcttgtctcacgcagccagtgcacatttggaattgacggaaacaacgttgctatttccacccatttgttttcggcagccttaaggccctcattctcatttcgggtgaatctgtctatctgtgaacgtggcccgcatgtgcattcttttttttatatatataaagtcagtgacgaggaactcccgagacgtgtaatgacaccacacttgttttctttgtttctttgttttatttaggcaagaagaggtgtgagtaattgaggaaaaactgacagatgcttttgctaataccaaaattgagcttacaattaggaactgagtatgtgtaacaggatacaggtgacagtgaagatagaagaaccacgatgaccacagactcaatgtgctctgtaacatcgcacagtttacccagcatgactttccttaggaggccccctcctcacgctagagtaaaagtcccagttaagtgaagcctaccagaagaactagtagaagaagctttgccgcttttgtgcctctcacaggcgcctaaagtcattgccatgggaggaagacgatttgggggggggggggggggggcagggtaggtggggctttccctaatttatcttcatgtccagtgagcagtgttgcgtttttccttgtagcatttggaaatgatttactggaattacaaaacctatttttcctttaaatttcagctttggctctggctgctttttagaataatgcaagataaaaatcacacctgagggctgaaaacggagagggaatgggagacttgatatttaagcagcttgaatggtttttcttttctttatttttaaagaaatgcacttgcctatgatactgtctctccagtgaaatgattactcctccattactctattgatacaatattgtgcatgctagtgttgtatttctatacagtagcttgaaattgattaacttatactgtaggtgttatgtattcctatgacaaaaaaaattaagtcttcaaattttttaaaggttttttttttttaatttaatttttccttttgggggtaaagtttgctctaccaaatagtgattgtaacaaattgatctgttttggatgttgctatagtgacatgcagttatatattttgtttttaaaagggggggagcaaaagaaacaccagtgttagcttaatcttaatgtctggtgtttgtcatggtgaaattataactattacagtgttggagaacaacaaatatgttctctgaatgagcctttgtgctttttgttaccatttccaccgcccaaacaataattaaatgtccagcaaggtggttactcaacacacttcctagaaagcgaaccaagcatgtcagttccgtccctgacggaatgtatttaaaaagcagtacatcacgcagctatcgaacctagagctgcaatgcatacagactt

SEQ ID NO: 457992 - DNA, 3913 bp, Homo sapiens
gcagggggttgtccgtcagtggcacgcacagcagcgcgcagccgcctcgcgcccggtcccgcggtcgcagctccagccgcctcctccgcgcagccgccgcctcagctgctcgctctgtgggtcggtcctctccggcacttgggctccagtcgcgccctccaagcccttcaggccgccccagtgtcctcctccttctccggccagacccagccccgcgaagatggtggaccgcgagcaactggtgcagaaagcccggctggccgagcaggcggagcgctacgacgacatggccgcggccatgaagaacgtgacagagctgaatgagccactgtcgaatgaggaacgaaaccttctgtctgtggcctacaagaacgttgtgggggcacgccgctcttcctggagggtcatcagtagcattgagcagaagacatctgcagacggcaatgagaagaagattgagatggtccgtgcgtaccgggagaagatagagaaggagttggaggctgtgtgccaggatgtgctgagcctgctggataactacctgatcaagaattgcagcgagacccagtacgagagcaaagtgttctacctgaagatgaaaggggactactaccgctacctggctgaagtggccaccggagagaaaagggcgacggtggtggagtcctccgagaaggcctacagcgaagcccacgagatcagcaaagagcacatgcagcccacccaccccatccgattaggcctggctcttaactactccgtcttctactatgagatccagaacgccccagagcaagcgtgccacttggccaagaccgcgttcgacgacgccatcgccgagcttgacaccctcaacgaggactcctacaaggactccacgctcatcatgcagctcctccgcgacaacctcacgctctggacgagcgaccagcaggacgacgatggcggcgaaggcaacaattaaggccccaggggaactggcagcgcacgcggatgctactactgcagtctttatttttttcccatgagttgggggtcgggtgggggagggaaagggagggatgaccttcccagggagaaacccacgacctgtcctgtctttgatcgcctctttgacatttttgccaaaataccactagtggaaagtcaggctagctgtgctggtattggaatagcagcctcacactggcgtctggactgttctgtagattcatgcaagtggagctgtctgtctctaatttaacttattgctagataatagggttttcagatgaaaagaaaacttaaagaggaatggccctcattcagtaagttctgtggttccagtaaggatttttatgtacatacgctctcgtctctcgttttgggtactttctatctcatctgtctcggctctgcatgttttccagggtgtagcctacagacatggaacagtgtaaatcccagactgacagacttagaacctgaggtctcattcatccttatggtttaggccttgccagttttccgaagtctctgattagttgacagtattaacactaaattgcagtttacagtatttctacattacagccatatgtaacatcaagccatcgattgtgtacttttcctttgctagttgtttgggctttaacatccttattcagccttatccaggttggttttgctgttgatcggtctcctaggctaaatgagaatgaaagcgacttcaggtttttggttcataggtgctcggcaggtggctgtgggattttttttttttgggtccttctttcctcttaacgtaaatccaccaccaaaattattaatcctcttgagagaaacgtgaaacgccacaaaaatagagaaaattcaggtctgtatgtcatggatcgtgttggtattttcagagaacatcccgcttctgaagctgctgcagctccctcctcagggatcacactgccgtcacccactctgcactggggcgtttcctactgcgcctcgtgctggcggacgcagctgggtgcagaagctgtggggtcggagaggcgtttggagaaggtctgtggtgcagtgtgtgaaaattcaggtgctagaagcctactggtagaaaaacccaaaaggaagagctatatccttaaccattctgtccaatttcgggagccttgtcagtgtgtcagtttttcctccccgaagacactccttccccaagtaattgtaggaagataaaaaaactgttaccagataacaaacactgaactcctatttgaccagaactttttcctctcgagatagttttttctttttaatgaaaaaagcataggaattggagattggcttgtctcacgcagccagtgcacatttggaattgacggaaacaacgttgctatttccacccatttgttttcggcagccttaaggccctcattctcatttcgggtgaatctgtctatctgtgaacgtggcccgcatgtgcattcttttttttatatatataaagtcagtgacgaggaactcccgagacgtgtaatgacaccacacttgttttctttgtttctttgttttatttaggcaagaagaggtgtgagtaattgaggaaaaactgacagatgcttttgctaataccaaaattgagcttacaattaggaactgagtatgtgtaacaggatacaggtgacagtgaagatagaagaaccacgatgaccacagactcaatgtgctctgtaacatcgcacagtttacccagcatgactttccttaggaggccccctcctcacgctagagtaaaagtcccagttaagtgaagcctaccagaagaactagtagaagaagctttgccgcttttgtgcctctcacaggcgcctaaagtcattgccatgggaggaagacgatttgggggggggggggggggggcagggtaggtggggctttccctaatttatcttcatgtccagtgagcagtgttgcgtttttccttgtagcatttggaaatgatttactggaattacaaaacctatttttcctttaaatttcagctttggctctggctgctttttagaataatgcaagataaaaatcacacctgagggctgaaaacggagagggaatgggagacttgatatttaagcagcttgaatggtttttcttttctttatttttaaagaaatgcacttgcctatgatactgtctctccagtgaaatgattactcctccattactctattgatacaatattgtgcatgctagtgttgtatttctatacagtagcttgaaattgattaacttatactgtaggtgttatgtattcctatgacaaaaaaaattaagtcttcaaattttttaaaggttttttttttttaatttaatttttccttttgggggtaaagtttgctctaccaaatagtgattgtaacaaattgatctgttttggatgttgctatagtgacatgcaaatagtgattgtaacaaaattatttggtttgggatgtggctatagtgacatgcagttatatattttgtttttaaaagggggggagcaaaagaaacaccagtgttagcttaatcttaatgtctggtgtttgtcatggtgaaattataactattacagtgttggagaacaacaaatatgttctctgaatgagcctttgtgctttttgtcatgttatgcagtgaactatttttaaggtctaatcagtgattatttttccagctccgtgtttctctaaggaattatttcacacacggaccatctttagcagtttcctcagtgatggaatatcatgaatgtgagtcattatgtagctgtcgtacattgagcaaataaacttacagatctgacgccatgacgccagtgctccttagcttcattgtgtgagttttactgtcctttgcttttgaaggttggatcagatgttggtgttctcttccctcccca

SEQ ID NO: 457993 - DNA, 1893 bp, Homo sapiens
  misc_feature (1715)..(1716): n is a, c, g, or t
  misc_feature (1734)..(1735): n is a, c, g, or t
gcagggggttgtccgtcagtggcacgcacagcagcgcgcagccgcctcgcgcccggtcccgcggtcgcagctccagccgcctcctccgcgcagccgccgcctcagctgctcgctctgtgggtcggtcctctccggcacttgggctccagtcgcgccctccaagcccttcaggccgccccagtgtcctcctccttctccggccagacccagccccgcgaagatggtggaccgcgagcaactggtgcagaaagcccggctggccgagcaggcggagcgctacgacgacatggccgcggccatgaagaacgtgacagagctgaatgagccactgtcgaatgaggaacgaaaccttctgtctgtggcctacaagaacgttgtgggggcacgccgctcttcctggagggtcatcagtagcattgagcagaagacatctgcagacggcaatgagaagaagattgagatggtccgtgcgtaccgggagaagatagagaaggagttggaggctgtgtgccaggatgtgctgagcctgctggataactacctgatcaagaattgcagcgagacccagtacgagagcaaagtgttctacctgaagatgaaaggggactactaccgctacctggctgaagtggccaccggagagaaaagggcgacggtggtggagtcctccgagaaggcctacagcgaagcccacgagatcagcaaagagcacatgcagcccacccaccccatccgattaggcctggctcttaactactccgtcttctactatgagatccagaacgccccagagcaagcgtgccacttggccaagaccgcgttcgacgacgccatcgccgagcttgacaccctcaacgaggactcctacaaggactccacgctcatcatgcagctcctccgcgacaacctcacgctctggacgagcgaccagcaggacgacgatggcggcgaaggcaacaattaaggccccaggggaactggcagcgcacgcggatgctactactgcagtctttatttttttcccatgagttgggggtcgggtgggggagggaaagggagggatgaccttcccagggagaaacccacgacctgtcctgtctttgatcgcctctttgacatttttgccaaaataccactagtggaaagtcaggctagctgtgctggtattggaatagcagcctcacactggcgtctggactgttctgtagattcatgcaagtggagctgtctgtctctaatttaacttattgctagataatagggttttcagatgaaaagaaaacttaaagaggaatggccctcattcagtaagttctgtggttccagtaaggatttttatgtacatacgctctcgtctctcgttttgggtactttctatctcatctgtctcggctctgcatgttttccagggtgtagcctacagacatggaacagtgtaaatcccagactgacagacttagaacctgaggtctcattcatccttatggtttaggccttgccagttttccgaagtctctgattagttgacagtattaacactaaattgcagtttacagtatttctacattacagccatatgtaacatcaagccatcgattgtgtacttttcctttgctagttgtttgggctttaacatccttattcagccttatccaggttggttttgctgttgatcggtctcctaggctaaatgagaatgaaagcgacttcaggtnntggttcataggtgctcgnnaggtggctgtggggattacctttattgggccttctttccctctttaaaggtaatccacccccaaaatttttaatcctctgagaagaacgttgaaggcccaaaatatagaaatcccggttgttgtaaagggcggggggatcaaaaaaccggtttagaat

SEQ ID NO: 457994 - DNA, 1215 bp, Homo sapiens
  misc_feature (755)..(755): n is a, c, g, or t
gcagggggttgtccgtcagtggcacgcacagcagcgcgcagccgcctcgcgcccggtcccgcggtcgcagctccagccgcctcctccgcgcagccgccgcctcagctgctcgctctgtgggtcggtcctctccggcacttgggctccagtcgcgccctccaagcccttcaggccgccccagtgtcctcctccttctccggccagacccagccccgcgaagatggtggaccgcgagcaactggtgcagaaagcccggctggccgagcaggcggagcgctacgacgacatggccgcggccatgaagaacgtgacagagctgaatgagccactgtcgaatgaggaacgaaaccttctgtctgtggcctacaagaacgttgtgggggcacgccgctcttcctggagggtcatcagtagcattgagcagaagacatctgcagacggcaatgagaagaagattgagatggtccgtgcgtaccgggagaagatagagaaggagttggaggctgtgtgccaggatgtgctgagcctgctggataactacctgatcaagaattgcagcgagacccagtacgagagcaaagtgttctacctgaagatgaaaggggactactaccgctacctggctgaagtggccaccggagagaaaagggcgacggtggtggagtcctccgagaaggcctacagcgaagcccacgagatcagcaaagagcacatgcagcccacccctggcctcgaggtttagttttacaaattanaaaacattgttcttggttttacaaacaacacagcgaaaaaaaaataaaaacataaaacacaaaagacaaacatcagtcaataacaaaaaaacagagaggggggcgggggggcaaaaaagaattatcaccccgggggggcgccacaaattagccgccccaccgcttttttgtttacgaaaagcgagggcgccccccaatgggggggcgcgatcatattaataagcacaacggggagcggggcggccggcgtgtaaaaacaccgtcgcccgtggcgtgagcaccacggtgctacacggcggagactctcgaggaacaccccacaacctgggcggggcggagcagagtgggggcacccccccagcaggagatataaagccgccagggacaaaaaacctacggcgtatcggtgtgaacccacccgattgctcagggagaaatgtgcacggatgttggaaattag

SEQ ID NO: 457995 - DNA, 829 bp, Homo sapiens
gaaaaaaaacccttagatctgctcaactatcttgtaaattgcttggtgtaaaaacaatgtttgtagctcctggtctttcctgcacggcatttagcatataatgagtgcttaataagtaggtgcttcccacagaggacctgagctttgccaaaaaaggtttctacagttcagttaaactttcttgttaatatttttcctgtctttctttgaacccatttgagacaaatttttatgtttctccttttctgtaaggttcaagattatctaagaagatttgaaagtataccagatatgcttgaattggatcacctcacagtttcaggagatgtgacatttggaaaaaatgtttcattaaagggaacggttatcatcattgcaaatcatggtgacagaattgatatcccacctggagcagtattagagaacaagattgtgtctggaaaccttcgcatcttggaccactgaaatgaaaaatactgtggacacttaaataatgggctagtttcttacaatgaaatgttctctaggattctaaaataggcaggtactttactatgttactgtaccctgcagtgttgatttttaaaatagagttttctgcagtatgcttttagtctaagaaaagcacagatggagcaatactttccttctttgaagagaatcccaaaagttagttcatcttaaagtgcaatattgtttaatcttaaaactgggcaactttggaagaacttttaacagaagcctcaatgatgatcactttgaattgcttgtgatttcaaaaataaagcagtgaagcaatacttgtgtacactggtactttataatgcta

SEQ ID NO: 457996 - DNA, 2023 bp, Homo sapiens
  misc_feature (421)..(421): n is a, c, g, or t
gcgaccgttagggaggggctcaaggtgtgcatgtgtgagggaagagagagagagagaagggcgcctcagaggtgactttcagcctgcgagccttcttcccggggcgccataaacgcccccaatttcccagctgctaaaggaagaggaagagatcttagcaaagcaatgtctcaagatggtgcttctcagttccaagaagtcattcggcaagagctagaattatctgtgaagaaggaactagaaaaaatactcaccacagcatcatcacatgaatttgagcacaccaaaaaagacctggatggatttcggaagctatttcatagatttttgcaagaaaaggggccttctgtggattggggaaaaatccagagaccccctgaagattcgattcaaccctatgaaaagataaaggccaggggcntgcctgataatatatcttccgtgttgaacaaactagtggtggtgaaactcaatggtggtttgggaaccagcatgggctgcaaaggccctaaaagtctgattggtgtgaggaatgagaatacctttctggatctgactgttcagcaaattgaacatttgaataaaacctacaatacagatgttcctcttgttttaatgaactcttttaacacggatgaagataccaaaaaaatactacagaagtacaatcattgtcgtgtgaaaatctacactttcaatcaaagcaggtacccgaggattaataaagaatctttacttcctgtagcaaaggacgtgtcttactcaggggaaaatacagaagcttggtaccctccaggtcatggtgatatttacgccagtttctacaactctggattgcttgatacctttataggagaaggcaaagagtatatttttgtgtctaacatagataatctgggtgccacagtggatctgtatattcttaatcatctaatgaacccacccaatggaaaacgctgtgaatttgtcatggaagtcacaaataaaacacgtgcagatgtaaagggcgggacactcactcaatatgaaggcaaactgagactggtggaaattgctcaagtgccaaaagcacatgtagacgagttcaagtctgtatcaaagttcaaaatatttaatacaaacaacctatggatttctcttgcagcagttaaaagactgcaggagcaaaatgccattgacatggaaatcattgtgaatgcaaagactttggatggaggcctgaatgtcattcaattagaaactgcagtaggggctgccatcaaaagttttgagaattctctaggtattaatgtgccaaggagccgttttctgcctgtcaaaaccacatcagatctcttgctggtgatgtcaaacctctatagtcttaatgcaggatctctgacaatgagtgaaaagcgggaatttcctacagtgcccttggttaaattaggcagttcttttacgaaggttcaagattatctaagaagatttgaaagtataccagatatgcttgaattggatcacctcacagtttcaggagatgtgacatttggaaaaaatgtttcattaaagggaacggttatcatcattgcaaatcatggtgacagaattgatatcccacctggagcagtattagagaacaagattgtgtctggaaaccttcgcatcttggaccactgaaatgaaaaatactgtggacacttaaataatgggctagtttcttacaatgaaatgttctctaggattctaaaataggcaggtactttactatgttactgtaccctgcagtgttgatttttaaaatagagttttctgcagtatgcttttagtctaagaaaagcacagatggagcaatactttccttctttgaagagaatcccaaaagttagttcatcttaaagtgcaatattgtttaatcttaaaactgggcaactttggaagaacttttaacagaagcctcaatgatgatcactttgaattgcttgtgatttcaaaaataaagcagtgaagcaatacttgtgtacactggtactttataatgcta

SEQ ID NO: 457997 - DNA, 1121 bp, Homo sapiens
aagcatggtatcaacgcagagtgcccattacggccgggcacccaatggaaaacgctgtgaatttgtcatggaagtcacaaataaaacacgtgcagatgtaaagggcgggacactcactcaatatgaaggcaaactgagactggtggaaattgctcaagtgccaaaagcacatgtagacgagttcaagtctgtatcaaagttcaaaatatttaatacaaacaacctatggatttctcttgcagcagttaaaagactgcaggagcaaaatgccattgacatggaaatcattgtgaatgcaaagactttggatggaggcctgaatgtcattcaattagaaactgcagtaggggctgccatcaaaagttttgagaattctctaggtattaatgtgccaaggagccgttttctgcctgtcaaaaccacatcagatctcttgctggtgatgtcaaacctctatagtcttaatgcaggatctctgacaatgagtgaaaagcgggaatttcctacagtgcccttggttaaattaggcagttcttttacgaaggttcaagattatctaagaagatttgaaagtataccagatatgcttgaattggatcacctcacagtttcaggagatgtgacatttggaaaaaatgtttcattaaagggaacggttatcatcattgcaaatcatggtgacagaattgatatcccacctggagcagtattagagaacaagattgtgtctggaaaccttcgcatcttggaccactgaaatgaaaaatactgtggacacttaaataatgggctagtttcttacaatgaaatgttctctaggattctaaaataggcaggtactttactatgttactgtaccctgcagtgttgatttttaaaatagagttttctgcagtatgcttttagtctaagaaaagcacagatggagcaatactttccttctttgaagagaatcccaaaagttagttcatcttaaagtgcaatattgtttaatcttaaaactgggcaactttggaagaacttttaacagaagcctcaatgatgatcactttgaattgcttgtgatttcaaaaataaagcagtgaagcaatacttgtgtacactggtactttataatgcta

SEQ ID NO: 457998 - DNA, 2225 bp, Homo sapiens
  misc_feature (421)..(421): n is a, c, g, or t
  misc_feature (2015)..(2015): n is a, c, g, or t
gcgaccgttagggaggggctcaaggtgtgcatgtgtgagggaagagagagagagagaagggcgcctcagaggtgactttcagcctgcgagccttcttcccggggcgccataaacgcccccaatttcccagctgctaaaggaagaggaagagatcttagcaaagcaatgtctcaagatggtgcttctcagttccaagaagtcattcggcaagagctagaattatctgtgaagaaggaactagaaaaaatactcaccacagcatcatcacatgaatttgagcacaccaaaaaagacctggatggatttcggaagctatttcatagatttttgcaagaaaaggggccttctgtggattggggaaaaatccagagaccccctgaagattcgattcaaccctatgaaaagataaaggccaggggcntgcctgataatatatcttccgtgttgaacaaactagtggtggtgaaactcaatggtggtttgggaaccagcatgggctgcaaaggccctaaaagtctgattggtgtgaggaatgagaatacctttctggatctgactgttcagcaaattgaacatttgaataaaacctacaatacagatgttcctcttgttttaatgaactcttttaacacggatgaagataccaaaaaaatactacagaagtacaatcattgtcgtgtgaaaatctacactttcaatcaaagcaggtacccgaggattaataaagaatctttacttcctgtagcaaaggacgtgtcttactcaggggaaaatacagaagcttggtaccctccaggtcatggtgatatttacgccagtttctacaactctggattgcttgatacctttataggagaaggcaaagagtatatttttgtgtctaacatagataatctgggtgccacagtggatctgtatattcttaatcatctaatgaacccacccaatggaaaacgctgtgaatttgtcatggaagtcacaaataaaacacgtgcagatgtaaagggcgggacactcactcaatatgaaggcaaactgagactggtggaaattgctcaagtgccaaaagcacatgtagacgagttcaagtctgtatcaaagttcaaaatatttaatacaaacaacctatggatttctcttgcagcagttaaaagactgcaggagcaaaatgccattgacatggaaatcattgtgaatgcaaagactttggatggaggcctgaatgtcattcaattagaaactgcagtaggggctgccatcaaaagttttgagaattctctaggtattaatgtgccaaggagccgttttctgcctgtcaaaaccacatcagatctcttgctggtgatgtcaaacctctatagtcttaatgcaggatctctgacaatgagtgaaaagcgggaatttcctacagtgcccttggttaaattaggcagttcttttacgaaggttcaagattatctaagaagatttgaaagtataccagatatgcttgaattggatcacctcacagtttcaggagatgtgacatttggaaaaaatgtttcattaaagggaacggttatcatcattgcaaatcatggtgacagaattgatatcccacctggagcagtattagagaacaagattgtgtctggaaaccttcgcatcttggaccactgaaatgaaaaatactgtggacacttaaataatgggctagtttcttacaatgaaatgttctctaggattctaaaataggcaggtactttactatgttactgtaccctgcagtgttgatttttaaaatagagttttctgcagtatgcttttagtctaagaaaagcacagatggagcaatactttccttctttgaagagaatcccaaaagttagttcatcttaaagtgcaatattgtttaatcttaaaactgggcaactttggaagaacttttaacagaagcctcaatgatgatcactttgaattgcttgtgatttcaaaaataaagcagtgaaaaaaaaaaaaaaaaaactcgagcacantgcgtaccacatgtttgtgatgggaaactggagtatccaacttgagccaacaagggctaagggccctttttaaagattgttttactgcgttatatttctacctcaactttagaataactccccccaaacgtaatcttatggtgagaaccggttgctttcttcgtaataagccccttttttaaatcctgggaaaccacggaaaccctacac

SEQ ID NO: 457999 - DNA, 2163 bp, Homo sapiens
  misc_feature (540)..(540): n is a, c, g, or t
ggagttcccaaaccgactcagtcgcaccaagtttccgtcttttggaattggggaaggagtttctttctttcttttcttttttcttgagccagttttaatcgctttgaataaatactcccttaagtagttaaatataggaggagaaagaatacatcggttgttaaagcaggagaggaagagagacctgccctgtagcgtgactcctctagaaaaaaaaaaaaaaagccggagtattttactaagcccctaaaatgtcgagatttgtacaagatcttagcaaagcaatgtctcaagatggtgcttctcagttccaagaagtcattcggcaagagctagaattatctgtgaagaaggaactagaaaaaatactcaccacagcatcatcacatgaatttgagcacaccaaaaaagacctggatggatttcggaagctatttcatagatttttgcaagaaaaggggccttctgtggattggggaaaaatccagagaccccctgaagattcgattcaaccctatgaaaagataaaggccaggggcntgcctgataatatatcttccgtgttgaacaaactagtggtggtgaaactcaatggtggtttgggaaccagcatgggctgcaaaggccctaaaagtctgattggtgtgaggaatgagaatacctttctggatctgactgttcagcaaattgaacatttgaataaaacctacaatacagatgttcctcttgttttaatgaactcttttaacacggatgaagataccaaaaaaatactacagaagtacaatcattgtcgtgtgaaaatctacactttcaatcaaagcaggtacccgaggattaataaagaatctttacttcctgtagcaaaggacgtgtcttactcaggggaaaatacagaagcttggtaccctccaggtcatggtgatatttacgccagtttctacaactctggattgcttgatacctttataggagaaggcaaagagtatatttttgtgtctaacatagataatctgggtgccacagtggatctgtatattcttaatcatctaatgaacccacccaatggaaaacgctgtgaatttgtcatggaagtcacaaataaaacacgtgcagatgtaaagggcgggacactcactcaatatgaaggcaaactgagactggtggaaattgctcaagtgccaaaagcacatgtagacgagttcaagtctgtatcaaagttcaaaatatttaatacaaacaacctatggatttctcttgcagcagttaaaagactgcaggagcaaaatgccattgacatggaaatcattgtgaatgcaaagactttggatggaggcctgaatgtcattcaattagaaactgcagtaggggctgccatcaaaagttttgagaattctctaggtattaatgtgccaaggagccgttttctgcctgtcaaaaccacatcagatctcttgctggtgatgtcaaacctctatagtcttaatgcaggatctctgacaatgagtgaaaagcgggaatttcctacagtgcccttggttaaattaggcagttcttttacgaaggttcaagattatctaagaagatttgaaagtataccagatatgcttgaattggatcacctcacagtttcaggagatgtgacatttggaaaaaatgtttcattaaagggaacggttatcatcattgcaaatcatggtgacagaattgatatcccacctggagcagtattagagaacaagattgtgtctggaaaccttcgcatcttggaccactgaaatgaaaaatactgtggacacttaaataatgggctagtttcttacaatgaaatgttctctaggattctaaaataggcaggtactttactatgttactgtaccctgcagtgttgatttttaaaatagagttttctgcagtatgcttttagtctaagaaaagcacagatggagcaatactttccttctttgaagagaatcccaaaagttagttcatcttaaagtgcaatattgtttaatcttaaaactgggcaactttggaagaacttttaacagaagcctcaatgatgatcataactgcctgcttgtgattctaatagctctttgttgtgtgtgtgcgtggggggtcgtgttgtggggttgtggcgtgtttgtttgtgtggggggg

SEQ ID NO: 458000 - DNA, 460 bp, Homo sapiens
tctctaatacgcccaggtgggatatcaattctgtcaccatgagcagtattagagaacaagattgtgtctggaaaccttcgcatcttggaccactgaaatgaaaaatactgtggacacttaaataatgggctagtttcttacaatgaaatgttctctaggattctaaaataggcaggtactttactatgttactgtaccctgcagtgttgatttttaaaatagagttttctgcagtatgcttttagtctaagaaaagcacagatggagcaatactttccttctttgaagagaatcccaaaagttagttcatcttaaagtgcaatattgtttaatcttaaaactgggcaactttggaagaacttttaacagaagcctcaatgatgatcactttgaattgcttgtgatttcaaaaataaagcagtgaagcaatacttgtgtacactggtactttataatgcta

SEQ ID NO: 458001 - DNA, 303 bp, Homo sapiens
agattatctaagaagatttgaaagtataccagatatgcttgaattggatcacctcacagtttcaggagatgtgacatttggaaaaaatgtttcattaaaggtatgttgttacaatgaaaattatatttcttacagcttacaatataggtctcattttctagtcataaatttacatttactttaaggaatacttgttagtcttagtgccaccttaattactagtgtaattattttactgaaatgagaatctttaaaataggatcactattagcattagcttactaaagatgattgagtaaaagc

SEQ ID NO: 458002 - DNA, 2142 bp, Homo sapiens
  misc_feature (540)..(540): n is a, c, g, or t
ggagttcccaaaccgactcagtcgcaccaagtttccgtcttttggaattggggaaggagtttctttctttcttttcttttttcttgagccagttttaatcgctttgaataaatactcccttaagtagttaaatataggaggagaaagaatacatcggttgttaaagcaggagaggaagagagacctgccctgtagcgtgactcctctagaaaaaaaaaaaaaaagccggagtattttactaagcccctaaaatgtcgagatttgtacaagatcttagcaaagcaatgtctcaagatggtgcttctcagttccaagaagtcattcggcaagagctagaattatctgtgaagaaggaactagaaaaaatactcaccacagcatcatcacatgaatttgagcacaccaaaaaagacctggatggatttcggaagctatttcatagatttttgcaagaaaaggggccttctgtggattggggaaaaatccagagaccccctgaagattcgattcaaccctatgaaaagataaaggccaggggcntgcctgataatatatcttccgtgttgaacaaactagtggtggtgaaactcaatggtggtttgggaaccagcatgggctgcaaaggccctaaaagtctgattggtgtgaggaatgagaatacctttctggatctgactgttcagcaaattgaacatttgaataaaacctacaatacagatgttcctcttgttttaatgaactcttttaacacggatgaagataccaaaaaaatactacagaagtacaatcattgtcgtgtgaaaatctacactttcaatcaaagcaggtacccgaggattaataaagaatctttacttcctgtagcaaaggacgtgtcttactcaggggaaaatacagaagcttggtaccctccaggtcatggtgatatttacgccagtttctacaactctggattgcttgatacctttataggagaaggcaaagagtatatttttgtgtctaacatagataatctgggtgccacagtggatctgtatattcttaatcatctaatgaacccacccaatggaaaacgctgtgaatttgtcatggaagtcacaaataaaacacgtgcagatgtaaagggcgggacactcactcaatatgaaggcaaactgagactggtggaaattgctcaagtgccaaaagcacatgtagacgagttcaagtctgtatcaaagttcaaaatatttaatacaaacaacctatggatttctcttgcagcagttaaaagactgcaggagcaaaatgccattgacatggaaatcattgtgaatgcaaagactttggatggaggcctgaatgtcattcaattagaaactgcagtaggggctgccatcaaaagttttgagaattctctaggtattaatgtgccaaggagccgttttctgcctgtcaaaaccacatcagatctcttgctggtgatgtcaaacctctatagtcttaatgcaggatctctgacaatgagtgaaaagcgggaatttcctacagtgcccttggttaaattaggcagttcttttacgaaggttcaagattatctaagaagatttgaaagtataccagatatgcttgaattggatcacctcacagtttcaggagatgtgacatttggaaaaaatgtttcattaaagggaacggttatcatcattgcaaatcatggtgacagaattgatatcccacctggagcagtattagagaacaagattgtgtctggaaaccttcgcatcttggaccactgaaatgaaaaatactgtggacacttaaataatgggctagtttcttacaatgaaatgttctctaggattctaaaataggcaggtactttactatgttactgtaccctgcagtgttgatttttaaaatagagttttctgcagtatgcttttagtctaagaaaagcacagatggagcaatactttccttctttgaagagaatcccaaaagttagttcatcttaaagtgcaatattgtttaatcttaaaactgggcaactttggaagaacttttaacagaagcctcaatgatgatcactttgaattgcttgtgatttcaaaaataaagcagtgaagcaatacttgtgtacactggtactttataatgcta

SEQ ID NO: 458003 - DNA, 2081 bp, Homo sapiens
  misc_feature (479)..(479): n is a, c, g, or t
gcgaccgttagggaggggctcaaggtgtgcatgtgtgagggaagagagagagagagaagggcgcctcagaggtgactttcagcctgcgagccttcttcccggggcgccataaacgcccccaatttcccagctgctaaaggaagaggaaggtacctgtgcgtgcacgcagacgggaagggctggggaagcgggaggactgagaaaaccagatcttagcaaagcaatgtctcaagatggtgcttctcagttccaagaagtcattcggcaagagctagaattatctgtgaagaaggaactagaaaaaatactcaccacagcatcatcacatgaatttgagcacaccaaaaaagacctggatggatttcggaagctatttcatagatttttgcaagaaaaggggccttctgtggattggggaaaaatccagagaccccctgaagattcgattcaaccctatgaaaagataaaggccaggggcntgcctgataatatatcttccgtgttgaacaaactagtggtggtgaaactcaatggtggtttgggaaccagcatgggctgcaaaggccctaaaagtctgattggtgtgaggaatgagaatacctttctggatctgactgttcagcaaattgaacatttgaataaaacctacaatacagatgttcctcttgttttaatgaactcttttaacacggatgaagataccaaaaaaatactacagaagtacaatcattgtcgtgtgaaaatctacactttcaatcaaagcaggtacccgaggattaataaagaatctttacttcctgtagcaaaggacgtgtcttactcaggggaaaatacagaagcttggtaccctccaggtcatggtgatatttacgccagtttctacaactctggattgcttgatacctttataggagaaggcaaagagtatatttttgtgtctaacatagataatctgggtgccacagtggatctgtatattcttaatcatctaatgaacccacccaatggaaaacgctgtgaatttgtcatggaagtcacaaataaaacacgtgcagatgtaaagggcgggacactcactcaatatgaaggcaaactgagactggtggaaattgctcaagtgccaaaagcacatgtagacgagttcaagtctgtatcaaagttcaaaatatttaatacaaacaacctatggatttctcttgcagcagttaaaagactgcaggagcaaaatgccattgacatggaaatcattgtgaatgcaaagactttggatggaggcctgaatgtcattcaattagaaactgcagtaggggctgccatcaaaagttttgagaattctctaggtattaatgtgccaaggagccgttttctgcctgtcaaaaccacatcagatctcttgctggtgatgtcaaacctctatagtcttaatgcaggatctctgacaatgagtgaaaagcgggaatttcctacagtgcccttggttaaattaggcagttcttttacgaaggttcaagattatctaagaagatttgaaagtataccagatatgcttgaattggatcacctcacagtttcaggagatgtgacatttggaaaaaatgtttcattaaagggaacggttatcatcattgcaaatcatggtgacagaattgatatcccacctggagcagtattagagaacaagattgtgtctggaaaccttcgcatcttggaccactgaaatgaaaaatactgtggacacttaaataatgggctagtttcttacaatgaaatgttctctaggattctaaaataggcaggtactttactatgttactgtaccctgcagtgttgatttttaaaatagagttttctgcagtatgcttttagtctaagaaaagcacagatggagcaatactttccttctttgaagagaatcccaaaagttagttcatcttaaagtgcaatattgtttaatcttaaaactgggcaactttggaagaacttttaacagaagcctcaatgatgatcactttgaattgcttgtgatttcaaaaataaagcagtgaagcaatacttgtgtacactggtactttataatgcta

SEQ ID NO: 458004 - DNA, 720 bp, Homo sapiens
gagcgaggtgatctagaggatcccagaatctcttgctggtgatgtcaaacctctatagtcttaatgcaggatctctgacaatgagtgaaaagcgggaatttcctacagtgcccttggttaaattaggcagttcttttacgaaggttcaagattatctaagaagatttgaaagtataccagatatgcttgaattggatcacctcacagtttcaggagatgtgacatttggaaaaaatgtttcattaaagggaacggttatcatcattgcaaatcatggtgacagaattgatatcccacctggagcagtattagagaacaagattgtgtctggaaaccttcgcatcttggaccactgaaatgaaaaatactgtggacacttaaataatgggctagtttcttacaatgaaatgttctctaggattctaaaataggcaggtactttactatgttactgtaccctgcagtgttgatttttaaaatagagttttctgcagtatgcttttagtctaagaaaagcacagatggagcaatactttccttctttgaagagaatcccaaaagttagttcatcttaaagtgcaatattgtttaatcttaaaactgggcaactttggaagaacttttaacagaagcctcaatgatgatcactttgaattgcttgtgatttcaaaaataaagcagtgaagcaatacttgtgtacactggtactttataatgcta

SEQ ID NO: 458005 - DNA, 2357 bp, Homo sapiens
  misc_feature (540)..(540): n is a, c, g, or t
  misc_feature (2187)..(2187): n is a, c, g, or t
ggagttcccaaaccgactcagtcgcaccaagtttccgtcttttggaattggggaaggagtttctttctttcttttcttttttcttgagccagttttaatcgctttgaataaatactcccttaagtagttaaatataggaggagaaagaatacatcggttgttaaagcaggagaggaagagagacctgccctgtagcgtgactcctctagaaaaaaaaaaaaaaagccggagtattttactaagcccctaaaatgtcgagatttgtacaagatcttagcaaagcaatgtctcaagatggtgcttctcagttccaagaagtcattcggcaagagctagaattatctgtgaagaaggaactagaaaaaatactcaccacagcatcatcacatgaatttgagcacaccaaaaaagacctggatggatttcggaagctatttcatagatttttgcaagaaaaggggccttctgtggattggggaaaaatccagagaccccctgaagattcgattcaaccctatgaaaagataaaggccaggggcntgcctgataatatatcttccgtgttgaacaaactagtggtggtgaaactcaatggtggtttgggaaccagcatgggctgcaaaggccctaaaagtctgattggtgtgaggaatgagaatacctttctggatctgactgttcagcaaattgaacatttgaataaaacctacaatacagatgttcctcttgttttaatgaactcttttaacacggatgaagataccaaaaaaatactacagaagtacaatcattgtcgtgtgaaaatctacactttcaatcaaagcaggtacccgaggattaataaagaatctttacttcctgtagcaaaggacgtgtcttactcaggggaaaatacagaagcttggtaccctccaggtcatggtgatatttacgccagtttctacaactctggattgcttgatacctttataggagaaggcaaagagtatatttttgtgtctaacatagataatctgggtgccacagtggatctgtatattcttaatcatctaatgaacccacccaatggaaaacgctgtgaatttgtcatggaagtcacaaataaaacacgtgcagatgtaaagggcgggacactcactcaatatgaaggcaaactgagactggtggaaattgctcaagtgccaaaagcacatgtagacgagttcaagtctgtatcaaagttcaaaatatttaatacaaacaacctatggatttctcttgcagcagttaaaagactgcaggagcaaaatgccattgacatggaaatcattgtgaatgcaaagactttggatggaggcctgaatgtcattcaattagaaactgcagtaggggctgccatcaaaagttttgagaattctctaggtattaatgtgccaaggagccgttttctgcctgtcaaaaccacatcagatctcttgctggtgatgtcaaacctctatagtcttaatgcaggatctctgacaatgagtgaaaagcgggaatttcctacagtgcccttggttaaattaggcagttcttttacgaaggttcaagattatctaagaagatttgaaagtataccagatatgcttgaattggatcacctcacagtttcaggagatgtgacatttggaaaaaatgtttcattaaagggaacggttatcatcattgcaaatcatggtgacagaattgatatcccacctggagcagtattagagaacaagattgtgtctggaaaccttcgcatcttggaccactgaaatgaaaaatactgtggacacttaaataatgggctagtttcttacaatgaaatgttctctaggataaaatagagttttctgcagtatgcttttagtctaagaaaagcacagatggagcaatactttccttctttgaagagaatcccaaaagttagttcatcttaaagtgcaatattgtttaatcttaaaactgggcaactttggaagaacttttaacagaagcctcaatgatgatcactttgaattgcttgtgatttcaaaaataaagcagtgaaaaaaaaaaaaaaaaaactcgagactagttctctcctcgagttttttttttttttttttttttcaaactccagttctccaagtgacaaatggagagataaatgtgaaaatattttgtgaattcttttttcataancaatgatttatttatgtgtccatctatttgtttgcttatccttcttgaccttaaagaacttaaagatgttattaaaacaataatgtttatttttatagtcgtatgatgaggctatagaaattctaagtgctgttgtttttctgaaggaaattgtttgcattgcatttact

SEQ ID NO: 458006 - DNA, 731 bp, Homo sapiens
cggggctgagctaagccgagcccacgtgtgaacggctctcccccccgccccggccccgccgctcgcagagagattcggaggagcccgggcgggggggaggaggagggggaggagggagcggagatctcggggctcggagccggccgccgctccgctccgatcgctgtggggcttggttttttgggggtgggggggcggggtgggctcagatatggaggcaaatgggagccaaggcacctcgggcagcgccaacgactcccagcacgaccccggtaaaatgtttatcggtggactgagctggcagacctcaccagatagccttagagactattttagcaaatttggagaaattagagaatgtatggtcatgagagatcccactacgaaacgctccagaggcttcggtttcgtcacgttcgcagacccagcaagtgtagataaagtattaggtcagccccaccatgagttagattccaagacgattgaccccaaagttgcatttcctcgtcgagcgcaacccaaggtgttctagctgagcgtttaagagcatggactctggaaccagactttgaatccttgctctgccactgcagctgtgtgaccttgagcaagctatctaaatattctgtgcctttgttttgtcatctgtacaatggagatgatgatggtatcaccttcatggggttgtcataaggattatgggacttaacataataaagtgtttagaatgg

SEQ ID NO: 458007 - DNA, 1152 bp, Homo sapiens
cggggctgagctaagccgagcccacgtgtgaacggctctcccccccgccccggccccgccgctcgcagagagattcggaggagcccgggcgggggggaggaggagggggaggagggagcggagatctcggggctcggagccggccgccgctccgctccgatcgctgtggggcttggttttttgggggtgggggggcggggtgggctcagatatggaggcaaatgggagccaaggcacctcgggcagcgccaacgactcccagcacgaccccggtaaaatgtttatcggtggactgagctggcagacctcaccagatagccttagagactattttagcaaatttggagaaattagagaatgtatggtcatgagagatcccactacgaaacgctccagaggcttcggtttcgtcacgttcgcagacccagcaagtgtagataaagtattaggtcagccccaccatgagttagattccaagacgattgaccccaaagttgcatttcctcgtcgagcgcaacccaagatggtcacaagaacaaagaaaatatttgtaggcgggttatctgcgaacacagtagtggaagatgtaaagcaatatttcgagcagtttggcaaggtggaagatgcaatgctgatgtttgataaaactaccaacaggcacagagggagagtagcgatttacgaagagcaaatggaagcgaaaaccccttttcttctttgggccggctgtgtattgctggggcacttgggcagacccccaaagacatccttaaagacaagagaaatcgggggctgtgtgaagatgtcacatctgcagatagggttcgaggtagagcggccttttgggttttctcctcatttggagaaatcgagaagtagcacggaagaccttcagacccagagcttgtgtacggcacagtccttgaaggatttgctcccattctcagggagcaagacccatcttaaacgtggaaacaaatacagcagagtaatacatacttgaggcttaatgtaagttaattcctcttggcacagccccagatatcttgattaaatggtctgcgaagtgctgagatatcttgataatgtacgttttacatttgattatataatcaattatgtttctcctaataaaatttaaaatgagctaaa

SEQ ID NO: 458008 - DNA, 485 bp, Homo sapiens
tagcaacagctgacagcagggcacccggccacaggagagaggtgacccagacccttaataaaaaaaccctcatgggagacaaattattgtgtgaaggaaaataactcaggctttcctcattgccaccctccgtgagattttaccccagacctgaggcggctgtactaacaggactctgatctttctctttgtgttcaaggatatcccaacttcgtggcgacctatggccgtggctaccccggatttgctccaagctatggctatcagttcccaggtgagtggcttggtctcccagggctttggaagcacaagaggtgggctgcatttgcggggaggtgagaggacccctaaagagaatgcatttcttacatgcatccacttgaaaatgacctatacatgataaatttcaaatccactgaagttcaaggccaggatgcagctcagagtttttgattaactcaggtataactcactggtgccgggta

SEQ ID NO: 458009 - DNA, 360 bp, Homo sapiens
tagaggatacccagatcgtgcgacatgagctggcagagctcaccagatagccttagagactattttagcaaatttggagaaattagagaatgtatggtcatgagagatcccactacgaaacgctccagaggcttcggtttcgtcacgttcgcagacccagcaagtgtagataaagtattaggtcagccccaccatgagttagattccaagacgattgaccccaaagttgcatttcctcgtcgagcgcaacccaagagttccttacaagacaatctgatttgatccgcaggagaatcctgtaaggtcaattatatagtcgctcttttatatatgacgcatgcagtaggctcagtatcttcc

SEQ ID NO: 458010 - DNA, 3521 bp, Homo sapiens
cggggctgagctaagccgagcccacgtgtgaacggctctcccccccgccccggccccgccgctcgcagagagattcggaggagcccgggcgggggggaggaggagggggaggagggagcggagatctcggggctcggagccggccgccgctccgctccgatcgctgtggggcttggttttttgggggtgggggggcggggtgggctcagatatggaggcaaatgggagccaaggcacctcgggcagcgccaacgactcccagcacgaccccggtaaaatgtttatcggtggactgagctggcagacctcaccagatagccttagagactattttagcaaatttggagaaattagagaatgtatggtcatgagagatcccactacgaaacgctccagaggcttcggtttcgtcacgttcgcagacccagcaagtgtagataaagtattaggtcagccccaccatgagttagattccaagacgattgaccccaaagttgcatttcctcgtcgagcgcaacccaagatggtcacaagaacaaagaaaatatttgtaggcgggttatctgcgaacacagtagtggaagatgtaaagcaatatttcgagcagtttggcaaggtggaagatgcaatgctgatgtttgataaaactaccaacaggcacagagggtttggctttgtcacttttgagaatgaagatgttgtggagaaagtctgtgagattcatttccatgaaatcaataataaaatggtagaatgtaagaaagctcagccgaaagaagtcatgttcccacctgggacaagaggccgggcccggggactgccttacaccatggacgcgttcatgcttggcatggggatgctgggatatcccaacttcgtggcgacctatggccgtggctaccccggatttgctccaagctatggctatcagttcccagcccagcagcggcttatggaccagtggcagcagcggcggtggcggcagcaagaggatcaggctccaacccggcgcggcccggaggcttcccgggggccaacagcccaggacctgtcgccgatctctacggccctgccagccaggactccggagtggggaattacataagtgcggccagcccacagccgggctcgggcttcggccacggcatagctggacctttgattgcaacggcctttacaaatggataccattgagcaggtgctttcgttgccatctcactctgagagcatacctggatgtccaggcaagactgggcgaagtttctgagtggccctttgtttaggtgatgtcctcagacctggacccccaccagcctcactccccatcccaaccagagatggctcacttcggatcgagggttgactacatctcatcatctcacgaatctgctgtaatataagacaacagcttttaaatgtgtatataacccatgatttcggttttgttttgttttgtttttcttgatggtttccctctccctccctctcttcccattctccttttaaatctctttgaatcacatttggtagtgattttgacttagtccagtagtcacatagctttaatatctagttcaaagctaaccatagtataattgttatattaaggagttattttttcttaaaacattttttttttgcttgttttggttctgttctcacttttaaaggatgctgagatggtaatatgactctccctattttggtaccaattctgagactgtatgaattttcaggtggaactttagcacacactgaagcaaagttgtgaagtgcagggcgggaggtgggcgtgagctttctattttgcgttgtagaagaagtgagatgtagtaagctaattaacagactttctagcagttctttttgtgatgtctctttgttaatctgagtctatctattttcggcaataaggtaaggacgacagtgttttgagtgtcctccttttctataagtgctttttttctgttgaaagaggtgatattataaggttttttgaaattgtgaattctaaaaaagaaatgttgtaaatacaattccattaactacatagaaactattaagaaagagagaatcaaaaatatttttgtgagggagtcggtcccaggcagtttgatgctctgtggaaggaggcgggaagggaacgttggccaagtcagttactgagatgaagatcgcccagctgccaggaccaccccaggacaagttagagcactgtttagctcctttgtctgtgtgatagacctaagaactgtattagtgttgtaccagcctattaacctcttgtctgtgcacagcttcaaatgttaccgtctagttagatttttatttaaaatatgaaaaactgcttttcccaagatgttttttaaaaacaaagctacaattttaatatttaacatatttaaagtttcaaagcacacctgtttggcttgggtgggggtggggtgggggggacattctttttcagtcttaatttttaaatatttgatcattttctattgtccaatcatttcagcacctccaaaggtccctaggacactttgcctctcttctccccctgccccccaccctgctcccacatctgggggcccatgggccaggagtggataagcctgcattaatacaacctttctccattcactttctatttacaaattaggaaagcaaccttttggtttatatatattttttttaatacctcagtgctgcaagtatcaccagagaggctatggaagaatttttttttaatttattgtagatgtaaacagaattttaaaaataaaaagtataaacatcactgcactgtgactggtgggaaaaactgacagtttcctctttgcacatgtttaacatttggctgttataatatatggtcctcggttggggaaagatacttatgatgaaggatattttttaatttaacttttttttaaatattggtaataggtcggcaacagcaactgtagaagtacaactcaatagatggcattaaaacatattgtagtgtggatatatattttttcttttttaaaatgtgatattgacgttttattaatattttttaaattgttacgtttataaatttggtacttaaggcacagccagtatgagacactgaatgcgacatttattataaagagctgctgcactcctatttttataaattttactaacaaagtagactaatgtagacattcacagacatggtagggcaaaagcatcttcaaactaaagactccaaaatgctaactcagaaagaaagaaaaaacccgttttcaattctaatgaaacagcaacaacattttttttaattaaaaaaaaaatcatgttctttgtttttctaataaaatgttaggttgtttggtgaggtttttttgttgtttttttcctttctttgtttcttttcttttcccccaaacaaccagattaaatgctgagcgcttttaaaatatcaaaacttgttcaagtcataaaacaacaaaacataagttttatttaaaaaaaaaaaaagaaagaaaaaa

SEQ ID NO: 458011 - DNA, 2625 bp, Homo sapiens
gccccccaaaataagtctccgtgcctggggaaaggcaccgttcgcttagaaggatcactgagaattgactggagaatgacttccacagaaagcaccctcaggctccaacccggcgcggcccggaggcttcccgggggccaacagcccaggacctgtcgccgatctctacggccctgccagccaggactccggagtggggaattacataagtgcggccagcccacagccgggctcgggcttcggccacggcatagctggacctttgattgcaacggcctttacaaatggataccattgagcaggtgctttcgttgccatctcactctgagagcatacctggatgtccaggcaagactgggcgaagtttctgagtggccctttgtttaggtgatgtcctcagacctggacccccaccagcctcactccccatcccaaccagagatggctcacttcggatcgagggttgactacatctcatcatctcacgaatctgctgtaatataagacaacagcttttaaatgtgtatataacccatgatttcggttttgttttgttttgtttttcttgatggtttccctctccctccctctcttcccattctccttttaaatctctttgaatcacatttggtagtgattttgacttagtccagtagtcacatagctttaatatctagttcaaagctaaccatagtataattgttatattaaggagttattttttcttaaaacattttttttttgcttgttttggttctgttctcacttttaaaggatgctgagatggtaatatgactctccctattttggtaccaattctgagactgtatgaattttcaggtggaactttagcacacactgaagcaaagttgtgaagtgcagggcgggaggtgggcgtgagctttctattttgcgttgtagaagaagtgagatgtagtaagctaattaacagactttctagcagttctttttgtgatgtctctttgttaatctgagtctatctattttcggcaataaggtaaggacgacagtgttttgagtgtcctccttttctataagtgctttttttctgttgaaagaggtgatattataaggttttttgaaattgtgaattctaaaaaagaaatgttgtaaatacaattccattaactacatagaaactattaagaaagagagaatcaaaaatatttttgtgagggagtcggtcccaggcagtttgatgctctgtggaaggaggcgggaagggaacgttggccaagtcagttactgagatgaagatcgcccagctgccaggaccaccccaggacaagttagagcactgtttagctcctttgtctgtgtgatagacctaagaactgtattagtgttgtaccagcctattaacctcttgtctgtgcacagcttcaaatgttaccgtctagttagatttttatttaaaatatgaaaaactgcttttcccaagatgttttttaaaaacaaagctacaattttaatatttaacatatttaaagtttcaaagcacacctgtttggcttgggtgggggtggggtgggggggacattctttttcagtcttaatttttaaatatttgatcattttctattgtccaatcatttcagcacctccaaaggtccctaggacactttgcctctcttctccccctgccccccaccctgctcccacatctgggggcccatgggccaggagtggataagcctgcattaatacaacctttctccattcactttctatttacaaattaggaaagcaaccttttggtttatatatattttttttaatacctcagtgctgcaagtatcaccagagaggctatggaagaatttttttttaatttattgtagatgtaaacagaattttaaaaataaaaagtataaacatcactgcactgtgactggtgggaaaaactgacagtttcctctttgcacatgtttaacatttggctgttataatatatggtcctcggttggggaaagatacttatgatgaaggatattttttaatttaacttttttttaaatattggtaataggtcggcaacagcaactgtagaagtacaactcaatagatggcattaaaacatattgtagtgtggatatatattttttcttttttaaaatgtgatattgacgttttattaatattttttaaattgttacgtttataaatttggtacttaaggcacagccagtatgagacactgaatgcgacatttattataaagagctgctgcactcctatttttataaattttactaacaaagtagactaatgtagacattcacagacatggtagggcaaaagcatcttcaaactaaagactccaaaatgctaactcagaaagaaagaaaaaacccgttttcaattctaatgaaacagcaacaacattttttttaattaaaaaaaaaatcatgttctttgtttttctaataaaatgttaggttgtttggtgaggtttttttgttgtttttttcctttctttgtttcttttcttttcccccaaacaaccagattaaatgctgagcgcttttaaaatatcaaaacttgttcaagtcataaaacaacaaaacataagttttatttaaaaaaaaaaaaagaaagaaaaaa

SEQ ID NO: 458012 - DNA, 5401 bp, Homo sapiens
cggggctgagctaagccgagcccacgtgtgaacggctctcccccccgccccggccccgccgctcgcagagagattcggaggagcccgggcgggggggaggaggagggggaggagggagcggagatctcggggctcggagccggccgccgctccgctccgatcgctgtggggcttggttttttgggggtgggggggcggggtgggctcagatatggaggcaaatgggagccaaggcacctcgggcagcgccaacgactcccagcacgaccccggtaaaatgtttatcggtggactgagctggcagacctcaccagatagccttagagactattttagcaaatttggagaaattagagaatgtatggtcatgagagatcccactacgaaacgctccagaggcttcggtttcgtcacgttcgcagacccagcaagtgtagataaagtattaggtcagccccaccatgagttagattccaagacgattgaccccaaagttgcatttcctcgtcgagcgcaacccaagatggtcacaagaacaaagaaaatatttgtaggcgggttatctgcgaacacagtagtggaagatgtaaagcaatatttcgagcagtttggcaaggtggaagatgcaatgctgatgtttgataaaactaccaacaggcacagagggtttggctttgtcacttttgagaatgaagatgttgtggagaaagtctgtgagattcatttccatgaaatcaataataaaatggtagaatgtaagaaagctcagccgaaagaagtcatgttcccacctgggacaagaggccgggcccggggactgccttacaccatggacgcgttcatgcttggcatggggatgctgggatatcccaacttcgtggcgacctatggccgtggctaccccggatttgctccaagctatggctatcagttcccagcccagcagcggcttatggaccagtggcagcagcggcggtggcggcagcaagaggatcagtcctgaatagctacagtgctcaaccgaattttggcgcgcccgcttccccggcaggctccaacccggcgcggcccggaggcttcccgggggccaacagcccaggacctgtcgccgatctctacggccctgccagccaggactccggagtggggaattacataagtgcggccagcccacagccgggctcgggcttcggccacggcatagctggacctttgattgcaacggcctttacaaatggataccattgagcaggtgctttcgttgccatctcactctgagagcatacctggatgtccaggcaagactgggcgaagtttctgagtggccctttgtttaggtgatgtcctcagacctggacccccaccagcctcactccccatcccaaccagagatggctcacttcggatcgagggttgactacatctcatcatctcacgaatctgctgtaatataagacaacagcttttaaatgtgtatataacccatgatttcggttttgttttgttttgtttttcttgatggtttccctctccctccctctcttcccattctccttttaaatctctttgaatcacatttggtagtgattttgacttagtccagtagtcacatagctttaatatctagttcaaagctaaccatagtataattgttatattaaggagttattttttcttaaaacattttttttttgcttgttttggttctgttctcacttttaaaggatgctgagatggtaatatgactctccctattttggtaccaattctgagactgtatgaattttcaggtggaactttagcacacactgaagcaaagttgtgaagtgcagggcgggaggtgggcgtgagctttctattttgcgttgtagaagaagtgagatgtagtaagctaattaacagactttctagcagttctttttgtgatgtctctttgttaatctgagtctatctattttcggcaataaggtaaggacgacagtgttttgagtgtcctccttttctataagtgctttttttctgttgaaagaggtgatattataaggttttttgaaattgtgaattctaaaaaagaaatgttgtaaatacaattccattaactacatagaaactattaagaaagagagaatcaaaaatatttttgtgagggagtcggtcccaggcagtttgatgctctgtggaaggaggcgggaagggaacgttggccaagtcagttactgagatgaagatcgcccagctgccaggaccaccccaggacaagttagagcactgtttagctcctttgtctgtgtgatagacctaagaactgtattagtgttgtaccagcctattaacctcttgtctgtgcacagcttcaaatgttaccgtctagttagatttttatttaaaatatgaaaaactgcttttcccaagatgttttttaaaaacaaagctacaattttaatatttaacatatttaaagtttcaaagcacacctgtttggcttgggtgggggtggggtgggggggacattctttttcagtcttaatttttaaatatttgatcattttctattgtccaatcatttcagcacctccaaaggtccctaggacactttgcctctcttctccccctgccccccaccctgctcccacatctgggggcccatgggccaggagtggataagcctgcattaatacaacctttctccattcactttctatttacaaattaggaaagcaaccttttggtttatatatattttttttaatacctcagtgctgcaagtatcaccagagaggctatggaagaatttttttttaatttattgtagatgtaaacagaattttaaaaataaaaagtataaacatcactgcactgtgactggtgggaaaaactgacagtttcctctttgcacatgtttaacatttggctgttataatatatggtcctcggttggggaaagatacttatgatgaaggatattttttaatttaacttttttttaaatattggtaataggtcggcaacagcaactgtagaagtacaactcaatagatggcattaaaacatattgtagtgtggatatatattttttcttttttaaaatgtgatattgacgttttattaatattttttaaattgttacgtttataaatttggtacttaaggcacagccagtatgagacactgaatgcgacatttattataaagagctgctgcactcctatttttataaattttactaacaaagtagactaatgtagacattcacagacatggtagggcaaaagcatcttcaaactaaagactccaaaatgctaactcagaaagaaagaaaaaacccgttttcaattctaatgaaacagcaacaacattttttttaattaaaaaaaaaatcatgttctttgtttttctaataaaatgttaggttgtttggtgaggtttttttgttgtttttttcctttctttgtttcttttcttttcccccaaacaaccagattaaatgctgagcgcttttaaaatatcaaaacttgttcaagtcataaaacaacaaaacataagttttatttaaaaaaaaaaaaagaaagaaaaaatagtaaattcccagaaattcagtgtttagacgagggaatttaattcctattttgtccatgttggtgatgtactgtacttcccttccttttctctgcatcccccatcacctcatagaagactctttgttgatcattgtatgttaataatgtataaaatggctatcttgtaagcgtgctgtcctggtactagtgtagcgactttttttctcctctttcttctagtacatattgataggtataacataattaaggtttaaaaaaaattagacatagttattcagatttaggaccagtaaggatagaactttctcttatttatgaaaaaaaaatgctaataattttggggcagttttttcctttaattatttttttcaatttcaagtttaattttattttagctgatctgatgtggtttcaactaacccaaggtctcaccatgttaaaatgccggcggactctacggcgttttgtagatcccccccccccacccactgtgaaggggtgccatactaccttaaatgctaatgctagatatgcaaaactggatttttttaatttattttttaaaagagggaggcatggtatattaaaatgattttactaagagaaaaaatatttttttaagaatgctcagaagaaattgataatctgtgtgaatatgttttagatgtttatataccttttgaagagacccagtagcccatagcacaaatcttgtggaaatccgatatgttttaatgtggctacctaggtttaaggttcacgttagtccccccattccatctagaagtccattttgaaagatttttgtaaattcttttaacactgatgtttcagcctcgtctttgtttcagttaagctcaatggcgaacatgggaaccacctttcgccttccctgggggagaaaccctcttggctgatggcttttccccggaattatcaaacagccaccgggtgactttctggcttccagatccatctgcctgagacccccgaactcctctcctcccaagcagaggcgagtgagtggcattagctcccggacccattcccggtcctagctgggcatggggctgacggagatgaccaagccttggtctgctctctagcagcttccacagacttggctcgtggccttccttatatccactgggaacaaacagcctcgcgctctataccaaacagcctcgcgctctatcccagtcgcccattagcttgattcaaacaaagccccagcaggcctttgcgtttttatccttcataaccttcatcttaatttgaacttgtagcttggactttaaggtagcatggctctattgctgtcaatttactgtttcactgcacagcaatcacagccagtgaatgttacacacatcttgctagactagtataaaaatcattgggtaattgttggttctaatgacctgaaaggtgttcagtttttgttcttggttttgttttgtttttgatttcttgggggtgggttttgcttgttgttccttttcatttgggggtttttggggaaaaaatttatttttggttccaaatagaaaaacaaaacctattttgatctttagtgcaaacgagggctagggacttagcctcctccaccacctccacactgcttcattctgccattcactcactgcagcatattcaagaataaagcaatatcgtttactacattttttattgaaggtcagccatgctttctgtattatattgcatatgaaattgtttacaaaaaacactaactcatacttctctttattggttgcaagtggcacgcaggaacagagggaggtggggggctggtgggggagggg

SEQ ID NO: 458013 - DNA, 3351 bp, Homo sapiens
cggggctgagctaagccgagcccacgtgtgaacggctctcccccccgccccggccccgccgctcgcagagagattcggaggagcccgggcgggggggaggaggagggggaggagggagcggagatctcggggctcggagccggccgccgctccgctccgatcgctgtggggcttggttttttgggggtgggggggcggggtgggctcagatatggaggcaaatgggagccaaggcacctcgggcagcgccaacgactcccagcacgaccccggtaaaatgtttatcggtggactgagctggcagacctcaccagatagccttagagactattttagcaaatttggagaaattagagaatgtatggtcatgagagatcccactacgaaacgctccagaggcttcggtttcgtcacgttcgcagacccagcaagtgtagataaagtattaggtcagccccaccatgagttagattccaagacgattgaccccaaagttgcatttcctcgtcgagcgcaacccaagatggtcacaagaacaaagaaaatatttgtaggcgggttatctgcgaacacagtagtggaagatgtaaagcaatatttcgagcagtttggcaaggtggaagatgcaatgctgatgtttgataaaactaccaacaggcacagagggtttggctttgtcacttttgagaatgaagatgttgtggagaaagtctgtgagattcatttccatgaaatcaataataaaatggtagaatgtaagaaagctcagccgaaagaagtcatgttcccacctgggacaagaggccgggcccggggactgccttacaccatggacgcgttcatgcttggcatggggatgctgggatatcccaacttcgtggcgacctatggccgtggctaccccggatttgctccaagctatggctatcagttcccagcccagcagcggcttatggaccagtggcagcagcggcggtggcggcagcaagaggatcagtcctgaatagctacagtgctcaaccgaattttggcgcgcccgcttccccggcaggctccaacccggcgcggcccggaggcttcccgggggccaacagcccaggacctgtcgccgatctctacggccctgccagccaggactccggagtggggaattacataagtgcggccagcccacagccgggctcgggcttcggccacggcatagctggacctttgattgcaacggcctttacaaatggataccattgagcaggtgctttcgttgccatctcactctgagagcatacctggatgtccaggcaagactgggcgaagtttctgagtggccctttgtttaggtgatgtcctcagacctggacccccaccagcctcactccccatcccaaccagagatggctcacttcggatcgagggttgactacatctcatcatctcacgaatctgctgtaatataagacaacagcttttaaatgtgtatataacccatgatttcggttttgttttgttttgtttttcttgatggtttccctctccctccctctcttcccattctccttttaaatctctttgaatcacatttggtagtgattttgacttagtccagtagtcacatagctttaatatctagttcaaagctaaccatagtataattgttatattaaggagttattttttcttaaaacattttttttttgcttgttttggttctgttctcacttttaaaggatgctgagatggtaatatgactctccctattttggtaccaattctgagactgtatgaattttcaggtggaactttagcacacactgaagcaaagttgtgaagtgcagggcgggaggtgggcgtgagctttctattttgcgttgtagaagaagtgagatgtagtaagctaattaacagactttctagcagttctttttgtgatgtctctttgttaatctgagtctatctattttcggcaataaggtaaggacgacagtgttttgagtgtcctccttttctataagtgctttttttctgttgaaagaggtgatattataaggttttttgaaattgtgaattctaaaaaagaaatgttgtaaatacaattccattaactacatagaaactattaagaaagagagaatcaaaaatatttttgtgagggagtcggtcccaggcagtttgatgctctgtggaaggaggcgggaagggaacgttggccaagtcagttactgagatgaagatcgcccagctgccaggaccaccccaggacaagttagagcactgtttagctcctttgtctgtgtgatagacctaagaactgtattagtgttgtaccagcctattaacctcttgtctgtgcacagcttcaaatgttaccgtctagttagatttttatttaaaatatgaaaaacctgctcccacatctgggggcccatgggccaggagtggataagcctgcattaatacaacctttctccattcactttctatttacaaattaggaaagcaaccttttggtttatatatattttttttaatacctcagtgctgcaagtatcaccagagaggctatggaagaatttttttttaatttattgtagatgtaaacagaattttaaaaataaaaagtataaacatcactgcactgtgactggtgggaaaaactgacagtttcctctttgcacatgtttaacatttggctgttataatatatggtcctcggttggggaaagatacttatgatgaaggatattttttaatttaacttttttttaaatattggtaataggtcggcaacagcaactgtagaagtacaactcaatagatggcattaaaacatattgtagtgtggatatatattttttcttttttaaaatgtgatattgacgttttattaatattttttaaattgttacgtttataaatttggtacttaaggcacagccagtatgagacactgaatgcgacatttattataaagagctgctgcactcctatttttataaattttactaacaaagtagactaatgtagacattcacagacatggtagggcaaaagcatcttcaaactaaagactccaaaatgctaactcagaaagaaagaaaaaacccgttttcaattctaatgaaacagcaacaacattttttttaattaaaaaaaaaatcatgttctttgtttttctaataaaatgttaggttgtttggtgaggtttttttgttgtttttttcctttctttgtttcttttcttttcccccaaacaaccagattaaatgctgagcgcttttaaaatatcaaaacttgttcaagtcataaaacaacaaaacataagttttatttaaaaaaaaaaaaagaaagaaaaaa

SEQ ID NO: 458014 - DNA, 3447 bp, Homo sapiens
cggggctgagctaagccgagcccacgtgtgaacggctctcccccccgccccggccccgccgctcgcagagagattcggaggagcccgggcgggggggaggaggagggggaggagggagcggagatctcggggctcggagccggccgccgctccgctccgatcgctgtggggcttggttttttgggggtgggggggcggggtgggctcagatatggaggcaaatgggagccaaggcacctcgggcagcgccaacgactcccagcacgaccccggtaaaatgtttatcggtggactgagctggcagacctcaccagatagccttagagactattttagcaaatttggagaaattagagaatgtatggtcatgagagatcccactacgaaacgctccagaggcttcggtttcgtcacgttcgcagacccagcaagtgtagataaagtattaggtcagccccaccatgagttagattccaagacgattgaccccaaagttgcatttcctcgtcgagcgcaacccaagatggtcacaagaacaaagaaaatatttgtaggcgggttatctgcgaacacagtagtggaagatgtaaagcaatatttcgagcagtttggcaaggtggaagatgcaatgctgatgtttgataaaactaccaacaggcacagagggtttggctttgtcacttttgagaatgaagatgttgtggagaaagtctgtgagattcatttccatgaaatcaataataaaatggtagaatgtaagaaagctcagccgaaagaagtcatgttcccacctgggacaagaggccgggcccggggactgccttacaccatggacgcgttcatgcttggcatggggatgctgggatatcccaacttcgtggcgacctatggccgtggctaccccggatttgctccaagctatggctatcagttcccagcccagcagcggcttatggaccagtggcagcagcggcggtggcggcagcaagaggatcagtcctgaatagctacagtgctcaaccgaattttggcgcgcccgcttccccggcaggctccaacccggcgcggcccggaggcttcccgggggccaacagcccaggacctgtcgccgatctctacggccctgccagccaggactccggagtggggaattacataagtgcggccagcccacagccgggctcgggcttcggccacggcatagctggacctttgattgcaacggcctttacaaatggataccattgagcaggtgctttcgttgccatctcactctgagagcatacctggatgtccaggcaagactgggcgaagtttctgagtggccctttgtttaggtgatgtcctcagacctggacccccaccagcctcactccccatcccaaccagagatggctcacttcggatcgagggttgactacatctcatcatctcacgaatctgctgtaatataagacaacagcttttaaatgtgtatataacccatgatttcggttttgttttgttttgtttttcttgatggtttccctctccctccctctcttcccattctccttttaaatctctttgaatcacatttggtagtgattttgacttagtccagtagtcacatagctttaatatctagttcaaagctaaccatagtataattgttatattaaggagttattttttcttaaaacattttttttttgcttgttttggttctgttctcacttttaaaggatgctgagatggtaatatgactctccctattttggtaccaattctgagactgtatgaattttcaggtggaactttagcacacactgaagcaaagttgtgaagtgcagggcgggaggtgggcgtgagctttctattttgcgttgtagaagaagtgagatgtagtaagctaattaacagactttctagcagttctttttgtgatgtctctttgttaatctgagtctatctattttcggcaataaggtaaggacgacagtgttttgagtgtcctccttttctataagtgctttttttctgttgaaagaggtgatattataaggttttttgaaattgtgaattctaaaaaagaaatgttgtaaatacaattccattaactacatagaaactattaagaaagagagaatcaaaaatatttttgtgagggagtcggtcccaggcagtttgatgctctgtggaaggaggcgggaagggaacgttggccaagtcagttactgagatgaagatcgcccagctgccaggaccaccccaggacaagttagagcactgtttagctcctttgtctgtgtgatagacctaagaactgtattagtgttgtaccagcctattaacctcttgtctgtgcacagcttcaaatgttaccgtctagttagatttttatttaaaatatgaaaaactgcttttcccaagatgttttttaaaaacaaagctacaattttaatatttaacatatttaaagtttcaaagcacacctgtttggcttgggtgggggtggggtgggggggacattctttttcagtcttaatttttaaatatttgatcattttctattgtccaatcatttcagcacctccaaaggtccctaggacactttgcctctcttctccccctgccccccaccctgctcccacatctgggggcccatgggccaggagtggataagcctgcattaatacaacctttctccattcactttctatttacaaattaggaaagcaaccttttggtttatatatattttttttaatacctcagtgctgcaagtatcaccagagaggctatggaagaatttttttttaatttattgtagatgtaaacagaattttaaaaataaaaagtataaacatcactgcactgtgactggtgggaaaaactgacagtttcctctttgcacatgtttaacatttggctgttataatatatggtcctcggttggggaaagatacttatgatgaaggatattttttaatttaacttttttttaaatattggtaataggtcggcaacagcaactgtagaagtacaactcaatagatggcattaaaacatattgtagtgtggatatatattttttcttttttaaaatgtgatattgacgttttattaatattttttaaattgttacgtttataaatttggtacttaaggcacagccagtatgagacactgaatgcgacatttattataaagagctgctgcactcctatttttataaattttactaacaaagtagactaatgtagacattcacagacatggtagggcaaaagcatcttcaaactaaagactccaaaatgctaactcagaaagaaagaaaaaacccgttttcaattctaatgaaacaaccagattaaatgctgagcgcttttaaaatatcaaaacttgttcaagtcataaaacaacaaaacataagttttatttaaaaaaaaaaaaagaaagaaaaaa

SEQ ID NO: 458015 - DNA, 2851 bp, Homo sapiens
cggggctgagctaagccgagcccacgtgtgaacggctctcccccccgccccggccccgccgctcgcagagagattcggaggagcccgggcgggggggaggaggagggggaggagggagcggagatctcggggctcggagccggccgccgctccgctccgatcgctgtggggcttggttttttgggggtgggggggcggggtgggctcagatatggaggcaaatgggagccaaggcacctcgggcagcgccaacgactcccagcacgaccccggtaaaatgtttatcggtggactgagctggcagacctcaccagatagccttagagactattttagcaaatttggagaaattagagaatgtatggtcatgagagatcccactacgaaacgctccagaggcttcggtttcgtcacgttcgcagacccagcaagtgtagataaagtattaggtcagccccaccatgagttagattccaagacgattgaccccaaagttgcatttcctcgtcgagcgcaacccaagatggtcacaagaacaaagaaaatatttgtaggcgggttatctgcgaacacagtagtggaagatgtaaagcaatatttcgagcagtttggcaaggtggaagatgcaatgctgatgtttgataaaactaccaacaggcacagagggtttggctttgtcacttttgagaatgaagatgttgtggagaaagtctgtgagattcatttccatgaaatcaataataaaatggtagaatgtaagaaagctcagccgaaagaagtcatgttcccacctgggacaagaggccgggcccggggactgccttacaccatggacgcgttcatgcttggcatggggatgctgggatatcccaacttcgtggcgacctatggccgtggctaccccggatttgctccaagctatggctatcagttcccagcccagcagcggcttatggaccagtggcagcagcggcggtggcggcagcaagaggatcagtcctgaatagctacagtgctcaaccgaattttggcgcgcccgcttccccggcaggctccaacccggcgcggcccggaggcttcccgggggccaacagcccaggacctgtcgccgatctctacggccctgccagccaggactccggagtggggaattacataagtgcggccagcccacagccgggctcgggcttcggccacggcatagctggacctttgattgcaacggcctttacaaatggataccattgagcaggtgctttcgttgccatctcactctgagagcatacctggatgtccaggcaagactgggcgaagtttctgagtggccctttgtttaggtgatgtcctcagacctggacccccaccagcctcactccccatcccaaccagagatggctcacttcggatcgagggttgactacatctcatcatctcacgaatctgctgtaatataagacaacagcttttaaatgtgtatataacccatgatttcggttttgttttgttttgtttttcttgatggtttccctctccctccctctcttcccattctccttttaaatctctttgaatcacatttggtagtgattttgacttagtccagtagtcacatagctttaatatctagttcaaagctaaccatagtataattgttatattaaggagttattttttcttaaaacattttttttttgcttgttttggttctgttctcacttttaaaggatgctgagatggtaatatgactctccctattttggtaccaattctgagactgtatgaattttcaggtggaactttagcacacactgaagcaaagttgtgaagtgcagggcgggaggtgggcgtgagctttctattttgcgttgtagaagaagtgagatgtagtaagctaattaacagactttctagcagttctttttgtgatgtctctttgttaatctgagtctatctattttcggcaataaggtaaggacgacagtgttttgagtgtcctccttttctataagtgctttttttctgttgaaagaggtgatattataaggttttttgaaattgtgaattctaaaaaagaaatgttgtaaatacaattccattaactacatagaaactattaagaaagagagaatcaaaaatatttttgtgagggagtcggtcccaggcagtttgatgctctgtggaaggaggcgggaagggaacgttggccaagtcagttactgagatgaagatcgcccagctgccaggaccaccccaggacaagttagagcactgtttagctcctttgtctgtgtgatagacctaagaactgtattagtgttgtaccagcctattaacctcttgtctgtgcacagcttcaaatgttaccgtctagttagatttttatttaaaatatgaaaaactgcttttcccaagatgttttttaaaaacaaagctacaattttaatatttaacatatttaaagtttcaaagcacacctgtttggcttgggtgggggtggggtgggggggacattctttttcagtcttaatttttaaatatttgatcattttctattgtccaatcatttcagcacctccaaaggtccctaggacactttgcctctcttctccccctgccccccaccctgctcccacatctgggggcccatgggccaggagtggataagcctgcattaatacaacctttctccattcactttctatttacaaattaggaaagcaaccttttggtttatatatattttttttaatacctcagtgctgcaagtatcaccagagaggctatggaagaatttttttttaatttattgtagatgtaaacagaattttaaaaataaaaagtataaacatca

SEQ ID NO: 458016 - DNA, 2701 bp, Homo sapiens
cggggctgagctaagccgagcccacgtgtgaacggctctcccccccgccccggccccgccgctcgcagagagattcggaggagcccgggcgggggggaggaggagggggaggagggagcggagatctcggggctcggagccggccgccgctccgctccgatcgctgtggggcttggttttttgggggtgggggggcggggtgggctcagatatggaggcaaatgggagccaaggcacctcgggcagcgccaacgactcccagcacgaccccggtaaaatgtttatcggtggactgagctggcagacctcaccagatagccttagagactattttagcaaatttggagaaattagagaatgtatggtcatgagagatcccactacgaaacgctccagaggcttcggtttcgtcacgttcgcagacccagcaagtgtagataaagtattaggtcagccccaccatgagttagattccaagacgattgaccccaaagttgcatttcctcgtcgagcgcaacccaagatggtcacaagaacaaagaaaatatttgtaggcgggttatctgcgaacacagtagtggaagatgtaaagcaatatttcgagcagtttggcaaggtggaagatgcaatgctgatgtttgataaaactaccaacaggcacagagggtttggctttgtcacttttgagaatgaagatgttgtggagaaagtctgtgagattcatttccatgaaatcaataataaaatggtagaatgtaagaaagctcagccgaaagaagtcatgttcccacctgggacaagaggccgggcccggggactgccttacaccatggacgcgttcatgcttggcatggggatgctgggatatcccaacttcgtggcgacctatggccgtggctaccccggatttgctccaagctatggctatcagttcccagcccagcagcggcttatggaccagtggcagcagcggcggtggcggcagcaagaggatcagtcctgaatagctacagtgctcaaccgaattttggcgcgcccgcttccccggcaggctccaacccggcgcggcccggaggcttcccgggggccaacagcccaggacctgtcgccgatctctacggccctgccagccaggactccggagtggggaattacataagtgcggccagcccacagccgggctcgggcttcggccacggcatagctggacctttgattgcaacggcctttacaaatggataccattgagcaggtgctttcgttgccatctcactctgagagcatacctggatgtccaggcaagactgggcgaagtttctgagtggccctttgtttaggtgatgtcctcagacctggacccccaccagcctcactccccatcccaaccagagatggctcacttcggatcgagggttgactacatctcatcatctcacgaatctgctgtaatataagacaacagcttttaaatgtgtatataacccatgatttcggttttgttttgttttgtttttcttgatggtttccctctccctccctctcttcccattctccttttaaatctctttgaatcacatttggtagtgattttgacttagtccagtagtcacatagctttaatatctagttcaaagctaaccatagtataattgttatattaaggagttattttttcttaaaacattttttttttgcttgttttggttctgttctcacttttaaaggatgctgagatggtaatatgactctccctattttggtaccaattctgagactgtatgaattttcaggtggaactttagcacacactgaagcaaagttgtgaagtgcagggcgggaggtgggcgtgagctttctattttgcgttgtagaagaagtgagatgtagtaagctaattaacagactttctagcagttctttttgtgatgtctctttgttaatctgagtctatctattttcggcaataaggtaaggacgacagtgttttgagtgtcctccttttctataagtgctttttttctgttgaaagaggtgatattataaggttttttgaaattgtgaattctaaaaaagaaatgttgtaaatacaattccattaactacatagaaactattaagaaagagagaatcaaaaatatttttgtgagggagtcggtcccaggcagtttgatgctctgtggaaggaggcgggaagggaacgttggccaagtcagttactgagatgaagatcgcccagctgccaggaccaccccaggacaagttagagcactgtttagctcctttgtctgtgtgatagacctaagaactgtattagtgttgtaccagcctattaacctcttgtctgtgcacagcttcaaatgttaccgtctagttagatttttatttaaaatatgaaaaactgcttttcccaagatgttttttaaaaacaaagctacaattttaatatttaacatatttaaagtttcaaagcaccctgctcccacatctgggggcccatgggccaggagtggataagcctgcattaatacaacctttctccattcactttctatttacaaattaggaaagcaaccttttggtttatatatattttttttaatacctcagtgctgcaagtatcaccagagaggctatggaagaatttttttttaatttattgtagatgtaaacagaattttaaaaataaaaagtataaacatca

SEQ ID NO: 458017 - DNA, 978 bp, Homo sapiens
tagaggatacccagatcgtgcgacatgagctggcagagctcaccagatagccttagagactattttagcaaatttggagaaattagagaatgtatggtcatgagagatcccactacgaaacgctccagaggcttcggtttcgtcacgttcgcagacccagcaagtgtagataaagtattaggtcagccccaccatgagttagattccaagacgattgaccccaaagttgcatttcctcgtcgagcgcaacccaaggtaagtaggagaataaacagtaggattttagcactcagagatgattgccaagaatttcaaatttcaaacagcattggccatgaactgttgaagcctggtattcactgttccttcggggtatcaggacaggctgggcaagtagtcctgtgagataaccatgcgtctctaagttagccatcccaaggtggcttctgaacatccacctgggggcagggacaagtctgatgcttagtgggaggacgtgtttccatcgactgcagtattttttgcaaggattctatttgttttttaagcatttccaatatcatatcaggaaaagtcgaacatttccttgtgactctttcggagggtactctttgaggctttacaacttggagttaatgcagaggagtagagtttgactaaacagctgatcctttcttggaaaagacaacttcttaggcccataaagccttaaatctgggagggcaagcagtggatatcttggttttaggttggttggataagtcagggcatacttgaaaccaacagtgcttcttatttgtgcaagtgctggtgcctgaaaaaaatgtatattctgttgatttgggatggagagttctgtagatgtctattagctccacttggtgcagagctgagcttcaattcctgggtatccttgttaactttctgtctcaattgatcatgtcataatgttgatcagtggggtgtctttcacatggt

SEQ ID NO: 458018 - DNA, 1141 bp, Homo sapiens
cggggctgagctaagccgagcccacgtgtgaacggctctcccccccgccccggccccgccgctcgcagagagattcggaggagcccgggcgggggggaggaggagggggaggagggagcggagatctcggggctcggagccggccgccgctccgctccgatcgctgtggggcttggttttttgggggtgggggggcggggtgggctcagatatggaggcaaatgggagccaaggcacctcgggcagcgccaacgactcccagcacgaccccggtaaaatgtttatcggtggactgagctggcagacctcaccagatagccttagagactattttagcaaatttggagaaattagagaatgtatggtcatgagagatcccactacgaaacgctccagaggcttcggtttcgtcacgttcgcagacccagcaagtgtagataaagtattaggtcagccccaccatgagttagattccaagacgattgaccccaaagttgcatttcctcgtcgagcgcaacccaaggtgttctagctgagcgtttaagagcatggactctggaaccagactttgaatccttgctctgccactgcagctgtgtgaccttgagcaagctatctaaatattctgtgcctttgttttgtcatctgtacaatggagatgatgatggtatcaccttcatggggttgtcataaggattatgggacttaacataataaagtgtttagaatggtgtctgcaacataaggaagtgtatgggtgtgtgagttgtggggttgttagaaaggagcacgtcctgtggcaggtttgggtaagtgctccgtgcctgccttacgtagtagttggagaacgctaagtactgctgtcttctgccttacgtatttttccttaagtaatgtttgagaaatacaaaagaagacacacacacgtggttgtgcgtttatgcatataaatgtatgtgacacgggtagaattgcagtgtaatttggattcagacaaattcatgtgccataacgaagtgtgtggtttgttggcagcacgggctttggactcagagggacctagtttgaaacttgataactgccactaactctgtgactttaggaaggtgttccagcctttctgggtttcaattctgtactt

SEQ ID NO: 458019 - DNA, 211 bp, Homo sapiens
agataggcttggtaggggcggagggagtggggactagggatttggagctgaggaggatgtcatcctggcccctcatggcacggtgtctcagaattacatattcatgctggcaaccacagaactagtcctagagataatttcctttcccagaatatgacaatctgttcccatgtatagcacactgatgaccttaacaattgtgcaattttag

SEQ ID NO: 458020 - DNA, 538 bp, Homo sapiens
cgttcacaatagagaaatcatgaaaccagcttgtgaatgacgtgatgccacataggccggggcctgagaatatgggaaaacaaaactgcaaatagaggctggatcctactcaccccccatcaccctgcattttacacattgaagtaaaatgttatttttactgtcgttatttttattactttctctccaggtgttctagctgagcgtttaagagcatggactctggaaccagactttgaatccttgctctgccactgcagctgtgtgaccttgagcaagctatctaaatattctgtgcctttgttttgtcatctgtacaatggagatgatgatggtatcaccttcatggggttgtcataaggattatgggacttaacataataaagtgtttagaatggtgtctgcaacataaggaagtgtatgggtgtgtgagttgtggggttgttagaaaggagcacgtcctgtggcaggtttgggtaagtgctccgtgcctgccttacgtagtagttggagaacgctaagtactgctgtcttctgc

SEQ ID NO: 458021 - DNA, 456 bp, Homo sapiens
ccatctctctctttctctctctacagatagccttagagactattttagcaaatttggagaaattagagaatgtatggtcatgagagatcccactacgaaacgctccaggtaaaccattcccttctggattttgtctttattttagaacaaagtttaagttttatttttggaggtgtcttcggaagtagctaagcggattagaatggggctcaggcgcgtggctgatctcgaacggcgctctataccacccccaccgccccctagtaaccccagaggttattgttaattggagctgaactctggatacagagatacccatctctctgcttttaagtcattttcccgtcgcttctttttctctgtttaaaatgacattcagcttcatttactttcgcatagtttttttttttcttttgatcttaatgtgtgtttcccccacactcccagctccccaaa

SEQ ID NO: 458022 - DNA, 524 bp, Homo sapiens
ctccattttatgttttcttctggacatcctggccttccctgccctgcagagcatacctggatgtccaggcaagactgggcgaagtttctgagtggccctttgtttaggtgatgtcctcagacctggacccccaccagcctcactccccatcccaaccagagatggctcacttcggatcgagggttgactacatctcatcatctcacgaatctgctgtaatataagacaacagcttttaaatgtgtatataacccatgatttcggttttgttttgttttgtttttcttgatggtttccctctccctccctctcttcccattctccttttaaatctctttgaatcacatttggtagtgattttgacttagtccagtagtcacatagctttaatatctagttcaaagctaaccatagtataattgttatattaaggagttattttttcttaaaacattttttttttgcttgttttggttctgttctcacttttaaaggatgctgagatggtaatatgactctcccta

SEQ ID NO: 458023 - DNA, 721 bp, Homo sapiens
cgatcctgtgtttgtgctcccgaaggacttggcgacttggctaacaaggagacatttgttatttcatttcctcatccattattcatgcagtgagagatggtcacaagaacaaagaaaatatttgtaggcgggttatctgcgaacacagtagtggaagatgtaaagcaatatttcgagcagtttggcaagctggcacagcatgacacatgcatgcatgcttctgactaacacactcacccacactagcagcatcagtacgggcttctgcgcttctgatcaactttcttgcaccaatgcaagcatgttgtggcagcacaagctctgtgcagcattccatttcccatgcacacatcacataataccaatggtagaatgtaagaaagctcagccgaaagaagtcatgttcccacctgggacaagaggccgggcccggggactgccttacaccatggacgcgttcatgcttggcatggggatgctgggatatcccaacttcgtggcgacctatggccgtggctaccccggatttgctccaagctatggctatcagttcccagactatttgccggtttcacaagacataatttttatcaactagctcttaagagaggcatagcaaagtgggggttgctaccatttctagagagagaggacacagtcccggcctgggctgcccccgctccagtcaatgctcactgaaagtctgtcttagctgcctgtt

SEQ ID NO: 458024 - DNA, 3575 bp, Homo sapiens
cggggctgagctaagccgagcccacgtgtgaacggctctcccccccgccccggccccgccgctcgcagagagattcggaggagcccgggcgggggggaggaggagggggaggagggagcggagatctcggggctcggagccggccgccgctccgctccgatcgctgtggggcttggttttttgggggtgggggggcggggtgggctcagatatggaggcaaatgggagccaaggcacctcgggcagcgccaacgactcccagcacgaccccggtaaaatgtttatcggtggactgagctggcagacctcaccagatagccttagagactattttagcaaatttggagaaattagagaatgtatggtcatgagagatcccactacgaaacgctccagaggcttcggtttcgtcacgttcgcagacccagcaagtgtagataaagtattaggtcagccccaccatgagttagattccaagacgattgaccccaaagttgcatttcctcgtcgagcgcaacccaagatggtcacaagaacaaagaaaatatttgtaggcgggttatctgcgaacacagtagtggaagatgtaaagcaatatttcgagcagtttggcaaggtggaagatgcaatgctgatgtttgataaaactaccaacaggcacagagggtttggctttgtcacttttgagaatgaagatgttgtggagaaagtctgtgagattcatttccatgaaatcaataataaaatggtagaatgtaagaaagctcagccgaaagaagtcatgttcccacctgggacaagaggccgggcccggggactgccttacaccatggacgcgttcatgcttggcatggggatgctgggatatcccaacttcgtggcgacctatggccgtggctaccccggatttgctccaagctatggctatcagttcccagcccagcagcggcttatggaccagtggcagcagcggcggtggcggcagcaagaggatcagtcctgaatagctacagtgctcaaccgaattttggcgcgcccgcttccccggcaggctccaacccggcgcggcccggaggcttcccgggggccaacagcccaggacctgtcgccgatctctacggccctgccagccaggactccggagtggggaattacataagtgcggccagcccacagccgggctcgggcttcggccacggcatagctggacctttgattgcaacggcctttacaaatggataccattgagcaggtgctttcgttgccatctcactctgagagcatacctggatgtccaggcaagactgggcgaagtttctgagtggccctttgtttaggtgatgtcctcagacctggacccccaccagcctcactccccatcccaaccagagatggctcacttcggatcgagggttgactacatctcatcatctcacgaatctgctgtaatataagacaacagcttttaaatgtgtatataacccatgatttcggttttgttttgttttgtttttcttgatggtttccctctccctccctctcttcccattctccttttaaatctctttgaatcacatttggtagtgattttgacttagtccagtagtcacatagctttaatatctagttcaaagctaaccatagtataattgttatattaaggagttattttttcttaaaacattttttttttgcttgttttggttctgttctcacttttaaaggatgctgagatggtaatatgactctccctattttggtaccaattctgagactgtatgaattttcaggtggaactttagcacacactgaagcaaagttgtgaagtgcagggcgggaggtgggcgtgagctttctattttgcgttgtagaagaagtgagatgtagtaagctaattaacagactttctagcagttctttttgtgatgtctctttgttaatctgagtctatctattttcggcaataaggtaaggacgacagtgttttgagtgtcctccttttctataagtgctttttttctgttgaaagaggtgatattataaggttttttgaaattgtgaattctaaaaaagaaatgttgtaaatacaattccattaactacatagaaactattaagaaagagagaatcaaaaatatttttgtgagggagtcggtcccaggcagtttgatgctctgtggaaggaggcgggaagggaacgttggccaagtcagttactgagatgaagatcgcccagctgccaggaccaccccaggacaagttagagcactgtttagctcctttgtctgtgtgatagacctaagaactgtattagtgttgtaccagcctattaacctcttgtctgtgcacagcttcaaatgttaccgtctagttagatttttatttaaaatatgaaaaactgcttttcccaagatgttttttaaaaacaaagctacaattttaatatttaacatatttaaagtttcaaagcacacctgtttggcttgggtgggggtggggtgggggggacattctttttcagtcttaatttttaaatatttgatcattttctattgtccaatcatttcagcacctccaaaggtccctaggacactttgcctctcttctccccctgccccccaccctgctcccacatctgggggcccatgggccaggagtggataagcctgcattaatacaacctttctccattcactttctatttacaaattaggaaagcaaccttttggtttatatatattttttttaatacctcagtgctgcaagtatcaccagagaggctatggaagaatttttttttaatttattgtagatgtaaacagaattttaaaaataaaaagtataaacatcactgcactgtgactggtgggaaaaactgacagtttcctctttgcacatgtttaacatttggctgttataatatatggtcctcggttggggaaagatacttatgatgaaggatattttttaatttaacttttttttaaatattggtaataggtcggcaacagcaactgtagaagtacaactcaatagatggcattaaaacatattgtagtgtggatatatattttttcttttttaaaatgtgatattgacgttttattaatattttttaaattgttacgtttataaatttggtacttaaggcacagccagtatgagacactgaatgcgacatttattataaagagctgctgcactcctatttttataaattttactaacaaagtagactaatgtagacattcacagacatggtagggcaaaagcatcttcaaactaaagactccaaaatgctaactcagaaagaaagaaaaaacccgttttcaattctaatgaaacagcaacaacattttttttaattaaaaaaaaaatcatgttctttgtttttctaataaaatgttaggttgtttggtgaggtttttttgttgtttttttcctttctttgtttcttttcttttcccccaaacaaccagattaaatgctgagcgcttttaaaatatcaaaacttgttcaagtcataaaacaacaaaacataagttttatttaaaaaaaaaaaaagaaagaaaaaa

SEQ ID NO: 458025 - DNA, 3225 bp, Homo sapiens
  misc_feature (80)..(81): n is a, c, g, or t
  misc_feature (83)..(83): n is a, c, g, or t
  misc_feature (87)..(88): n is a, c, g, or t
  misc_feature (96)..(96): n is a, c, g, or t
  misc_feature (98)..(98): n is a, c, g, or t
ggcagaattgcttgaacccgggagacagatgttgcagtgagctgagatcgtgccactgcactccagactgggtgacagannangtcnncgtctcanangaaaaaaaaaaaagaacacagcacggagaagatgcccagagcccttcactgtgggcccatgagatgacacagatctttccactaggccatcctgttttgttgctggagaactttgtccctggaagggcagaaatgattattctggttgcccaaggcctggtggcccaggtggaagatgcaatgctgatgtttgataaaactaccaacaggcacagagggtttggctttgtcacttttgagaatgaagatgttgtggagaaagtctgtgagattcatttccatgaaatcaataataaaatggtagaatgtaagaaagctcagccgaaagaagtcatgttcccacctgggacaagaggccgggcccggggactgccttacaccatggacgcgttcatgcttggcatggggatgctgggatatcccaacttcgtggcgacctatggccgtggctaccccggatttgctccaagctatggctatcagttcccagcccagcagcggcttatggaccagtggcagcagcggcggtggcggcagcaagaggatcagtcctgaatagctacagtgctcaaccgaattttggcgcgcccgcttccccggcaggctccaacccggcgcggcccggaggcttcccgggggccaacagcccaggacctgtcgccgatctctacggccctgccagccaggactccggagtggggaattacataagtgcggccagcccacagccgggctcgggcttcggccacggcatagctggacctttgattgcaacggcctttacaaatggataccattgagcaggtgctttcgttgccatctcactctgagagcatacctggatgtccaggcaagactgggcgaagtttctgagtggccctttgtttaggtgatgtcctcagacctggacccccaccagcctcactccccatcccaaccagagatggctcacttcggatcgagggttgactacatctcatcatctcacgaatctgctgtaatataagacaacagcttttaaatgtgtatataacccatgatttcggttttgttttgttttgtttttcttgatggtttccctctccctccctctcttcccattctccttttaaatctctttgaatcacatttggtagtgattttgacttagtccagtagtcacatagctttaatatctagttcaaagctaaccatagtataattgttatattaaggagttattttttcttaaaacattttttttttgcttgttttggttctgttctcacttttaaaggatgctgagatggtaatatgactctccctattttggtaccaattctgagactgtatgaattttcaggtggaactttagcacacactgaagcaaagttgtgaagtgcagggcgggaggtgggcgtgagctttctattttgcgttgtagaagaagtgagatgtagtaagctaattaacagactttctagcagttctttttgtgatgtctctttgttaatctgagtctatctattttcggcaataaggtaaggacgacagtgttttgagtgtcctccttttctataagtgctttttttctgttgaaagaggtgatattataaggttttttgaaattgtgaattctaaaaaagaaatgttgtaaatacaattccattaactacatagaaactattaagaaagagagaatcaaaaatatttttgtgagggagtcggtcccaggcagtttgatgctctgtggaaggaggcgggaagggaacgttggccaagtcagttactgagatgaagatcgcccagctgccaggaccaccccaggacaagttagagcactgtttagctcctttgtctgtgtgatagacctaagaactgtattagtgttgtaccagcctattaacctcttgtctgtgcacagcttcaaatgttaccgtctagttagatttttatttaaaatatgaaaaactgcttttcccaagatgttttttaaaaacaaagctacaattttaatatttaacatatttaaagtttcaaagcacacctgtttggcttgggtgggggtggggtgggggggacattctttttcagtcttaatttttaaatatttgatcattttctattgtccaatcatttcagcacctccaaaggtccctaggacactttgcctctcttctccccctgccccccaccctgctcccacatctgggggcccatgggccaggagtggataagcctgcattaatacaacctttctccattcactttctatttacaaattaggaaagcaaccttttggtttatatatattttttttaatacctcagtgctgcaagtatcaccagagaggctatggaagaatttttttttaatttattgtagatgtaaacagaattttaaaaataaaaagtataaacatcactgcactgtgactggtgggaaaaactgacagtttcctctttgcacatgtttaacatttggctgttataatatatggtcctcggttggggaaagatacttatgatgaaggatattttttaatttaacttttttttaaatattggtaataggtcggcaacagcaactgtagaagtacaactcaatagatggcattaaaacatattgtagtgtggatatatattttttcttttttaaaatgtgatattgacgttttattaatattttttaaattgttacgtttataaatttggtacttaaggcacagccagtatgagacactgaatgcgacatttattataaagagctgctgcactcctatttttataaattttactaacaaagtagactaatgtagacattcacagacatggtagggcaaaagcatcttcaaactaaagactccaaaatgctaactcagaaagaaagaaaaaacccgttttcaattctaatgaaacagcaacaacattttttttaattaaaaaaaaaatcatgttctttgtttttctaataaaatgttaggttgtttggtgaggtttttttgttgtttttttcctttctttgtttcttttcttttcccccaaacaaccagattaaatgctgagcgcttttaaaatatcaaaacttgttcaagtcataaaacaacaaaacataagttttatttaaaaaaaaaaaaagaaagaaaaaa

SEQ ID NO: 458026 - DNA, 5290 bp, Homo sapiens
cggggctgagctaagccgagcccacgtgtgaacggctctcccccccgccccggccccgccgctcgcagagagattcggaggagcccgggcgggggggaggaggagggggaggagggagcggagatctcggggctcggagccggccgccgctccgctccgatcgctgtggggcttggttttttgggggtgggggggcggggtgggctcagatatggaggcaaatgggagccaaggcacctcgggcagcgccaacgactcccagcacgaccccggtaaaatgtttatcggtggactgagctggcagacctcaccagatagccttagagactattttagcaaatttggagaaattagagaatgtatggtcatgagagatcccactacgaaacgctccagaggcttcggtttcgtcacgttcgcagacccagcaagtgtagataaagtattaggtcagccccaccatgagttagattccaagacgattgaccccaaagttgcatttcctcgtcgagcgcaacccaagatggtcacaagaacaaagaaaatatttgtaggcgggttatctgcgaacacagtagtggaagatgtaaagcaatatttcgagcagtttggcaaggtggaagatgcaatgctgatgtttgataaaactaccaacaggcacagagggtttggctttgtcacttttgagaatgaagatgttgtggagaaagtctgtgagattcatttccatgaaatcaataataaaatggtagaatgtaagaaagctcagccgaaagaagtcatgttcccacctgggacaagaggccgggcccggggactgccttacaccatggacgcgttcatgcttggcatggggatgctgggatatcccaacttcgtggcgacctatggccgtggctaccccggatttgctccaagctatggctatcagttcccagcccagcagcggcttatggaccagtggcagcagcggcggtggcggcagcaagaggatcagtcctgaatagctacagtgctcaaccgaattttggcgcgcccgcttccccggcaggctccaacccggcgcggcccggaggcttcccgggggccaacagcccaggacctgtcgccgatctctacggccctgccagccaggactccggagtggggaattacataagtgcggccagcccacagccgggctcgggcttcggccacggcatagctggacctttgattgcaacggcctttacaaatggataccattgagcaggtgctttcgttgccatctcactctgagagcatacctggatgtccaggcaagactgggcgaagtttctgagtggccctttgtttaggtgatgtcctcagacctggacccccaccagcctcactccccatcccaaccagagatggctcacttcggatcgagggttgactacatctcatcatctcacgaatctgctgtaatataagacaacagcttttaaatgtgtatataacccatgatttcggttttgttttgttttgtttttcttgatggtttccctctccctccctctcttcccattctccttttaaatctctttgaatcacatttggtagtgattttgacttagtccagtagtcacatagctttaatatctagttcaaagctaaccatagtataattgttatattaaggagttattttttcttaaaacattttttttttgcttgttttggttctgttctcacttttaaaggatgctgagatggtaatatgactctccctattttggtaccaattctgagactgtatgaattttcaggtggaactttagcacacactgaagcaaagttgtgaagtgcagggcgggaggtgggcgtgagctttctattttgcgttgtagaagaagtgagatgtagtaagctaattaacagactttctagcagttctttttgtgatgtctctttgttaatctgagtctatctattttcggcaataaggtaaggacgacagtgttttgagtgtcctccttttctataagtgctttttttctgttgaaagaggtgatattataaggttttttgaaattgtgaattctaaaaaagaaatgttgtaaatacaattccattaactacatagaaactattaagaaagagagaatcaaaaatatttttgtgagggagtcggtcccaggcagtttgatgctctgtggaaggaggcgggaagggaacgttggccaagtcagttactgagatgaagatcgcccagctgccaggaccaccccaggacaagttagagcactgtttagctcctttgtctgtgtgatagacctaagaactgtattagtgttgtaccagcctattaacctcttgtctgtgcacagcttcaaatgttaccgtctagttagatttttatttaaaatatgaaaaactgcttttcccaagatgttttttaaaaacaaagctacaattttaatatttaacatatttaaagtttcaaagcacacctgtttggcttgggtgggggtggggtgggggggacattctttttcagtcttaatttttaaatatttgatcattttctattgtccaatcatttcagcacctccaaaggtccctaggacactttgcctctcttctccccctgccccccaccctgctcccacatctgggggcccatgggccaggagtggataagcctgcattaatacaacctttctccattcactttctatttacaaattaggaaagcaaccttttggtttatatatattttttttaatacctcagtgctgcaagtatcaccagagaggctatggaagaatttttttttaatttattgtagatgtaaacagaattttaaaaataaaaagtataaacatcactgcactgtgactggtgggaaaaactgacagtttcctctttgcacatgtttaacatttggctgttataatatatggtcctcggttggggaaagatacttatgatgaaggatattttttaatttaacttttttttaaatattggtaataggtcggcaacagcaactgtagaagtacaactcaatagatggcattaaaacatattgtagtgtggatatatattttttcttttttaaaatgtgatattgacgttttattaatattttttaaattgttacgtttataaatttggtacttaaggcacagccagtatgagacactgaatgcgacatttattataaagagctgctgcactcctatttttataaattttactaacaaagtagactaatgtagacattcacagacatggtagggcaaaagcatcttcaaactaaagactccaaaatgctaactcagaaagaaagaaaaaacccgttttcaattctaatgaaacagcaacaacattttttttaattaaaaaaaaaatcatgttctttgtttttctaataaaatgttaggttgtttggtgaggtttttttgttgtttttttcctttctttgtttcttttcttttcccccaaacaaccagattaaatgctgagcgcttttaaaatatcaaaacttgttcaagtcataaaacaacaaaacataagttttatttaaaaaaaaaaaaagaaagaaaaaatagtaaattcccagaaattcagtgtttagacgagggaatttaattcctattttgtccatgttggtgatgtactgtacttcccttccttttctctgcatcccccatcacctcatagaagactctttgttgatcattgtatgttaataatgtataaaatggctatcttgtaagcgtgctgtcctggtactagtgtagcgactttttttctcctctttcttctagtacatattgataggtataacataattaaggtttaaaaaaaattagacatagttattcagatttaggaccagtaaggatagaactttctcttatttatgaaaaaaaaatgctaataattttggggcagttttttcctttaattatttttttcaatttcaagtttaattttattttagctgatctgatgtggtttcaactaacccaaggtctcaccatgttaaaatgccggcggactctacggcgttttgtagatcccccccccccacccactgtgaaggggtgccatactaccttaaatgctaatgctagatatgcaaaactggatttttttaatttattttttaaaagagggaggcatggtatattaaaatgattttactaagagaaaaaatatttttttaagaatgctcagaagaaattgataatctgtgtgaatatgttttagatgtttatataccttttgaagagacccagtagcccatagcacaaatcttgtggaaatccgatatgttttaatgtggctacctaggtttaaggttcacgttagtccccccattccatctagaagtccattttgaaagatttttgtaaattcttttaacactgatgtttcagcctcgtctttgtttcagttaagctcaatggcgaacatgggaaccacctttcgccttccctgggggagaaaccctcttggctgatggcttttccccggaattatcaaacagccaccgggtgactttctggcttccagatccatctgcctgagacccccgaactcctctcctcccaagcagaggcgagtgagtggcattagctcccggacccattcccggtcctagctgggcatggggctgacggagatgaccaagctcgcccattagcttgattcaaacaaagccccagcaggcctttgcgtttttatccttcataaccttcatcttaatttgaacttgtagcttggactttaaggtagcatggctctattgctgtcaatttactgtttcactgcacagcaatcacagccagtgaatgttacacacatcttgctagactagtataaaaatcattgggtaattgttggttctaatgacctgaaaggtgttcagtttttgttcttggttttgttttgtttttgatttcttgggggtgggttttgcttgttgttccttttcatttgggggtttttggggaaaaaatttatttttggttccaaatagaaaaacaaaacctattttgatctttagtgcaaacgagggctagggacttagcctcctccaccacctccacactgcttcattctgccattcactcactgcagcatattcaagaataaagcaatatcgtttactacattttttattgaaggtcagccatgctttctgtattatattgcatatgaaattgtttacaaaaaacactaactcatacttctctttattggttgcaagtggcacgcaggaacagagggaggtggggggctggtgggggagggg

SEQ ID NO: 458027 - DNA, 4241 bp, Homo sapiens
cggggctgagctaagccgagcccacgtgtgaacggctctcccccccgccccggccccgccgctcgcagagagattcggaggagcccgggcgggggggaggaggagggggaggagggagcggagatctcggggctcggagccggccgccgctccgctccgatcgctgtggggcttggttttttgggggtgggggggcggggtgggctcagatatggaggcaaatgggagccaaggcacctcgggcagcgccaacgactcccagcacgaccccggtaaaatgtttatcggtggactgagctggcagacctcaccagatagccttagagactattttagcaaatttggagaaattagagaatgtatggtcatgagagatcccactacgaaacgctccagaggcttcggtttcgtcacgttcgcagacccagcaagtgtagataaagtattaggtcagccccaccatgagttagattccaagacgattgaccccaaagttgcatttcctcgtcgagcgcaacccaagatggtcacaagaacaaagaaaatatttgtaggcgggttatctgcgaacacagtagtggaagatgtaaagcaatatttcgagcagtttggcaaggtggaagatgcaatgctgatgtttgataaaactaccaacaggcacagagggtttggctttgtcacttttgagaatgaagatgttgtggagaaagtctgtgagattcatttccatgaaatcaataataaaatggtagaatgtaagaaagctcagccgaaagaagtcatgttcccacctgggacaagaggccgggcccggggactgccttacaccatggacgcgttcatgcttggcatggggatgctgggatatcccaacttcgtggcgacctatggccgtggctaccccggatttgctccaagctatggctatcagttcccagcccagcagcggcttatggaccagtggcagcagcggcggtggcggcagcaagaggatcagtcctgaatagctacagtgctcaaccgaattttggcgcgcccgcttccccggcaggctccaacccggcgcggcccggaggcttcccgggggccaacagcccaggacctgtcgccgatctctacggccctgccagccaggactccggagtggggaattacataagtgcggccagcccacagccgggctcgggcttcggccacggcatagctggacctttgattgcaacggcctttacaaatggataccattgagcaggtgctttcgttgccatctcactctgagagcatacctggatgtccaggcaagactgggcgaagtttctgagtggccctttgtttaggtgatgtcctcagacctggacccccaccagcctcactccccatcccaaccagagatggctcacttcggatcgagggttgactacatctcatcatctcacgaatctgctgtaatataagacaacagcttttaaatgtgtatataacccatgatttcggttttgttttgttttgtttttcttgatggtttccctctccctccctctcttcccattctccttttaaatctctttgaatcacatttggtagtgattttgacttagtccagtagtcacatagctttaatatctagttcaaagctaaccatagtataattgttatattaaggagttattttttcttaaaacattttttttttgcttgttttggttctgttctcacttttaaaggatgctgagatggtaatatgactctccctattttggtaccaattctgagactgtatgaattttcaggtggaactttagcacacactgaagcaaagttgtgaagtgcagggcgggaggtgggcgtgagctttctattttgcgttgtagaagaagtgagatgtagtaagctaattaacagactttctagcagttctttttgtgatgtctctttgttaatctgagtctatctattttcggcaataaggtaaggacgacagtgttttgagtgtcctccttttctataagtgctttttttctgttgaaagaggtgatattataaggttttttgaaattgtgaattctaaaaaagaaatgttgtaaatacaattccattaactacatagaaactattaagaaagagagaatcaaaaatatttttgtgagggagtcggtcccaggcagtttgatgctctgtggaaggaggcgggaagggaacgttggccaagtcagttactgagatgaagatcgcccagctgccaggaccaccccaggacaagttagagcactgtttagctcctttgtctgtgtgatagacctaagaactgtattagtgttgtaccagcctattaacctcttgtctgtgcacagcttcaaatgttaccgtctagttagatttttatttaaaatatgaaaaactgcttttcccaagatgttttttaaaaacaaagctacaattttaatatttaacatatttaaagtttcaaagcacacctgtttggcttgggtgggggtggggtgggggggacattctttttcagtcttaatttttaaatatttgatcattttctattgtccaatcatttcagcacctccaaaggtccctaggacactttgcctctcttctccccctgccccccaccctgctcccacatctgggggcccatgggccaggagtggataagcctgcattaatacaacctttctccattcactttctatttacaaattaggaaagcaaccttttggtttatatatattttttttaatacctcagtgctgcaagtatcaccagagaggctatggaagaatttttttttaatttattgtagatgtaaacagaattttaaaaataaaaagtataaacatcactgcactgtgactggtgggaaaaactgacagtttcctctttgcacatgtttaacatttggctgttataatatatggtcctcggttggggaaagatacttatgatgaaggatattttttaatttaacttttttttaaatattggtaataggtcggcaacagcaactgtagaagtacaactcaatagatggcattaaaacatattgtagtgtggatatatattttttcttttttaaaatgtgatattgacgttttattaatattttttaaattgttacgtttataaatttggtacttaaggcacagccagtatgagacactgaatgcgacatttattataaagagctgctgcactcctatttttataaattttactaacaaagtagactaatgtagacattcacagacatggtagggcaaaagcatcttcaaactaaagactccaaaatgctaactcagaaagaaagaaaaaacccgttttcaattctaatgaaacagcaacaacattttttttaattaaaaaaaaaatcatgttctttgtttttctaataaaatgttaggttgtttggtgaggtttttttgttgtttttttcctttctttgtttcttttcttttcccccaaacaaccagattaaatgctgagcgcttttaaaatatcaaaacttgttcaagtcataaaacaacaaaacataagttttatttaaaaaaaaaaaaagaaagaaaaaaaaaaaaaaaaaaaaaaaaaaaaaaaaaagaaacaaaaaaaaaacaaaaaaacaaaagagagaggggcgcgaggcgcagcgaaaaaacccctcacacgcgagggcgcgcgccccacttcgccgcacaagaagacaattgtgacaaaagaaaggagcacacacagagagagaagccacgcagaataatgataaaaaacagaaagaacagagcacgaaggccagtcacaaacaaaacacaacacacagaacaggaacaggagcgaagaaacaaaccaagagaaaagaggacacacactaataaagacgaaaaacacaccacacacacacgtaggtgaaaagagagcaaacaaaaatagaagcaaaacacacacaccaaacacgacaaagaaaaaaaacaaaaagcaaaaacaaaacgaaaacaacacaaaaaaaaacaaaaacaagagacaaaaagagagtggaaaaccacaaacaaacagaagcgaaaagaatataggacgcgaaacgccgaatggcgaaaaaagacaatacgtgacgcagcaaaacgagaaagtaaaaagcacagagcaaaaaacatccatcaaaccacacacgagcgaaaagaacaaaacaaaaccaacccaacccaacgagaacaaaaagaagaaaaaaaaagccagagaacaaa

SEQ ID NO: 458028 - DNA, 3307 bp, Homo sapiens
cggggctgagctaagccgagcccacgtgtgaacggctctcccccccgccccggccccgccgctcgcagagagattcggaggagcccgggcgggggggaggaggagggggaggagggagcggagatctcggggctcggagccggccgccgctccgctccgatcgctgtggggcttggttttttgggggtgggggggcggggtgggctcagatatggaggcaaatgggagccaaggcacctcgggcagcgccaacgactcccagcacgaccccggtaaaatgtttatcggtggactgagctggcagacctcaccagatagccttagagactattttagcaaatttggagaaattagagaatgtatggtcatgagagatcccactacgaaacgctccagaggcttcggtttcgtcacgttcgcagacccagcaagtgtagataaagtattaggtcagccccaccatgagttagattccaagacgattgaccccaaagttgcatttcctcgtcgagcgcaacccaagatggtcacaagaacaaagaaaatatttgtaggcgggttatctgcgaacacagtagtggaagatgtaaagcaatatttcgagcagtttggcaaggtggaagatgcaatgctgatgtttgataaaactaccaacaggcacagagggtttggctttgtcacttttgagaatgaagatgttgtggagaaagtctgtgagattcatttccatgaaatcaataataaaatggtagaatgtaagaaagctcagccgaaagaagtcatgttcccacctgggacaagaggccgggcccggggactgccttacaccatggacgcgttcatgcttggcatggggatgctgggatatcccaacttcgtggcgacctatggccgtggctaccccggatttgctccaagctatggctatcagttcccagcccagcagcggcttatggaccagtggcagcagcggcggtggcggcagcaagaggatcagtcctgaatagctacagtgctcaaccgaattttggcgcgcccgcttccccggcaggctccaacccggcgcggcccggaggcttcccgggggccaacagcccaggacctgtcgccgatctctacggccctgccagccaggactccggagtggggaattacataagtgcggccagcccacagccgggctcgggcttcggccacggcatagctggacctttgattgcaacggcctttacaaatggataccattgagcaggtgctttcgttgccatctcactctgagagcatacctggatgtccaggcaagactgggcgaagtttctgagtggccctttgtttaggtgatgtcctcagacctggacccccaccagcctcactccccatcccaaccagagatggctcacttcggatcgagggttgactacatctcatcatctcacgaatctgctgtaatataagacaacagcttttaaatgtgtatataacccatgatttcggttttgttttgttttgtttttcttgatggtttccctctccctccctctcttcccattctccttttaaatctctttgaatcacatttggtagtgattttgacttagtccagtagtcacatagctttaatatctagttcaaagctaaccatagtataattgttatattaaggagttattttttcttaaaacattttttttttgcttgttttggttctgttctcacttttaaaggatgctgagatggtaatatgactctccctattttggtaccaattctgagactgtatgaattttcaggtggaactttagcacacactgaagcaaagttgtgaagtgcagggcgggaggtgggcgtgagctttctattttgcgttgtagaagaagtgagatgtagtaagctaattaacagactttctagcagttctttttgtgatgtctctttgttaatctgagtctatctattttcggcaataaggtaaggacgacagtgttttgagtgtcctccttttctataagtgctttttttctgttgaaagaggtgatattataaggttttttgaaattgtgaattctaaaaaagaaatgttgtaaatacaattccattaactacatagaaactattaagaaagagagaatcaaaaatatttttgtgagggagtcggtcccaggcagtttgatgctctgtggaaggaggcgggaagggaacgttggccaagtcagttactgagatgaagatcgcccagctgccaggaccaccccaggacaagttagagcactgtttagctcctttgtctgtgtgatagacctaagaactgtattagtgttgtaccagcctattaacctcttgtctgtgcacagcttcaaatgttaccgtctagttagatttttatttaaaatatgaaaaactgcttttcccaagatgttttttaaaaacaaagctacaattttaatatttaacatatttaaagtttcaaagcacacctgtttggcttgggtgggggtggggtgggggggacattctttttcagtcttaatttttaaatatttgatcattttctattgtccaatcatttcagcacctccaaaggtccctaggacactttgcctctcttctccccctgccccccaccctgctcccacatctgggggcccatgggccaggagtggataagcctgcattaatacaacctttctccattcactttctatttacaaattaggaaagcaaccttttggtttatatatattttttttaatacctcagtgctgcaagtatcaccagagaggctatggaagaatttttttttaatttattgtagatgtaaacagaattttaaaaataaaaagtataaacatcactgcactgtgactggtgggaaaaactgacagtttcctctttgcacatgtttaacatttggctgttataatatatggtcctcggttggggaaagatacttatgatgaaggatattttttaatttaacttttttttaaatattggtaataggtcggcaacagcaactgtagaagtacaactcaatagatggcattaaaacatattgtagtgtggatatatattttttcttttttaaaatgtgatattgacgttttattaatattttttaaattgttacgtttataaatttggtacttaaggcacagccagtatgagacactgaatgcgacatttattataaagagctgctgcactcctatttttataaattttactaacaaagtagactaatgtagacattcacagacatggtagggcaaaagcatcttcaaactaaagactccaaaatgctaactca

SEQ ID NO: 458029 - DNA, 1518 bp, Homo sapiens
cggggctgagctaagccgagcccacgtgtgaacggctctcccccccgccccggccccgccgctcgcagagagattcggaggagcccgggcgggggggaggaggagggggaggagggagcggagatctcggggctcggagccggccgccgctccgctccgatcgctgtggggcttggttttttgggggtgggggggcggggtgggctcagatatggaggcaaatgggagccaaggcacctcgggcagcgccaacgactcccagcacgaccccggtaaaatgtttatcggtggactgagctggcagacctcaccagatagccttagagactattttagcaaatttggagaaattagagaatgtatggtcatgagagatcccactacgaaacgctccagaggcttcggtttcgtcacgttcgcagacccagcaagtgtagataaagtattaggtcagccccaccatgagttagattccaagacgattgaccccaaagttgcatttcctcgtcgagcgcaacccaagatggtcacaagaacaaagaaaatatttgtaggcgggttatctgcgaacacagtagtggaagatgtaaagcaatatttcgagcagtttggcaaggtggaagatgcaatgctgatgtttgataaaactaccaacaggcacagagggtttggctttgtcacttttgagaatgaagatgttgtggagaaagtctgtgagattcatttccatgaaatcaataataaaatggtagaatgtaagaaagctcagccgaaagaagtcatgttcccacctgggacaagaggccgggcccggggactgccttacaccatggacgcgttcatgcttggcatggggatgctgggtgagtctggacaggaccgcaggtcaccatggactgggagggctatggaggcctctactcccaactgggtcacctaccagtggggcaaactgcttcacctttctaagcctcagtttccttgtctgtagatgaggatgataattccccgttccaagacagttgtgatgattaagtgtgggtgtgtgtgtgtgcatgcatgtgtgtgtgtgtgtgtgtgtgtttgtatttataatattgccccatgcctggcttataggatatgttagactattttctctcttttccatctccttcctcaaaagaaggaaaagtccccctctatctgcctcagccctctcatctgagtgggagttcttaagatgtaaggactcctggctgacttgacttgtgtgggctaaggctacgttttctaaaacttgggagaggagggaagtggtaagggtgggcgataatcctgtctatttaaatgattaacatttttctcttgggatatcaaaatttgcatttaaatggatgttttaaatagcctgttttactctttatttgccaaaaaaaaaaaaaagatgaaagacaaagtgtgtttgttctgactaaaaatgatttctcctggcttttagagaaattgagttgcatattatgtccctttccttaaaag

SEQ ID NO: 458030 - DNA, 1033 bp, Homo sapiens
cggggctgagctaagccgagcccacgtgtgaacggctctcccccccgccccggccccgccgctcgcagagagattcggaggagcccgggcgggggggaggaggagggggaggagggagcggagatctcggggctcggagccggccgccgctccgctccgatcgctgtggggcttggttttttgggggtgggggggcggggtgggctcagatatggaggcaaatgggagccaaggcacctcgggcagcgccaacgactcccagcacgaccccggtaaaatgtttatcggtggactgagctggcagacctcaccagatagccttagagactattttagcaaatttggagaaattagagaatgtatggtcatgagagatcccactacgaaacgctccagaggcttcggtttcgtcacgttcgcagacccagcaagtgtagataaagtattaggtcagccccaccatgagttagattccaagacgattgaccccaaagttgcatttcctcgtcgagcgcaacccaaggtgttctagctgagcgtttaagagcatggactctggaaccagactttgaatccttgctctgccactgcagctgtgtgaccttgagcaagctatctaaatattctgtgcctttgttttgtcatctgtacaatggagatgatgatggtatcaccttcatggggttgtcataaggattatgggacttaacataataaagtgtttagaatggaaaaaaaagaaaaaaaaaaaaaggggaagaaaaaaaagaaaattttaaaaaaaaaagtcaagccgcacacaacgctcgtggtcgggccgacgcgagcaccccaggagaaaggtctccacaaccaacgtcggggcggggggcggccccgagtgtgatcaccaaccgtgccacagcggctccagagaaaacacgcgcggcgacaaaggggggggctccccacaaaaacccgcggcgaacccgcgtggtgcaaccaccgcagagtgcgggcgcaggcatccagagggccaggacggatataccag

SEQ ID NO: 458031 - DNA, 1466 bp, Homo sapiens
gtagtccggccggaacctgtttgcgaccccgagtcccatgacaccgcttctcctcacaccccagtccgcagtgcccctccccagcctcggccgggcctcccgggagccgggcgtggcgttccagctagtgagccgtttctcccctgggctcggaggcggaagcttgaggggcgcggggaggagcttcgcgtgcggggtgaacgcccgctctacgtgctcgttctcttcgcgaccgctgcgcgcgagccccgtgtccccacggcgggcagcagcggcggcggcggcggctgaacgcggagggggcggagggagcccgcggcggcggcagcagctacagcgaaatggcggagaccgtggctgacacccggcggctgatcaccaagccgcagaacctgaatgacgcctacggaccccccagcaacttcctcgagatcgatgtgagcaacccgcaaacggtgggggtcggccggggccgcttcaccacttacgaaatcagggtcaagacaaatcttcctattttcaagctgaaagaatctactgttagaagaagatacagtgactttgaatggctgcgaagtgaattagaaagagagagcaaggtcgtagttcccccgctccctgggaaagcgtttttgcgtcagcttccttttagaggagatgatggaatatttgatgacaattttattgaggaaagaaaacaagggctggagcagtttataaacaaggtcgctggtcatcctctggcacagaacgaacgttgtcttcacatgtttttacaagatgaaataatagataaaagctatactccatctaaaataagacatgcctgaaatttggcaagaaggggcaaaaacgtgactattaatgattgataagcaccagtgaagaagttctaacttttagcatgctgcacagaaactggtataacatgccttcagtatactaacactcatatgctcagttttgttttgttttggcagttgacaagaagttaatttgctttagtaaaaatccctcattccagcctttctatataaatagctctttcttgctgttttaatgtggtgcacactatagcctcacaaacctgttattccagtgtaatctgcagtgtcgtaactaaagttactggcttggtcttatttgcacagtttttgcgtcttgtttgcttcttgcatctgattaactagaatatttctctttcccccttttaatttgtgatgtcacttgaccccatttatgtgtaggagcactacaccattggtttccaatactgcacacataagatacatacttgtgtgcagaaagtatcttcctccaggcttgtaatacccttcacatggaagattaatgagggaaatctttatattctgtataaaaacaaaagcaaatttatatactaaaatcatttgtctaaaaatttaagttgttttcaaataaaaattaaaatgcatttctgatatgca

SEQ ID NO: 458032 - DNA, 1757 bp, Homo sapiens
gtagtccggccggaacctgtttgcgaccccgagtcccatgacaccgcttctcctcacaccccagtccgcagtgcccctccccagcctcggccgggcctcccgggagccgggcgtggcgttccagctagtgagccgtttctcccctgggctcggaggcggaagcttgaggggcgcggggaggagcttcgcgtgcggggtgaacgcccgctctacgtgctcgttctcttcgcgaccgctgcgcgcgagccccgtgtccccacggcgggcagcagcggcggcggcggcggctgaacgcggagggggcggagggagcccgcggcggcggcagcagctacagcgaaatggcggagaccgtggctgacacccggcggctgatcaccaagccgcagaacctgaatgacgcctacggaccccccagcaacttcctcgagatcgatgtgagcaacccgcaaacggtgggggtcggccggggccgcttcaccacttacgaaatcagggtcaagacaaatcttcctattttcaagctgaaagaatctactgttagaagaagatacagtgactttgaatggctgcgaagtgaattagaaagagagagcaaggtcgtagttcccccgctccctgggaaagcgtttttgcgtcagcttccttttagaggagatgatggaatatttgatgacaattttattgaggaaagaaaacaagggctggagcagtttataaacaaggtcgctggtcatcctctggcacagaacgaacgttgtcttcacatgtttttacaagatgaaataatagataaaagctatactccatctaaaataagacatgcctgaaatttggcaagaaggggcaaaaacgtgactattaatgattgataagcaccagtgaagaagttctaacttttagcatgctgcacagaaactggtataacatgccttcagtatactaacactcatatgctcagttttgttttgttttggcagttgacaagaagttaatttgctttagtaaaaatccctcattccagcctttctatataaatagctctttcttgctgttttaatgtggtgcacactatagcctcacaaacctgttattccagtgtaatctgcagtgtcgtaactaaagttactggcttggtcttatttgcacagtttttgcgtcttgtttgcttcttgcatctgattaactagaatatttctctttcccccttttaatttgtgatgtcacttgaccccatttatgtgtaggagcactacaccattggtttccaatactgcacacataagatacatacttgtgtgcagaaagtatcttcctccaggcttgtaatacccttcacatggaagattaatgagggaaatctttatattctgtataaaaacaaaagcaaatttatatactaaaatcatttgtctaaaaatttaagttgttttcaaataaaaattaaaatgcatttctgatatgcactgattgtgttgcctccagctttttttgctctctatgagtgactacttaagtcacttgttgagagggattatttactaattatatacttctcattcctgtaactccattccctttaaacagtggtgatatcaaatatacttccatccattgaatggggtatttttaacaacaacaaaagtgatatactaaaaaatgtattgcttaaggcttattgaatcattttgaagcactttgtgtatttgaaaactgctttataatctcatttattaaaaggactttcaaagataaaa

SEQ ID NO: 458033 - DNA, 1929 bp, Homo sapiens
  misc_feature (1532)..(1532): n is a, c, g, or t
  misc_feature (1563)..(1563): n is a, c, g, or t
  misc_feature (1573)..(1573): n is a, c, g, or t
  misc_feature (1583)..(1583): n is a, c, g, or t
  misc_feature (1585)..(1585): n is a, c, g, or t
gtagtccggccggaacctgtttgcgaccccgagtcccatgacaccgcttctcctcacaccccagtccgcagtgcccctccccagcctcggccgggcctcccgggagccgggcgtggcgttccagctagtgagccgtttctcccctgggctcggaggcggaagcttgaggggcgcggggaggagcttcgcgtgcggggtgaacgcccgctctacgtgctcgttctcttcgcgaccgctgcgcgcgagccccgtgtccccacggcgggcagcagcggcggcggcggcggctgaacgcggagggggcggagggagcccgcggcggcggcagcagctacagcgaaatggcggagaccgtggctgacacccggcggctgatcaccaagccgcagaacctgaatgacgcctacggaccccccagcaacttcctcgagatcgatgtgagcaacccgcaaacggtgggggtcggccggggccgcttcaccacttacgaaatcagggtcaagacaaatcttcctattttcaagctgaaagaatctactgttagaagaagatacagtgactttgaatggctgcgaagtgaattagaaagagagagcaaggtcgtagttcccccgctccctgggaaagcgtttttgcgtcagcttccttttagaggagatgatggaatatttgatgacaattttattgaggaaagaaaacaagggctggagcagtttataaacaaggtcgctggtcatcctctggcacagaacgaacgttgtcttcacatgtttttacaagatgaaataatagataaaagctatactccatctaaaataagacatgcctgaaatttggcaagaaggggcaaaaacgtgactattaatgattgataagcaccagtgaagaagttctaacttttagcatgctgcacagaaactggtataacatgccttcagtatactaacactcatatgctcagttttgttttgttttggcagttgacaagaagttaatttgctttagtaaaaatccctcattccagcctttctatataaatagctctttcttgctgttttaatgtggtgcacactatagcctcacaaacctgttattccagtgtaatctgcagtgtcgtaactaaagttactggcttggtcttatttgcacagtttttgcgtcttgtttgcttcttgcatctgattaactagaatatttctctttcccccttttaatttgtgatgtcacttgaccccatttatgtgtaggagcactacaccattggtttccaatactgcacacataagatacatacttgtgtgcagaaagtatcttcctccaggcttgtaatacccttcacatggaagattaatgagggaaatctttatattctgtataaaaacaaaagcaaatttatatactaaaatcatttgtctaaaaatttaagttgttttcaaataaaaattaaaatgcatttctgatatgcaaaaaaaaaaaaaaaaaaaaaaaaaaaaaaaaaaaaaaaaaaaaaaaaaaaaaaaaaaaaaaaaaanaaaaaaaaaaaaaaaaaaaaaaaaaaaaaanttggggcaanttaaaccaancnaccttaattttagcaaattttttcatttcgcccttttttggggctttttggaccaaatggcccttatttggggagcttttaaattgtggaacccttggtttaccccatttgaacaggggaaaaacagggggggcctcaaataaaatgggtgaggagacaaaaacacctttcccggtggggggtctccaggggggggcccccctaagtgcgtttttcaaaacgttggtggaaatttttgggaaaattgaaaagaaacccccaattatttcgttaaattcgggaaaatttttggaaaaagagaaattttttcccaaaaaccgatggccaaaacccctttatttaaa

SEQ ID NO: 458034 - DNA, 1475 bp, Homo sapiens
  misc_feature (1428)..(1428): n is a, c, g, or t
  misc_feature (1441)..(1441): n is a, c, g, or t
  misc_feature (1457)..(1457): n is a, c, g, or t
gtagtccggccggaacctgtttgcgaccccgagtcccatgacaccgcttctcctcacaccccagtccgcagtgcccctccccagcctcggccgggcctcccgggagccgggcgtggcgttccagctagtgagccgtttctcccctgggctcggaggcggaagcttgaggggcgcggggaggagcttcgcgtgcggggtgaacgcccgctctacgtgctcgttctcttcgcgaccgctgcgcgcgagccccgtgtccccacggcgggcagcagcggcggcggcggcggctgaacgcggagggggcggagggagcccgcggcggcggcagcagctacagcgaaatggcggagaccgtggctgacacccggcggctgatcaccaagccgcagaacctgaatgacgcctacggaccccccagcaacttcctcgagatcgatgtgagcaacccgcaaacggtgggggtcggccggggccgcttcaccacttacgaaatcagggtcaagacaaatcttcctattttcaagctgaaagaatctactgttagaagaagatacagtgactttgaatggctgcgaagtgaattagaaagagagagcaaggtcgtagttcccccgctccctgggaaagcgtttttgcgtcagcttccttttagaggagatgatggaatatttgatgacaattttattgaggaaagaaaacaagggctggagcagtttataaacaaggtcgctggtcatcctctggcacagaacgaacgttgtcttcacatgtttttacaagatgaaataatagataaaagctatactccatctaaaataagacatgcctgaaatttggcaagaaggggcaaaaacgtgactattaatgattgataagcaccagtgaagaagttctaacttttagcatgctgcacagaaactggtataacatgccttcagtatactaacactcatatgctcagttttgttttgttttggcagttgacaagaagttaatttgctttagtaaaaatccctcattccagcctttctatataaatagctctttcttgctgttttaatgtggtgcacactatagcctcacaaacctgttattccagtgtaatctgcagtgtcgtaactaaagttactggcttggtcttatttgcacagtttttgcgtcttgtttgcttcttgcatctgattaactagaatatttctctttcccccttttaatttgtgatgtcacttgaccccatttatgtgtaggagcactacaccattggtttccaatactgcacacataagatacatacttgtgtgcagaaagtatcttcctccaggcttgtaatacccttcacatggaagattaatgagggaaatctttatattctgtataaaaacaaaagcaaatttatatactaaaatcatttgtcaaggtgggttcatntttgcattctganagcactggatgggtgncttccgctttttggtctt

SEQ ID NO: 458035 - DNA, 1395 bp, Homo sapiens
gtagtccggccggaacctgtttgcgaccccgagtcccatgacaccgcttctcctcacaccccagtccgcagtgcccctccccagcctcggccgggcctcccgggagccgggcgtggcgttccagctagtgagccgtttctcccctgggctcggaggcggaagcttgaggggcgcggggaggagcttcgcgtgcggggtgaacgcccgctctacgtgctcgttctcttcgcgaccgctgcgcgcgagccccgtgtccccacggcgggcagcagcggcggcggcggcggctgaacgcggagggggcggagggagcccgcggcggcggcagcagcctacggaccccccagcaacttcctcgagatcgatgtgagcaacccgcaaacggtgggggtcggccggggccgcttcaccacttacgaaatcagggtcaagacaaatcttcctattttcaagctgaaagaatctactgttagaagaagatacagtgactttgaatggctgcgaagtgaattagaaagagagagcaaggtcgtagttcccccgctccctgggaaagcgtttttgcgtcagcttccttttagaggagatgatggaatatttgatgacaattttattgaggaaagaaaacaagggctggagcagtttataaacaaggtcgctggtcatcctctggcacagaacgaacgttgtcttcacatgtttttacaagatgaaataatagataaaagctatactccatctaaaataagacatgcctgaaatttggcaagaaggggcaaaaacgtgactattaatgattgataagcaccagtgaagaagttctaacttttagcatgctgcacagaaactggtataacatgccttcagtatactaacactcatatgctcagttttgttttgttttggcagttgacaagaagttaatttgctttagtaaaaatccctcattccagcctttctatataaatagctctttcttgctgttttaatgtggtgcacactatagcctcacaaacctgttattccagtgtaatctgcagtgtcgtaactaaagttactggcttggtcttatttgcacagtttttgcgtcttgtttgcttcttgcatctgattaactagaatatttctctttcccccttttaatttgtgatgtcacttgaccccatttatgtgtaggagcactacaccattggtttccaatactgcacacataagatacatacttgtgtgcagaaagtatcttcctccaggcttgtaatacccttcacatggaagattaatgagggaaatctttatattctgtataaaaacaaaagcaaatttatatactaaaatcatttgtctaaaaatttaagttgttttcaaataaaaattaaaatgcatttctgatatgca

SEQ ID NO: 458036 - DNA, 1322 bp, Homo sapiens
gtagtccggccggaacctgtttgcgaccccgagtcccatgacaccgcttctcctcacaccccagtccgcagtgcccctccccagcctcggccgggcctcccgggagccgggcgtggcgttccagctagtgagccgtttctcccctgggctcggaggcggaagcttgaggggcgcggggaggagcttcgcgtgcggggtgaacgcccgctctacgtgctcgttctcttcgcgaccgctgcgcgcgagccccgtgtccccacggcgggcagcagcggcggcggcggcggctgaacgcggagggggcggagggagcccgcggcggcggcagcagcttcaccacttacgaaatcagggtcaagacaaatcttcctattttcaagctgaaagaatctactgttagaagaagatacagtgactttgaatggctgcgaagtgaattagaaagagagagcaaggtcgtagttcccccgctccctgggaaagcgtttttgcgtcagcttccttttagaggagatgatggaatatttgatgacaattttattgaggaaagaaaacaagggctggagcagtttataaacaaggtcgctggtcatcctctggcacagaacgaacgttgtcttcacatgtttttacaagatgaaataatagataaaagctatactccatctaaaataagacatgcctgaaatttggcaagaaggggcaaaaacgtgactattaatgattgataagcaccagtgaagaagttctaacttttagcatgctgcacagaaactggtataacatgccttcagtatactaacactcatatgctcagttttgttttgttttggcagttgacaagaagttaatttgctttagtaaaaatccctcattccagcctttctatataaatagctctttcttgctgttttaatgtggtgcacactatagcctcacaaacctgttattccagtgtaatctgcagtgtcgtaactaaagttactggcttggtcttatttgcacagtttttgcgtcttgtttgcttcttgcatctgattaactagaatatttctctttcccccttttaatttgtgatgtcacttgaccccatttatgtgtaggagcactacaccattggtttccaatactgcacacataagatacatacttgtgtgcagaaagtatcttcctccaggcttgtaatacccttcacatggaagattaatgagggaaatctttatattctgtataaaaacaaaagcaaatttatatactaaaatcatttgtctaaaaatttaagttgttttcaaataaaaattaaaatgcatttctgatatgca

SEQ ID NO: 458037 - DNA, 851 bp, Homo sapiens
aacaaggataccggtttgagcattattagcggcatctctgttcgagagttttatttgatgacaattttattgaggaaagaaaacaagggctggagcagtttataaacaaggtcgctggtcatcctctggcacagaacgaacgttgtcttcacatgtttttacaagatgaaataatagataaaagctatactccatctaaaataagacatgcctgaaatttggcaagaaggggcaaaaacgtgactattaatgattgataagcaccagtgaagaagttctaacttttagcatgctgcacagaaactggtataacatgccttcagtatactaacactcatatgctcagttttgttttgttttggcagttgacaagaagttaatttgctttagtaaaaatccctcattccagcctttctatataaatagctctttcttgctgttttaatgtggtgcacactatagcctcacaaacctgttattccagtgtaatctgcagtgtcgtaactaaagttactggcttggtcttatttgcacagtttttgcgtcttgtttgcttcttgcatctgattaactagaatatttctctttcccccttttaatttgtgatgtcacttgaccccatttatgtgtaggagcactacaccattggtttccaatactgcacacataagatacatacttgtgtgcagaaagtatcttcctccaggcttgtaatacccttcacatggaagattaatgagggaaatctttatattctgtataaaaacaaaagcaaatttatatactaaaatcatttgtctaaaaatttaagttgttttcaaataaaaattaaaatgcatttctgatatgca

SEQ ID NO: 458038 - DNA, 1341 bp, Homo sapiens
gtagtccggccggaacctgtttgcgaccccgagtcccatgacaccgcttctcctcacaccccagtccgcagtgcccctccccagcctcggccgggcctcccgggagccgggcgtggcgttccagctagtgagccgtttctcccctgggctcggaggcggaagcttgaggggcgcggggaggagcttcgcgtgcggggtgaacgcccgctctacgtgctcgttctcttcgcgaccgctgcgcgcgagccccgtgtccccacggcgggcagcagcggcggcggcggcggctgaacgcggagggggcggagggagcccgcggcggcggcagcagctacagcgaaatggcggagaccgtggctgacacccggcggctgatcaccaagccgcagaacctgaatgacgcctacggaccccccagcaacttcctcgagatcgatgtgagcaacccgcaaacggtgggggtcggccggggccgcttcaccacttacgaaatcagggtcaagacaaatcttcctattttcaagctgaaagaatctactgttagaagaagatacagtgactttgaatggctgcgaagtgaattagaaagagagagcaagggtcgctggtcatcctctggcacagaacgaacgttgtcttcacatgtttttacaagatgaaataatagataaaagctatactccatctaaaataagacatgcctgaaatttggcaagaaggggcaaaaacgtgactattaatgattgataagcaccagtgaagaagttctaacttttagcatgctgcacagaaactggtataacatgccttcagtatactaacactcatatgctcagttttgttttgttttggcagttgacaagaagttaatttgctttagtaaaaatccctcattccagcctttctatataaatagctctttcttgctgttttaatgtggtgcacactatagcctcacaaacctgttattccagtgtaatctgcagtgtcgtaactaaagttactggcttggtcttatttgcacagtttttgcgtcttgtttgcttcttgcatctgattaactagaatatttctctttcccccttttaatttgtgatgtcacttgaccccatttatgtgtaggagcactacaccattggtttccaatactgcacacataagatacatacttgtgtgcagaaagtatcttcctccaggcttgtaatacccttcacatggaagattaatgagggaaatctttatattctgtataaaaacaaaagcaaatttatatactaaaatcatttgtctaaaaatttaagttgttttcaaataaaaattaaaatgcatttctgatatgca

SEQ ID NO: 458039 - DNA, 1564 bp, Homo sapiens
gtagtccggccggaacctgtttgcgaccccgagtcccatgacaccgcttctcctcacaccccagtccgcagtgcccctccccagcctcggccgggcctcccgggagccgggcgtggcgttccagctagtgagccgtttctcccctgggctcggaggcggaagcttgaggggcgcggggaggagcttcgcgtgcggggtgaacgcccgctctacgtgctcgttctcttcgcgaccgctgcgcgcgagccccgtgtccccacggcgggcagcagcggcggcggcggcggctgaacgcggagggggcggagggagcccgcggcggcggcagcagctacagcgaaatggcggagaccgtggctgacacccggcggctgatcaccaagccgcagaacctgaatgacgcctacggaccccccagcaacttcctcgagatcgatgtgagcaacccgcaaacggtgggggtcggccggggccgcttcaccacttacgaaatcagggtcaagacaaatcttcctattttcaagctgaaagaatctactgttagaagaagatacagtgactttgaatggctgcgaagtgaattagaaagagagagcaaggtcgtagttcccccgctccctgggaaagcgtttttgcgtcagcttccttttagaggagatgatggaatatttgatgacaattttattgaggaaagaaaacaagggctggagcagtttataaacaaggtcgctggtcatcctctggcacagaacgaacgttgtcttcacatgtttttacaagatgaaataatagataaaagctatactccatctaaaataagacatgcctgaaatttggcaagaaggggcaaaaacgtgactattaatgattgataagcaccagtgaagaagttctaacttttagcatgctgcacagaaactggtataacatgccttcagtatactaacactcatatgctcagttttgtcttgtttgcttcttgcatctgattaactagaatatttctctttcccccttttaatttgtgatgtcacttgaccccatttatgtgtaggagcactacaccattggtttccaatactgcacacataagatacatacttgtgtgcagaaagtatcttcctccaggcttgtaatacccttcacatggaagattaatgagggaaatctttatattctgtataaaaacaaaagcaaatttatatactaaaatcatttgtctaaaaatttaagttgttttcaaataaaaattaaaatgcatttctgatatgcactgattgtgttgcctccagctttttttgctctctatgagtgactacttaagtcacttgttgagagggattatttactaattatatacttctcattcctgtaactccattccctttaaacagtggtgatatcaaatatacttccatccattgaatggggtatttttaacaacaacaaaagtgatatactaaaaaatgtattgcttaaggcttattgaatcattttgaagcactttgtgtatttgaaaactgctttataatctcatttattaaaaggactttcaaagataaaa

SEQ ID NO: 458040 - DNA, 742 bp, Homo sapiens
  misc_feature (9)..(9): n is a, c, g, or t
taggggggnggggggaggcggggagcacgactcatcttataactaatgtgacacacctccctagacagaaccgctttttcaattctgaaagaatctactgttagaagaagatacagtgactttgaatggctgcgaagtgaattagaaagagagagcaaggtcgtagttcccccgctccctgggaaagcgtttttgcgtcagcttccttttagaggagatgatggaatatttgatgacaattttattgaggaaagaaaacaagggctggagcagtttataaacaaggtcgctggtcatcctctggcacagaacgaacgttgtcttcacatgttttaatgtggtgcacactatagcctcacaaacctgttattccagtgtaatctgcagtgtcgtaactaaagttactggcttggtcttatttgcacagtttttgcgtcttgtttgcttcttgcatctgattaactagaatatttctctttcccccttttaatttgtgatgtcacttgaccccatttatgtgtaggagcactacaccattggtttccaatactgcacacataagatacatacttgtgtgcagaaagtatcttcctccaggcttgtaatacccttcacatggaagattaatgagggaaatctttatattctgtataaaaacaaaagcaaatttatatactaaaatcatttgtctaaaaatttaagttgttttcaaataaaaattaaaatgcatttctgatatgca

SEQ ID NO: 458041 - DNA, 1370 bp, Homo sapiens
gtagtccggccggaacctgtttgcgaccccgagtcccatgacaccgcttctcctcacaccccagtccgcagtgcccctccccagcctcggccgggcctcccgggagccgggcgtggcgttccagctagtgagccgtttctcccctgggctcggaggcggaagcttgaggggcgcggggaggagcttcgcgtgcggggtgaacgcccgctctacgtgctcgttctcttcgcgaccgctgcgcgcgagccccgtgtccccacggcgggcagcagcggcggcggcggcggctgaacgcggagggggcggagggagcccgcggcggcggcagcagctacagcgaaatggcggagaccgtggctgacacccggcggctgatcaccaagccgcagaacctgaatgacgcctacggaccccccagcaacttcctcgagatcgatgtgagcaacccgcaaacggtgggggtcggccggggccgcttcaccacttacgaaatcagggtcaaggtcgtagttcccccgctccctgggaaagcgtttttgcgtcagcttccttttagaggagatgatggaatatttgatgacaattttattgaggaaagaaaacaagggctggagcagtttataaacaaggtcgctggtcatcctctggcacagaacgaacgttgtcttcacatgtttttacaagatgaaataatagataaaagctatactccatctaaaataagacatgcctgaaatttggcaagaaggggcaaaaacgtgactattaatgattgataagcaccagtgaagaagttctaacttttagcatgctgcacagaaactggtataacatgccttcagtatactaacactcatatgctcagttttgttttgttttggcagttgacaagaagttaatttgctttagtaaaaatccctcattccagcctttctatataaatagctctttcttgctgttttaatgtggtgcacactatagcctcacaaacctgttattccagtgtaatctgcagtgtcgtaactaaagttactggcttggtcttatttgcacagtttttgcgtcttgtttgcttcttgcatctgattaactagaatatttctctttcccccttttaatttgtgatgtcacttgaccccatttatgtgtaggagcactacaccattggtttccaatactgcacacataagatacatacttgtgtgcagaaagtatcttcctccaggcttgtaatacccttcacatggaagattaatgagggaaatctttatattctgtataaaaacaaaagcaaatttatatactaaaatcatttgtctaaaaatttaagttgttttcaaataaaaattaaaatgcatttctgatatgca

SEQ ID NO: 458042 - DNA, 1968 bp, Homo sapiens
gtagtccggccggaacctgtttgcgaccccgagtcccatgacaccgcttctcctcacaccccagtccgcagtgcccctccccagcctcggccgggcctcccgggagccgggcgtggcgttccagctagtgagccgtttctcccctgggctcggaggcggaagcttgaggggcgcggggaggagcttcgcgtgcggggtgaacgcccgctctacgtgctcgttctcttcgcgaccgctgcgcgcgagccccgtgtccccacggcgggcagcagcggcggcggcggcggctgaacgcggagggggcggagggagcccgcggcggcggcagcagctacagcgaaatggcggagaccgtggctgacacccggcggctgatcaccaagccgcagaacctgaatgacgcctacggaccccccagcaacttcctcgagatcgatgtgagcaacccgcaaacggtgggggtcggccggggccgcttcaccacttacgaaatcagggtcaagacaaatcttcctattttcaagctgaaagaatctactgttagaagaagatacagtgactttgaatggctgcgaagtgaattagaaagagagagcaaggtcgtagttcccccgctccctgggaaagcgtttttgcgtcagcttccttttagaggagatgatggaatatttgatgacaattttattgaggaaagaaaacaagggctggagcagtttataaacaaggtcgctggtcatcctctggcacagaacgaacgttgtcttcacatgtttttacaagatgaaataatagataaaagctatactccatctaaaataagacatgcctgaaatttggcaagaaggggcaaaaacgtgactattaatgattgataagcaccagtgaagaagttctaacttttagcatgctgcacagaaactggtataacatgccttcagtatactaacactcatatgctcagttttgttttgttttggcagttgacaagaagttaatttgctttagtaaaaatccctcattccagcctttctatataaatagctctttcttgctgttttaatgtggtgcacactatagcctcacaaacctgttattccagtgtaatctgcagtgtcgtaactaaagttactggcttggtcttatttgcacagtttttgcgtcttgtttgcttcttgcatctgattaactagaatatttctctttcccccttttaatttgtgatgtcacttgaccccatttatgtgtaggagcactacaccattggtttccaatactgcacacataagatacatacttgtgtgcagaaagtatcttcctccaggcttgtaatacccttcacatggaagattaatgagggaaatctttatattctgtataaaaacaaaagcaaatttatatactaaaatcatttgtctaaaaatttaagttgttttcaaataaaaattaaaatgcatttctgatatgcactgattgtgttgcctccagctttttttgctctctatgagtgactacttaagtcacttgttgagagggattatttactaattatatacttctcattcctgtaactccattccctttaaacagtggtgatatcaaatatacttccatccattgaatggggtatttttaacaacaacaaaagtgatatactaaaaaatgtattgcttaaggcttattgaatcattttgaagcactttgtgtatttgaaaactgctttataatctcatttattaaaaggactttcaaagataaaaaaaacacaacaaagaatagaaacaaaaaaaaagggggggggctaaaaataaccccgagggcccagttagtgcccccgttttgccaacgggcctaagggacgtaaaaacaagacgggccggtaaaagccggcgggaaacgccggtccggggagaccctccggcgggcatggcacccccggataaaggcggataaatcggcagggcaccgttc

SEQ ID NO: 458043 - DNA, 1730 bp, Homo sapiens
  misc_feature (1730)..(1730): n is a, c, g, or t
gtagtccggccggaacctgtttgcgaccccgagtcccatgacaccgcttctcctcacaccccagtccgcagtgcccctccccagcctcggccgggcctcccgggagccgggcgtggcgttccagctagtgagccgtttctcccctgggctcggaggcggaagcttgaggggcgcggggaggagcttcgcgtgcggggtgaacgcccgctctacgtgctcgttctcttcgcgaccgctgcgcgcgagccccgtgtccccacggcgggcagcagcggcggcggcggcggctgaacgcggagggggcggagggagcccgcggcggcggcagcagctacagcgaaatggcggagaccgtggctgacacccggcggctgatcaccaagccgcagaacctgaatgacgcctacggaccccccagcaacttcctcgagatcgatgtgagcaacccgcaaacggtgggggtcggccggggccgcttcaccacttacgaaatcagggtcaagacaaatcttcctattttcaagctgaaagaatctactgttagaagaagatacagtgactttgaatggctgcgaagtgaattagaaagagagagcaaggtcgtagttcccccgctccctgggaaagcgtttttgcgtcagcttccttttagaggagatgatggaatatttgatgacaattttattgaggaaagaaaacaagggctggagcagtttataaacaaggtcgctggtcatcctctggcacagaacgaacgttgtcttcacatgtttttacaagatgaaataatagataaaagctatactccatctaaaataagacatgcctgaaatttggcaagaaggggcaaaaacgtgactattaatgattgataagcaccagtgaagaagttctaacttttagcatgctgcacagaaactggtataacatgccttcagtatactaacactcatatgctcagttttgttttgttttggcagttgacaagaagttaatttgctttagtaaaaatccctcattccagcctttctatataaatagctctttcttgctgttttaatgtggtgcacactatagcctcacaaacctgttattccagtgtaatctgcagtgtcgtaactaaagttactggcttggtcttatttgcacagtttttgcgtcttgtttgcttcttgcatctgattaactagaatatttctctttcccccttttaatttgtgatgtcacttgaccccatttatgtgtaggagcactacaccattggtttccaatactgcacacataagatacatacttgtgtgcagaaagtatcttcctccaggcttgtaatacccttcacatggaagattaatgagggaaatcttctatccgggtaacaccaaagcaattctctcctcaaatcctggcctaaattcagtcggttcactcacattacggcgccaaaacaaacaatgcagctccaatcgtgtgtgcgtcagggttccaccgaacttcagggtttgcccctgggggacagaacataacaccgaatatcgagcgcggcaggggacagcagcaatctcctcgaaacggactcgtaatattttctaaacaggaccgaaccaaacaccagtccctgcgaaccgcacaaaccacacacacaaagcccgcatcacacacacacgcgacactcgccaacgaccaacgcccgcggacacacgcgcgcagacgtccacacagaacacctgccn

SEQ ID NO: 458044 - DNA, 1400 bp, Homo sapiens
gtagtccggccggaacctgtttgcgaccccgagtcccatgacaccgcttctcctcacaccccagtccgcagtgcccctccccagcctcggccgggcctcccgggagccgggcgtggcgttccagctagtgagccgtttctcccctgggctcggaggcggaagcttgaggggcgcggggaggagcttcgcgtgcggggtgaacgcccgctctacgtgctcgttctcttcgcgaccgctgcgcgcgagccccgtgtccccacggcgggcagcagcggcggcggcggcggctgaacgcggagggggcggagggagcccgcggcggcggcagcagctacagcgaaatggcggagaccgtggctgacacccggcggctgatcaccaagccgcagaacctgaatgacgcctacggaccccccagcaacttcctcgagatcgatacaaatcttcctattttcaagctgaaagaatctactgttagaagaagatacagtgactttgaatggctgcgaagtgaattagaaagagagagcaaggtcgtagttcccccgctccctgggaaagcgtttttgcgtcagcttccttttagaggagatgatggaatatttgatgacaattttattgaggaaagaaaacaagggctggagcagtttataaacaaggtcgctggtcatcctctggcacagaacgaacgttgtcttcacatgtttttacaagatgaaataatagataaaagctatactccatctaaaataagacatgcctgaaatttggcaagaaggggcaaaaacgtgactattaatgattgataagcaccagtgaagaagttctaacttttagcatgctgcacagaaactggtataacatgccttcagtatactaacactcatatgctcagttttgttttgttttggcagttgacaagaagttaatttgctttagtaaaaatccctcattccagcctttctatataaatagctctttcttgctgttttaatgtggtgcacactatagcctcacaaacctgttattccagtgtaatctgcagtgtcgtaactaaagttactggcttggtcttatttgcacagtttttgcgtcttgtttgcttcttgcatctgattaactagaatatttctctttcccccttttaatttgtgatgtcacttgaccccatttatgtgtaggagcactacaccattggtttccaatactgcacacataagatacatacttgtgtgcagaaagtatcttcctccaggcttgtaatacccttcacatggaagattaatgagggaaatctttatattctgtataaaaacaaaagcaaatttatatactaaaatcatttgtctaaaaatttaagttgttttcaaataaaaattaaaatgcatttctgatatgca

SEQ ID NO: 458045 - DNA, 1408 bp, Homo sapiens
gtagtccggccggaacctgtttgcgaccccgagtcccatgacaccgcttctcctcacaccccagtccgcagtgcccctccccagcctcggccgggcctcccgggagccgggcgtggcgttccagctagtgagccgtttctcccctgggctcggaggcggaagcttgaggggcgcggggaggagcttcgcgtgcggggtgaacgcccgctctacgtgctcgttctcttcgcgaccgctgcgcgcgagccccgtgtccccacggcgggcagcagcggcggcggcggcggctgaacgcggagggggcggagggagcccgcggcggcggcagcagctacagcgaaatggcggagaccgtggctgacacccggcggctgatcaccaagccgcagaacctgaatgacgcctacggaccccccagcaacttcctcgagatcgatgtgagcaacccgcaaacggtgggggtcggccggggccgcttcaccacttacgaaatcagggtcaagacaaatcttcctattttcaagctgaaagaatctactgttagaagaagatacagtgactttgaatggctgcgaagtgaattagaaagagagagcaaggtcgtagttcccccgctccctgggaaagcgtttttgcgtcagcttccttttagaggagatgatggaaggtcgctggtcatcctctggcacagaacgaacgttgtcttcacatgtttttacaagatgaaataatagataaaagctatactccatctaaaataagacatgcctgaaatttggcaagaaggggcaaaaacgtgactattaatgattgataagcaccagtgaagaagttctaacttttagcatgctgcacagaaactggtataacatgccttcagtatactaacactcatatgctcagttttgttttgttttggcagttgacaagaagttaatttgctttagtaaaaatccctcattccagcctttctatataaatagctctttcttgctgttttaatgtggtgcacactatagcctcacaaacctgttattccagtgtaatctgcagtgtcgtaactaaagttactggcttggtcttatttgcacagtttttgcgtcttgtttgcttcttgcatctgattaactagaatatttctctttcccccttttaatttgtgatgtcacttgaccccatttatgtgtaggagcactacaccattggtttccaatactgcacacataagatacatacttgtgtgcagaaagtatcttcctccaggcttgtaatacccttcacatggaagattaatgagggaaatctttatattctgtataaaaacaaaagcaaatttatatactaaaatcatttgtctaaaaatttaagttgttttcaaataaaaattaaaatgcatttctgatatgca

SEQ ID NO: 458046 - DNA, 1182 bp, Homo sapiens
gtagtccggccggaacctgtttgcgaccccgagtcccatgacaccgcttctcctcacaccccagtccgcagtgcccctccccagcctcggccgggcctcccgggagccgggcgtggcgttccagctagtgagccgtttctcccctgggctcggaggcggaagcttgaggggcgcggggaggagcttcgcgtgcggggtgaacgcccgctctacgtgctcgttctcttcgcgaccgctgcgcgcgagccccgtgtccccacggcgggcagcagcggcggcggcggcggctgaacgcggagggggcggagggagcccgcggcggcggcagcagctacagcgaaatggcggagaccgtggctgacacccggcggctgatcaccaagccgcagaacctgaatgacgcctacggaccccccagcaacttcctcgagatcgatgtgagcaacccgcaaacggtgggggtcggccggggccgcttcaccacttacgaaatcagggtcaagacaaatcttcctattttcaagctgaaagaatctactgttagaagaagatacagtgactttgaatggctgcgaagtgaattagaaagagagagcaaggtcgtagttcccccgctccctgggaaagcgtttttgcgtcagcttccttttagaggagatgatggaatatttgatgacaattttattgaggaaagaaaacaagggctggagcagtttataaacaaggtcgctggtcatcctctggcacagaacgaacgttgtcttcacatgttttaatgtggtgcacactatagcctcacaaacctgttattccagtgtaatctgcagtgtcgtaactaaagttactggcttggtcttatttgcacagtttttgcgtcttgtttgcttcttgcatctgattaactagaatatttctctttcccccttttaatttgtgatgtcacttgaccccatttatgtgtaggagcactacaccattggtttccaatactgcacacataagatacatacttgtgtgcagaaagtatcttcctccaggcttgtaatacccttcacatggaagattaatgagggaaatctttatattctgtataaaaacaaaagcaaatttatatactaaaatcatttgtctaaaaatttaagttgttttcaaataaaaattaaaatgcatttctgatatgca

SEQ ID NO: 458047 - DNA, 725 bp, Homo sapiens
gtagtccggccggaacctgtttgcgaccccgagtcccatgacaccgcttctcctcacaccccagtccgcagtgcccctccccagcctcggccgggcctcccgggagccgggcgtggcgttccagctagtgagccgtttctcccctgggctcggaggcggaagcttgaggggcgcggggaggagcttcgcgtgcggggtgaacgcccgctctacgtgctcgttctcttcgcgaccgctgcgcgcgagccccgtgtccccacggcgggcagcagcggcggcggcggcggctgaacgcggagggggcggagggagcccgcggcggcggcagcagctacagcgaaatggcggagaccgtggctgacacccggcggctgatcaccaagccgcagaacctgaatgacgcctacggaccccccagcaacttcctcgagatcgatgtgagcaacccgcaaacggtgggggtcggccggggccgcttcaccacttacgaaatcagggtcaagacaaatcttcctattttcaagctgaaagaatctactgttagaagaagatacagtgactttgaatggctgcgaagtgaattagaaagagagagcaaggtcgtagttcccccgctccctgggaaagcgtttttgcgtcagcttccttttagaggagatgatggaaagaagatgacaagggtgattgacggcaagcaaaaccaagactggtggcccgcgacggtc

SEQ ID NO: 458048 - DNA, 2911 bp, Homo sapiens
cccgtgcaggggccctacggacaccaccagggctacgacccagagcagggccaggatggcggccgccttgcgctcggtcatgatggctgggtacttgagtgagtggcgcacgcccacgtaccggtccacggagatggtgcagaggctgaggatggaggccgtgcagcacagcacgtccacggcggccgtcgggggactggtggtgagcgcgcagggcgtgggcgtgggcgtcttcctggcagccttcatccttatggccgtggcaggtaacctgcttgtcatcctctcagtggcctgcaaccgccacctgcagaccgtcaccaactatttcatcgtgaacctggccgtggccgacctgctgctgagcgccaccgtactgcccttctcggccaccatggaggttctgggcttctgggcctttggccgcgccttctgcgacgtatgggccgccgtggacgtgctgtgctgcacggcctccatcctcagcctctgcaccatctccgtggaccggtacgtgggcgtgcgccactcactcaagtacccagccatcatgaccgagcgcaaggcggccgccatcctggccctgctctgggtcgtagccctggtggtgtccgtagggcccctgctgggctggaaggagcccgtgccccctgacgagcgcttctgcggtatcaccgaggaggcgggctacgctgtcttctcctccgtgtgctccttctacctgcccatggcggtcatcgtggtcatgtactgccgcgtgtacgtggtcgcgcgcagcaccacgcgcagcctcgaggcaggcgtcaagcgcgagcgaggcaaggcctccgaggtggtgctgcgcatccactgtcgcggcgcggccacgggcgccgacggggcgcacggcatgcgcagcgccaagggccacaccttccgcagctcgctctccgtgcgcctgctcaagttctcccgtgagaagaaagcggccaagactctggccatcgtcgtgggtgtcttcgtgctctgctggttccctttcttctttgtcctgccgctcggctccttgttcccgcagctgaagccatcggagggcgtcttcaaggtcatcttctggctcggctacttcaacagctgcgtgaacccgctcatctacccctgttccagccgcgagttcaagcgcgccttcctccgtctcctgcgctgccagtgccgtcgtcgccggcgccgccgccctctctggcgtgtctacggccaccactggcgggcctccaccagcggcctgcgccaggactgcgccccgagttcgggcgacgcgccccccggagcgccgctggccctcaccgcgctccccgaccccgaccccgaacccccaggcacgcccgagatgcaggctccggtcgccagccgtcgaaagccacccagcgccttccgcgagtggaggctgctggggccgttccggagacccacgacccagctgcgcgccaaagtctccagcctgtcgcacaagatccgcgccgggggcgcgcagcgcgcagaggcagcgtgcgcccagcgctcagaggtggaggctgtgtccctaggcgtcccacacgaggtggccgagggcgccacctgccaggcctacgaattggccgactacagcaacctacgggagaccgatatttaaggaccccagagctaggccgcggagtgtgctgggcttgggggtaagggggaccagagaggcgggctggtgttctaagagcccccgtgcaaatcggagacccggaaactgatcagggcagctgctctgtgacatccctgaggaactgggcagagcttgaggctggagcccttgaaaggtgaaaagtagtggggccccctgctggactcaggtgcccagaactcttttcttagaagggagaggctgcgggctccgtggggccttttgctcccaatccctatttgagaaacactgccccatcctccatgccctgaaccctgagtagacagccccaagcatggccaggaaggcctgcccctcctcttctgggaaataggcacagaagctttggccggctaccccagtgcctcccttagggaaaaagtcagtgggaccagggctcctcagtggacaaatttctccttcttactgccaactggaggaacccagtggacctaccaccacccacaagctttggtggcagattgtatagccgtcatacaagcctgctgtatttatccatgggcccgctgtccgccacccaggctcctccgtgcacaccccatcacctggcccctaccccttattacttcccctcaagggccttactgtttacactctgtacatagctcatcgtgcctgtgcccatcacttcttgctgggattccaagccaccaattggagagctttatttgtcattttgagacatatttattggtaagagtacttctattttgtccaagctgtgcaaactgtccctctttagcccataacccattaaaaaaaaaatactttttcccctaaagtctgtcaagaactaaaggcccgcaacagaatagattgggtctacatttgcctttctagtttcaacttaactgactctttaactgatggctgctgtctgttgggagttttagcatgaccaaaggacctgggggggggttgttaggttttaaaactcacatgatcggtcttgtgaaccaaatagtgatcctaagcacaaattgtccctttgtcagtctccccagatgcttatgtaatgctctgagggcctcagtgaggaaggcggccatcaggtaaatgggtgaaacataagtttacatgaaaagatatacaagcccgagtagatagctgtacatggctaggaaaagaacccatacctaggaaccatgcttgttagctttgagtaaaatgtcatattcctacttgtcatattcccatgagatt

SEQ ID NO: 458049 - DNA, 2420 bp, Homo sapiens
gcccttcagagaggttatatcagactgctccagcacagtagtttaatctactgtttatatataggtagcgcgggttccatatgtacaaaattttattgaacttgctcagcaattctattaaagcagaattatactgagttttgggtgtaagagtatatctgttcatagcagcataattactagcctggtcagacgttatcttctgtgtaggaagaggcaaggactagggtcatttatcatttcaggaaaacagtgactcagacaggagatgtggcagggaggcgggggcatatgttttatcctattttatcttcaaagcatctttccagagagccgtactttgtcacagagtcggggactttgtgaaattatgctggcacgcagaaatgagcaaacatggctatgtttgctactttgtctcataatacgaaactgccaatattgcaccggttttgagctacaaaaacagcaattgcacgtggttttgtctaactctactctggtttgttgcctacattcattgaaggtaatcctcaatatcaggtagaggctccttgttcccgcagctgaagccatcggagggcgtcttcaaggtcatcttctggctcggctacttcaacagctgcgtgaacccgctcatctacccctgttccagccgcgagttcaagcgcgccttcctccgtctcctgcgctgccagtgccgtcgtcgccggcgccgccgccctctctggcgtgtctacggccaccactggcgggcctccaccagcggcctgcgccaggactgcgccccgagttcgggcgacgcgccccccggagcgccgctggccctcaccgcgctccccgaccccgaccccgaacccccaggcacgcccgagatgcaggctccggtcgccagccgtcgaaagccacccagcgccttccgcgagtggaggctgctggggccgttccggagacccacgacccagctgcgcgccaaagtctccagcctgtcgcacaagatccgcgccgggggcgcgcagcgcgcagaggcagcgtgcgcccagcgctcagaggtggaggctgtgtccctaggcgtcccacacgaggtggccgagggcgccacctgccaggcctacgaattggccgactacagcaacctacgggagaccgatatttaaggaccccagagctaggccgcggagtgtgctgggcttgggggtaagggggaccagagaggcgggctggtgttctaagagcccccgtgcaaatcggagacccggaaactgatcagggcagctgctctgtgacatccctgaggaactgggcagagcttgaggctggagcccttgaaaggtgaaaagtagtggggccccctgctggactcaggtgcccagaactcttttcttagaagggagaggctgcgggctccgtggggccttttgctcccaatccctatttgagaaacactgccccatcctccatgccctgaaccctgagtagacagccccaagcatggccaggaaggcctgcccctcctcttctgggaaataggcacagaagctttggccggctaccccagtgcctcccttagggaaaaagtcagtgggaccagggctcctcagtggacaaatttctccttcttactgccaactggaggaacccagtggacctaccaccacccacaagctttggtggcagattgtatagccgtcatacaagcctgctgtatttatccatgggcccgctgtccgccacccaggctcctccgtgcacaccccatcacctggcccctaccccttattacttcccctcaagggccttactgtttacactctgtacatagctcatcgtgcctgtgcccatcacttcttgctgggattccaagccaccaattggagagctttatttgtcattttgagacatatttattggtaagagtacttctattttgtccaagctgtgcaaactgtccctctttagcccataacccattaaaaaaaaaatactttttcccctaaagtctgtcaagaactaaaggcccgcaacagaatagattgggtctacatttgcctttctagtttcaacttaactgactctttaactgatggctgctgtctgttgggagttttagcatgaccaaaggacctgggggggggttgttaggttttaaaactcacatgatcggtcttgtgaaccaaatagtgatcctaagcacaaattgtccctttgtcagtctccccagatgcttatgtaatgctctgagggcctcagtgaggaaggcggccatcaggtaaatgggtgaaacataagtttacatgaaaagatatacaagcccgagtagatagctgtacatggctaggaaaagaacccatacctaggaaccatgcttgttagctttgagtaaaatgtcatattcctacttgtcatattcccatgagatt

SEQ ID NO: 458050 - DNA, 3041 bp, Homo sapiens
ctccctgccggccgctcgttctgtgcccccggcccggccaccgacggccgcgcgttgagatgactttccgcgatctcctgagcgtcagtttcgagggaccccgcccggacagcagcgcagggggctccagcgcgggcggcggcgggggcagcgcgggcggcgcggccccctcggagggcccggcggtgggcggcgtgccggggggcgcgggcggcggcggcggcgtggtgggcgcaggcagcggcgaggacaaccggagctccgcgggggagccggggagcgcgggcgcgggcggcgacgtgaatggcacggcggccgtcgggggactggtggtgagcgcgcagggcgtgggcgtgggcgtcttcctggcagccttcatccttatggccgtggcaggtaacctgcttgtcatcctctcagtggcctgcaaccgccacctgcagaccgtcaccaactatttcatcgtgaacctggccgtggccgacctgctgctgagcgccaccgtactgcccttctcggccaccatggaggttctgggcttctgggcctttggccgcgccttctgcgacgtatgggccgccgtggacgtgctgtgctgcacggcctccatcctcagcctctgcaccatctccgtggaccggtacgtgggcgtgcgccactcactcaagtacccagccatcatgaccgagcgcaaggcggccgccatcctggccctgctctgggtcgtagccctggtggtgtccgtagggcccctgctgggctggaaggagcccgtgccccctgacgagcgcttctgcggtatcaccgaggaggcgggctacgctgtcttctcctccgtgtgctccttctacctgcccatggcggtcatcgtggtcatgtactgccgcgtgtacgtggtcgcgcgcagcaccacgcgcagcctcgaggcaggcgtcaagcgcgagcgaggcaaggcctccgaggtggtgctgcgcatccactgtcgcggcgcggccacgggcgccgacggggcgcacggcatgcgcagcgccaagggccacaccttccgcagctcgctctccgtgcgcctgctcaagttctcccgtgagaagaaagcggccaagactctggccatcgtcgtgggtgtcttcgtgctctgctggttccctttcttctttgtcctgccgctcggctccttgttcccgcagctgaagccatcggagggcgtcttcaaggtcatcttctggctcggctacttcaacagctgcgtgaacccgctcatctacccctgttccagccgcgagttcaagcgcgccttcctccgtctcctgcgctgccagtgccgtcgtcgccggcgccgccgccctctctggcgtgtctacggccaccactggcgggcctccaccagcggcctgcgccaggactgcgccccgagttcgggcgacgcgccccccggagcgccgctggccctcaccgcgctccccgaccccgaccccgaacccccaggcacgcccgagatgcaggctccggtcgccagccgtcgaaagccacccagcgccttccgcgagtggaggctgctggggccgttccggagacccacgacccagctgcgcgccaaagtctccagcctgtcgcacaagatccgcgccgggggcgcgcagcgcgcagaggcagcgtgcgcccagcgctcagaggtggaggctgtgtccctaggcgtcccacacgaggtggccgagggcgccacctgccaggcctacgaattggccgactacagcaacctacgggagaccgatatttaaggaccccagagctaggccgcggagtgtgctgggcttgggggtaagggggaccagagaggcgggctggtgttctaagagcccccgtgcaaatcggagacccggaaactgatcagggcagctgctctgtgacatccctgaggaactgggcagagcttgaggctggagcccttgaaaggtgaaaagtagtggggccccctgctggactcaggtgcccagaactcttttcttagaagggagaggctgcgggctccgtggggccttttgctcccaatccctatttgagaaacactgccccatcctccatgccctgaaccctgagtagacagccccaagcatggccaggaaggcctgcccctcctcttctgggaaataggcacagaagctttggccggctaccccagtgcctcccttagggaaaaagtcagtgggaccagggctcctcagtggacaaatttctccttcttactgccaactggaggaacccagtggacctaccaccacccacaagctttggtggcagattgtatagccgtcatacaagcctgctgtatttatccatgggcccgctgtccgccacccaggctcctccgtgcacaccccatcacctggcccctaccccttattacttcccctcaagggccttactgtttacactctgtacatagctcatcgtgcctgtgcccatcacttcttgctgggattccaagccaccaattggagagctttatttgtcattttgagacatatttattggtaagagtacttctattttgtccaagctgtgcaaactgtccctctttagcccataacccattaaaaaaaaaatactttttcccctaaagtctgtcaagaactaaaggcccgcaacagaatagattgggtctacatttgcctttctagtttcaacttaactgactctttaactgatggctgctgtctgttgggagttttagcatgaccaaaggacctgggggggggttgttaggttttaaaactcacatgatcggtcttgtgaaccaaatagtgatcctaagcacaaattgtccctttgtcagtctccccagatgcttatgtaatgctctgagggcctcagtgaggaaggcggccatcaggtaaatgggtgaaacataagtttacatgaaaagatatacaagcccgagtagatagctgtacatggctaggaaaagaacccatacctaggaaccatgcttgttagctttgagtaaaatgtcatattcctacttgtcatattcccatgagatt

SEQ ID NO: 458051 - DNA, 2609 bp, Homo sapiens
gcccttcagagaggttatatcagactgctccagcacagtagtttaatctactgtttatatataggtagcgcgggttccatatgtacaaaattttattgaacttgctcagcaattctattaaagcagaattatactgagttttgggtgtaagagtatatctgttcatagcagcataattactagcctggtcagacgttatcttctgtgtaggaagaggcaaggactagggtcatttatcatttcaggaaaacagtgactcagacaggagatgtggcagggaggcgggggcatatgttttatcctattttatcttcaaagcatctttccagagagccgtactttgtcacagagtcggggactttgtgaaattatgctggcacgcagaaatgagcaaacatggctatgtttgctactttgtctcataatacgaaactgccaatattgcaccggttttgagctacaaaaacagcaattgcacgtggttttgtctaactctactctggtttgttgcctacattcattgaaggtaatcctcaatatcaggtagaggtgagtgaaaacaattattatttttctctatccaagttcatggacctcctgatttacagcacggatcccttgagaactcctagtcaatgactcagccaaggctactgaagggtctcccctttgcgcccagagccgcctggcctccccctccccaagcagctaaacagtatcggtctctgctccctacaggctccttgttcccgcagctgaagccatcggagggcgtcttcaaggtcatcttctggctcggctacttcaacagctgcgtgaacccgctcatctacccctgttccagccgcgagttcaagcgcgccttcctccgtctcctgcgctgccagtgccgtcgtcgccggcgccgccgccctctctggcgtgtctacggccaccactggcgggcctccaccagcggcctgcgccaggactgcgccccgagttcgggcgacgcgccccccggagcgccgctggccctcaccgcgctccccgaccccgaccccgaacccccaggcacgcccgagatgcaggctccggtcgccagccgtcgaaagccacccagcgccttccgcgagtggaggctgctggggccgttccggagacccacgacccagctgcgcgccaaagtctccagcctgtcgcacaagatccgcgccgggggcgcgcagcgcgcagaggcagcgtgcgcccagcgctcagaggtggaggctgtgtccctaggcgtcccacacgaggtggccgagggcgccacctgccaggcctacgaattggccgactacagcaacctacgggagaccgatatttaaggaccccagagctaggccgcggagtgtgctgggcttgggggtaagggggaccagagaggcgggctggtgttctaagagcccccgtgcaaatcggagacccggaaactgatcagggcagctgctctgtgacatccctgaggaactgggcagagcttgaggctggagcccttgaaaggtgaaaagtagtggggccccctgctggactcaggtgcccagaactcttttcttagaagggagaggctgcgggctccgtggggccttttgctcccaatccctatttgagaaacactgccccatcctccatgccctgaaccctgagtagacagccccaagcatggccaggaaggcctgcccctcctcttctgggaaataggcacagaagctttggccggctaccccagtgcctcccttagggaaaaagtcagtgggaccagggctcctcagtggacaaatttctccttcttactgccaactggaggaacccagtggacctaccaccacccacaagctttggtggcagattgtatagccgtcatacaagcctgctgtatttatccatgggcccgctgtccgccacccaggctcctccgtgcacaccccatcacctggcccctaccccttattacttcccctcaagggccttactgtttacactctgtacatagctcatcgtgcctgtgcccatcacttcttgctgggattccaagccaccaattggagagctttatttgtcattttgagacatatttattggtaagagtacttctattttgtccaagctgtgcaaactgtccctctttagcccataacccattaaaaaaaaaatactttttcccctaaagtctgtcaagaactaaaggcccgcaacagaatagattgggtctacatttgcctttctagtttcaacttaactgactctttaactgatggctgctgtctgttgggagttttagcatgaccaaaggacctgggggggggttgttaggttttaaaactcacatgatcggtcttgtgaaccaaatagtgatcctaagcacaaattgtccctttgtcagtctccccagatgcttatgtaatgctctgagggcctcagtgaggaaggcggccatcaggtaaatgggtgaaacataagtttacatgaaaagatatacaagcccgagtagatagctgtacatggctaggaaaagaacccatacctaggaaccatgcttgttagctttgagtaaaatgtcatattcctacttgtcatattcccatgagatt

SEQ ID NO: 458052 - DNA, 2782 bp, Homo sapiens
tcaacgcaccgcgcgcccaagggcaccagcgagtgaccgagagactcgggggagagggcgggaggaagagggacgccgctgagggccaaggggcgtgggcgtcttcctggcagccttcatccttatggccgtggcaggtaacctgcttgtcatcctctcagtggcctgcaaccgccacctgcagaccgtcaccaactatttcatcgtgaacctggccgtggccgacctgctgctgagcgccaccgtactgcccttctcggccaccatggaggttctgggcttctgggcctttggccgcgccttctgcgacgtatgggccgccgtggacgtgctgtgctgcacggcctccatcctcagcctctgcaccatctccgtggaccggtacgtgggcgtgcgccactcactcaagtacccagccatcatgaccgagcgcaaggcggccgccatcctggccctgctctgggtcgtagccctggtggtgtccgtagggcccctgctgggctggaaggagcccgtgccccctgacgagcgcttctgcggtatcaccgaggaggcgggctacgctgtcttctcctccgtgtgctccttctacctgcccatggcggtcatcgtggtcatgtactgccgcgtgtacgtggtcgcgcgcagcaccacgcgcagcctcgaggcaggcgtcaagcgcgagcgaggcaaggcctccgaggtggtgctgcgcatccactgtcgcggcgcggccacgggcgccgacggggcgcacggcatgcgcagcgccaagggccacaccttccgcagctcgctctccgtgcgcctgctcaagttctcccgtgagaagaaagcggccaagactctggccatcgtcgtgggtgtcttcgtgctctgctggttccctttcttctttgtcctgccgctcggctccttgttcccgcagctgaagccatcggagggcgtcttcaaggtcatcttctggctcggctacttcaacagctgcgtgaacccgctcatctacccctgttccagccgcgagttcaagcgcgccttcctccgtctcctgcgctgccagtgccgtcgtcgccggcgccgccgccctctctggcgtgtctacggccaccactggcgggcctccaccagcggcctgcgccaggactgcgccccgagttcgggcgacgcgccccccggagcgccgctggccctcaccgcgctccccgaccccgaccccgaacccccaggcacgcccgagatgcaggctccggtcgccagccgtcgaaagccacccagcgccttccgcgagtggaggctgctggggccgttccggagacccacgacccagctgcgcgccaaagtctccagcctgtcgcacaagatccgcgccgggggcgcgcagcgcgcagaggcagcgtgcgcccagcgctcagaggtggaggctgtgtccctaggcgtcccacacgaggtggccgagggcgccacctgccaggcctacgaattggccgactacagcaacctacgggagaccgatatttaaggaccccagagctaggccgcggagtgtgctgggcttgggggtaagggggaccagagaggcgggctggtgttctaagagcccccgtgcaaatcggagacccggaaactgatcagggcagctgctctgtgacatccctgaggaactgggcagagcttgaggctggagcccttgaaaggtgaaaagtagtggggccccctgctggactcaggtgcccagaactcttttcttagaagggagaggctgcgggctccgtggggccttttgctcccaatccctatttgagaaacactgccccatcctccatgccctgaaccctgagtagacagccccaagcatggccaggaaggcctgcccctcctcttctgggaaataggcacagaagctttggccggctaccccagtgcctcccttagggaaaaagtcagtgggaccagggctcctcagtggacaaatttctccttcttactgccaactggaggaacccagtggacctaccaccacccacaagctttggtggcagattgtatagccgtcatacaagcctgctgtatttatccatgggcccgctgtccgccacccaggctcctccgtgcacaccccatcacctggcccctaccccttattacttcccctcaagggccttactgtttacactctgtacatagctcatcgtgcctgtgcccatcacttcttgctgggattccaagccaccaattggagagctttatttgtcattttgagacatatttattggtaagagtacttctattttgtccaagctgtgcaaactgtccctctttagcccataacccattaaaaaaaaaatactttttcccctaaagtctgtcaagaactaaaggcccgcaacagaatagattgggtctacatttgcctttctagtttcaacttaactgactctttaactgatggctgctgtctgttgggagttttagcatgaccaaaggacctgggggggggttgttaggttttaaaactcacatgatcggtcttgtgaaccaaatagtgatcctaagcacaaattgtccctttgtcagtctccccagatgcttatgtaatgctctgagggcctcagtgaggaaggcggccatcaggtaaatgggtgaaacataagtttacatgaaaagatatacaagcccgagtagatagctgtacatggctaggaaaagaacccatacctaggaaccatgcttgttagctttgagtaaaatgtcatattcctacttgtcatattcccatgagatt

SEQ ID NO: 458053 - DNA, 1457 bp, Homo sapiens
aaacttttcatattgaacttttatttctgtgcggtagtcagttaaattcttcatggcatatagtaattatcaggccatttgagaatattttacaagcaggttggaacagagaacaggtagtaggaaaccaaatcttatctctttgagactcattttgaattaactacccctcacctctcattcgaaggcactatattttgcagagaaaaactcacacaacccaaatgtttaatcagaagccatgtaataactgaaacacatgttcagtttctcaataatgcttatttctaaagagaacattaaaaacttggtggcgccggggtggggcttaaaaccattgaatcactggtccccaacttttttggcaccaaggaccagtttcctggaagacaatttttccagactcgggggtggggatggtttcaggatgaaactgttccagctcagatcaggcattagattccataaggagtgcacaacctagatcccttgcatgcacagttcccaataggattcgtgctcctatgagaatctaatgtcaccactgatctgacagaaggtggagctcaggcaataatacttgcctgcccacccagttcctaactggtccgtaggcctgggggcacctgcatttactgacctaatttcagtatttaactccctactattcaaaaattttctggaagttactgtagcttttcgggcattacgtaagagtaactttccctacctctctctaggttgggaaagagaacaaaacaatgagaaaagttcactgccacaatatcagacagctgtcttttctgttttggtttgtgtggtttcctgcagtactgaggacacaaatttctcaagtactctgcttcagggcattttgcataatgacattttatcacaagagaaaggaacaaaatctcttgaaatgaaatttccataaatggctatttgaacagtttctaaaaagaatcatttgcattccaaccccacaccccatttctcttctcctcactcacttcttgcatatgctacaatctcacctttccttcctgtatcttttgtttaatctttttcctctgatttccttataagcaagtcttcacaaatcctaatttagtcaagatccaaagagcctccacttcttcaatatgggcttctctaatgtctaatctacttttgaaaaatctgcgcttctctatgtaatttgcaatacaattatgctacaacttttctatagaaaagtaataatcaggagaatgaggacttagccctaaggatttgctgcaactccagaattttttgaaatgttctttaaaatcatgtcaattttgcattcaattccactgtttgaagataaaattttaaattacttaccagtgaatatccttggtggcccttaatccagaatgcatgccatgattacactattgctcttaaatgtaattactgacactaacatt

SEQ ID NO: 458054 - DNA, 5848 bp, Homo sapiens
gggacctggaagcgccccagccccgcagcgatcgcagattcggctttcaaacaaaagaggcgccccggggggtgggaccgggacctcacccggtcctcgcagagttgcggccgcccgccccttcagccccggctctccgtatgcgcatgagcagaggcgcctccctctgttcctcccaaggctaaactttctaattcccttctttgggctcgggggctcccggagcagggcgagagctcgcgtcgccggaaaggaagacgggaagaaagggcaggcggctcggcgggcgtcttctccactcctctgccgcgtccccgtggctgcagggagccggcatggggcttctccagttgctagctttcagtttcttagccctgtgcagagcccgagtgcgcgctcaggaacccgagttcagctacggctgcgcagaaggcagctgctatcccgccacgggcgaccttctcatcggccgagcacagaagctttcggtgacctcgacgtgcgggctgcacaagcccgaaccctactgtatcgtcagccacttgcaggaggacaaaaaatgcttcatatgcaattcccaagatccttatcatgagaccctgaatcctgacagccatctcattgaaaatgtggtcactacatttgctccaaaccgccttaagatttggtggcaatctgaaaatggtgtggaaaatgtaactatccaactggatttggaagcagaattccattttactcatctcataatgactttcaagacattccgtccagctgctatgctgatagaacgatcgtccgactttgggaaaacctggggtgtgtatagatacttcgcctatgactgtgaggcctcgtttccaggcatttcaactggccccatgaaaaaagtcgatgacataatttgtgattctcgatattctgacattgaaccctcaactgaaggagaggtgatatttcgtgctttagatcctgctttcaaaatagaagatccttatagcccaaggatacagaatttattaaaaattaccaacttgagaatcaagtttgtgaaactgcatactttgggagataaccttctggattccaggatggaaatcagagaaaagtattattatgcagtttatgatatggtggttcgaggaaattgcttctgctatggtcatgccagcgaatgtgcccctgtggatggattcaatgaagaagtggaaggaatggttcacggacactgcatgtgcaggcataacaccaagggcttaaactgtgaactctgcatggatttctaccatgatttaccttggagacctgctgaaggccgaaacagcaacgcctgtaaaaaatgtaactgcaatgaacattccatctcttgtcactttgacatggctgtttacctggccacggggaacgtcagcggaggcgtgtgtgatgactgtcagcacaacaccatggggcgcaactgtgagcagtgcaagccgttttactaccagcacccagagagggacatccgagatcctaatttctgtgaacgatgtacgtgtgacccagctggctctcaaaatgagggaatttgtgacagctatactgatttttctactggtctcattgctggccagtgtcggtgtaaattaaatgtggaaggagaacattgtgatgtttgcaaagaaggcttctatgatttaagcagtgaagatccatttggttgtaaatcttgtgcttgcaatcctctgggaacaattcctggagggaatccttgtgattccgagacaggtcactgctactgcaagcgtctggtgacaggacagcattgtgaccagtgcctgccagagcactggggcttaagcaatgatttggatggatgtcgaccatgtgactgtgaccttgggggagccttaaacaacagttgctttgcggagtcaggccagtgctcatgccggcctcacatgattggacgtcagtgcaacgaagtggaacctggttactactttgccaccctggatcactacctctatgaagcggaggaagccaacttggggcctggggttagcatagtggagcggcaatatatccaggaccggattccctcctggactggagccggcttcgtccgagtgcctgaaggggcttatttggagtttttcattgacaacataccatattccatggagtacgacatcctaattcgctacgagccacagctacccgaccactgggaaaaagctgtcatcacagtgcagcgacctggaaggattccaaccagcagccgatgtggtaataccatccccgatgatgacaaccaggtggtgtcattatcaccaggctcaagatatgtcgtccttcctcggccggtgtgctttgagaagggaacaaactacacggtgaggttggagctgcctcagtacacctcctctgatagcgacgtggagagcccctacacgctgatcgattctcttgttctcatgccatactgtaaatcactggacatcttcaccgtgggaggttcaggagatggggtggtcaccaacagtgcctgggaaacctttcagagataccgatgtctagagaacagcagaagcgttgtgaaaacaccgatgacagatgtttgcagaaacatcatctttagcatttctgccctgttacaccagacaggcctggcttgtgaatgcgaccctcagggttcgttaagttccgtgtgtgatcccaacggaggccagtgccagtgccggcccaacgtggttggaagaacctgcaacagatgtgcacctggaacttttggctttggccccagtggatgcaaaccttgtgagtgccatctgcaaggatctgtcaatgccttctgcaatcccgtcactggccagtgccactgtttccagggagtgtatgctcggcagtgtgatcggtgcttacctgggcactggggctttccaagttgccagccctgccagtgcaatggccacgccgatgactgcgacccagtgactggggagtgcttgaactgccaggactacaccatgggtcataactgtgaaaggtgcttggctggttactatggcgaccccatcattgggtcaggagatcactgccgcccttgcccttgcccagatggtcccgacagtggacgccagtttgccaggagctgctaccaagatcctgttactttacagcttgcctgtgtttgtgatcctggatacattggttccagatgtgacgactgtgcctcaggatactttggcaatccatcagaagttggggggtcgtgtcagccttgccagtgtcacaacaacattgacacgacagacccagaagcctgtgacaaggagactgggaggtgtctcaagtgcctgtaccacacggaaggggaacactgtcagttctgccggtttggatactatggtgatgccctccggcaggactgtcgaaagtgtgtctgtaattacctgggcaccgtgcaagagcactgtaacggctctgactgccagtgcgacaaagccactggtcagtgcttgtgtcttcctaatgtgatcgggcagaactgtgaccgctgtgcgcccaatacctggcagctggccagtggcactggctgtgacccatgcaactgcaatgctgctcattccttcgggccatcttgcaatgagttcacggggcagtgccagtgcatgcctgggtttggaggccgcacctgcagcgagtgccaggaactcttctggggagaccccgacgtggagtgccgagcctgtgactgtgaccccaggggcattgagacgccacagtgtgaccagtccacgggccagtgtgtctgcgttgagggtgttgagggtccacgctgtgacaagtgcacgcgagggtactcgggggtcttccctgactgcacaccctgccaccagtgctttgctctctgggatgtgatcattgccgagctgaccaacaggacacacagattcctggagaaagccaaggccttgaagatcagtggtgtgatcgggccttaccgtgagactgtggactcggtggagaggaaagtcagcgagataaaagacatcctggcgcagagccccgcagcagagccactgaaaaacattgggaatctctttgaggaagcagagaaactgattaaagatgttacagaaatgatggctcaagtagaagtgaaattatctgacacaacttcccaaagcaacagcacagccaaagaactggattctctacagacagaagccgaaagcctagacaacactgtgaaagaacttgctgaacaactggaatttatcaaaaactcagatattcggggtgccttggatagcattaccaagtatttccagatgtctcttgaggcagaggagagggtgaatgcctccaccacagaacccaacagcactgtggagcagtcagccctcatgagagacagagtagaagacgtgatgatggagcgagaatcccagttcaaggaaaaacaagaggagcaggctcgcctccttgatgaactggcaggcaagctacaaagcctagacctttcagccgctgccgaaatgacctgtggaacacccccaggggcctcctgttccgagactgaatgtggcgggccaaactgcagaactgacgaaggagagaggaagtgtggggggcctggctgtggtggtctggttactgttgcacacaacgcctggcagaaagccatggacttggaccaagatgtcctgagtgccctggctgaagtggaacagctctccaagatggtctctgaagcaaaactgagggcagatgaggcaaaacaaagtgctgaagacattctgttgaagacaaatgctaccaaagaaaaaatggacaagagcaatgaggagctgagaaatctaatcaagcaaatcagaaactttttgacccaggatagtgctgatttggacagcattgaagcagttgctaatgaagtattgaaaatggagatgcctagcaccccacagcagttacagaacttgacagaagatatacgtgaacgagttgaaagcctttctcaagtagaggttattcttcagcatagtgctgctgacattgccagagctgagatgttgttagaagaagctaaaagagcaagcaaaagtgcaacagatgttaaagtcactgcagatatggtaaaggaagctctggaagaagcagaaaaggcccaggtcgcagcagagaaggcaattaaacaagcagatgaagacattcaaggaacccagaacctgttaacttcgattgagtctgaaacagcagcttctgaggaaaccttgttcaacgcgtcccagcgcatcagcgagttagagaggaatgtggaagaacttaagcggaaagctgcccaaaactccggggaggcagaatatattgaaaaagtagtatatactgtgaagcaaagtgcagaagatgttaagaagactttagatggtgaacttgatgaaaagtataaaaaagtagaaaatttaattgccaaaaaaactgaagagtcagctgatgccagaaggaaagccgaaatgctacaaaatgaagcaaaaactcttttagctcaagcaaatagcaagctgcaactgctcaaagatttagaaagaaaatatgaagacaatcaaagatacttagaagataaagctcaagaattagcaagactggaaggagaagtccgttcactcctaaaggatataagccagaaagttgctgtgtatagcacatgcttgtaacagaggagaataaaaaatggctgaggtgaccaaggtaaaacaactacattttaaaaactgacttaatgctcttcaaaataaaacatcacctatttaatgtttttaatcacattttgtatggagttaaataaagtacagtgcttttgtatata

SEQ ID NO: 458055 - DNA, 719 bp, Homo sapiens
tcctgcagctctccctgagtggtatggcaggcacagctcaagcgtagactttcagccgctcgcgaaatgacctgtggaacacccccaggggcctcctgttccgagactgaatgtggcgggccaaactgcagaactgacgaaggagagaggaagtgtggggggcctggctgtggtggtctggttactgttgcacacaacgcctggcagaaagccatggacttggaccaagatgtcctgagtgccctggctgaagtggaacagctctccaagatggtctctgaagcaaaactgagggcagatgaggcaaaacaaagtgctgaagacattctgttgaagacaaatgctaccaaagaaaaaatggacaagagcaatgaggagctgagaaatctaatcaagcaaatcagaaactttttgacccaggatagtgctgatttggacagcattgaagcagttgctaatgaagtattgaaaatggagatgcctagcaccccacagcagttacagaacttgacagaagatatacgtgaacgagttgaaagcctttctcaagtagaggttattcttcagcatagtgctgctgacattgccagagctgagatgttgttagaagaagctaaaagagcaagcaaagtgcacagatgtaaagtctcctccagatatgatacaggtagctctggcagaagcaggaagcatggcagacagcaggaatcaggttttga

SEQ ID NO: 458056 - DNA, 1548 bp, Homo sapiens
gtttgagaggtgaggacccaggtgactcgggggtaacttttagctttctggaagatgactaaattttaccaaatgataatggaaatgtattcctaaaatctaaacaacataaactcttaaggtactaagttatttaagttatttgtaagttatctaagttcttcctaatctcagaaatcgattaatgtagtggttttcccaagcctttctcattatttctcttgggtgtcactggcattgacttccactaaaaaaagatcccatggtcaaatgactttggcatacatacaactggataaaaacaatataaaacagtttttcctgcagaactcttctgagtctgtaatatgctgacacttgtttttaatcttcaagataaggatacagaacttttcatcatgggatagttttttcaaggaacacatcatagaacgtatggtctacggatcaccattaaagttatccatggtttgcctaaacagcttcctgattcattacgagaatattccccaaacaagaaaaatgaaacatactttaagtacctggaaaggatctgttttttgaaaagcatacacccaagttttacttttgaaatcctaaggtcttggttttgaaaaccccaggcgctaaggaaattacatgttttaaaatcctaaaggttgaggaattaatattctaaacttcaaatttttgaataatcatgacgttattggcaaatacatataaataaacatataaccggaacacgtttttcccctttatccaatggaaatacgatcaagcatcactcttagcagaagactaccagacacttgtagggacacgaaaagtgataataaaaacaatttatttattgaatgcttgctatagaccagatgctcttctaagcactttgtaattattttatcttgaaagcagtcctgtatttataatcattacctcttcttacagatgtggaagacgtgactcagtttcctgattacccagggtcacataacatgtgtggagaaggcaggatttaccacctcagtccgcagttcatgctcttaaccataatgctgtactcctcaaacctgccactcgagagcttggaatgtagggggagaacaaagacaataaaaagataaactagcaatacaaggcaggatgtggtgagggccaaatgaatgggccacaaacacacacctctgggttgaaaggatggtgatgttatagcagatctcaggaccctcagtataactggttctgggagatgttccattagaaagtttttcagaggaaggccgggcgcggtggctcacgcctgtaatcccagcacttcgggaggccaaggtgggcggatcacaaggtgaagagatggagaccatgctggccaacatggtgaaaccccgtctctactaaaaatacaaaaattagctgggcatggtggtgcatgcctgtagtcccagctatttaggaggcagaggcagaatagcttgaacccgggaagtggaggttgcagtgagccgagatcatgccactgcactccagcctgggagacagagtgag

SEQ ID NO: 458057 - DNA, 811 bp, Homo sapiens
gatagccatcttacttttctgactccagggttataaatacatccagctgtatgacaaaaactctatactaagcaattgagcatttattcttctaaagtgacacacactttttaagtatttatgtgggcacctgagaaaaagactcaggactattttataggccaggagttaaaaaacaacttgaaaaattttaaatgctagttctatttatatcagaatactgtttaggaatctctatactgaatacttgcagtctgtaagatacaatactttgttgaatgggagaaagttgtttcccagacatatgattccaagtacatagtttttcaacatcatttttgagccatttccaatattctggtctcctttagaaagaatgaaagtcttccctgggtaatttattcttcatatttaggtctctgaagcaaaactgagggcagatgaggcaaaacaaagtgctgaagacattctgttgaagacaaatgctaccaaagaaaaaatggacaagagcaatgaggagctgagaaatctaatcaagcaaatcagaaactttttgacccgtaagaaattttttcattttacttttagacatttgtttctgtgtgattctctgtttacattttagataaaatccatttctgtcagggtactaagtgacatttccaaataagaaaaacgtccgtatattaaatgtttccacttcttaaacttatatatgtgtatcaaataactttctccaatgttacgcagatacagacacacctgatgggatactcaggtagccaatcaaaagtcaaatatttacattgaa

SEQ ID NO: 458058 - DNA, 4580 bp, Homo sapiens
gggaggccatgagccacgcctgctgactcattcctccaattctcaaacacaagcaacgcctgtaaaaaatgtaactgcaatgaacattccatctcttgtcactttgacatggctgtttacctggccacggggaacgtcagcggaggcgtgtgtgatgactgtcagcacaacaccatggggcgcaactgtgagcagtgcaagccgttttactaccagcacccagagagggacatccgagatcctaatttctgtgaacgatgtacgtgtgacccagctggctctcaaaatgagggaatttgtgacagctatactgatttttctactggtctcattgctggccagtgtcggtgtaaattaaatgtggaaggagaacattgtgatgtttgcaaagaaggcttctatgatttaagcagtgaagatccatttggttgtaaatcttgtgcttgcaatcctctgggaacaattcctggagggaatccttgtgattccgagacaggtcactgctactgcaagcgtctggtgacaggacagcattgtgaccagtgcctgccagagcactggggcttaagcaatgatttggatggatgtcgaccatgtgactgtgaccttgggggagccttaaacaacagttgctttgcggagtcaggccagtgctcatgccggcctcacatgattggacgtcagtgcaacgaagtggaacctggttactactttgccaccctggatcactacctctatgaagcggaggaagccaacttggggcctggggttagcatagtggagcggcaatatatccaggaccggattccctcctggactggagccggcttcgtccgagtgcctgaaggggcttatttggagtttttcattgacaacataccatattccatggagtacgacatcctaattcgctacgagccacagctacccgaccactgggaaaaagctgtcatcacagtgcagcgacctggaaggattccaaccagcagccgatgtggtaataccatccccgatgatgacaaccaggtggtgtcattatcaccaggctcaagatatgtcgtccttcctcggccggtgtgctttgagaagggaacaaactacacggtgaggttggagctgcctcagtacacctcctctgatagcgacgtggagagcccctacacgctgatcgattctcttgttctcatgccatactgtaaatcactggacatcttcaccgtgggaggttcaggagatggggtggtcaccaacagtgcctgggaaacctttcagagataccgatgtctagagaacagcagaagcgttgtgaaaacaccgatgacagatgtttgcagaaacatcatctttagcatttctgccctgttacaccagacaggcctggcttgtgaatgcgaccctcagggttcgttaagttccgtgtgtgatcccaacggaggccagtgccagtgccggcccaacgtggttggaagaacctgcaacagatgtgcacctggaacttttggctttggccccagtggatgcaaaccttgtgagtgccatctgcaaggatctgtcaatgccttctgcaatcccgtcactggccagtgccactgtttccagggagtgtatgctcggcagtgtgatcggtgcttacctgggcactggggctttccaagttgccagccctgccagtgcaatggccacgccgatgactgcgacccagtgactggggagtgcttgaactgccaggactacaccatgggtcataactgtgaaaggtgcttggctggttactatggcgaccccatcattgggtcaggagatcactgccgcccttgcccttgcccagatggtcccgacagtggacgccagtttgccaggagctgctaccaagatcctgttactttacagcttgcctgtgtttgtgatcctggatacattggttccagatgtgacgactgtgcctcaggatactttggcaatccatcagaagttggggggtcgtgtcagccttgccagtgtcacaacaacattgacacgacagacccagaagcctgtgacaaggagactgggaggtgtctcaagtgcctgtaccacacggaaggggaacactgtcagttctgccggtttggatactatggtgatgccctccggcaggactgtcgaaagtgtgtctgtaattacctgggcaccgtgcaagagcactgtaacggctctgactgccagtgcgacaaagccactggtcagtgcttgtgtcttcctaatgtgatcgggcagaactgtgaccgctgtgcgcccaatacctggcagctggccagtggcactggctgtgacccatgcaactgcaatgctgctcattccttcgggccatcttgcaatgagttcacggggcagtgccagtgcatgcctgggtttggaggccgcacctgcagcgagtgccaggaactcttctggggagaccccgacgtggagtgccgagcctgtgactgtgaccccaggggcattgagacgccacagtgtgaccagtccacgggccagtgtgtctgcgttgagggtgttgagggtccacgctgtgacaagtgcacgcgagggtactcgggggtcttccctgactgcacaccctgccaccagtgctttgctctctgggatgtgatcattgccgagctgaccaacaggacacacagattcctggagaaagccaaggccttgaagatcagtggtgtgatcgggccttaccgtgagactgtggactcggtggagaggaaagtcagcgagataaaagacatcctggcgcagagccccgcagcagagccactgaaaaacattgggaatctctttgaggaagcagagaaactgattaaagatgttacagaaatgatggctcaagtagaagtgaaattatctgacacaacttcccaaagcaacagcacagccaaagaactggattctctacagacagaagccgaaagcctagacaacactgtgaaagaacttgctgaacaactggaatttatcaaaaactcagatattcggggtgccttggatagcattaccaagtatttccagatgtctcttgaggcagaggagagggtgaatgcctccaccacagaacccaacagcactgtggagcagtcagccctcatgagagacagagtagaagacgtgatgatggagcgagaatcccagttcaaggaaaaacaagaggagcaggctcgcctccttgatgaactggcaggcaagctacaaagcctagacctttcagccgctgccgaaatgacctgtggaacacccccaggggcctcctgttccgagactgaatgtggcgggccaaactgcagaactgacgaaggagagaggaagtgtggggggcctggctgtggtggtctggttactgttgcacacaacgcctggcagaaagccatggacttggaccaagatgtcctgagtgccctggctgaagtggaacagctctccaagatggtctctgaagcaaaactgagggcagatgaggcaaaacaaagtgctgaagacattctgttgaagacaaatgctaccaaagaaaaaatggacaagagcaatgaggagctgagaaatctaatcaagcaaatcagaaactttttgacccaggatagtgctgatttggacagcattgaagcagttgctaatgaagtattgaaaatggagatgcctagcaccccacagcagttacagaacttgacagaagatatacgtgaacgagttgaaagcctttctcaagtagaggttattcttcagcatagtgctgctgacattgccagagctgagatgttgttagaagaagctaaaagagcaagcaaaagtgcaacagatgttaaagtcactgcagatatggtaaaggaagctctggaagaagcagaaaaggcccaggtcgcagcagagaaggcaattaaacaagcagatgaagacattcaaggaacccagaacctgttaacttcgattgagtctgaaacagcagcttctgaggaaaccttgttcaacgcgtcccagcgcatcagcgagttagagaggaatgtggaagaacttaagcggaaagctgcccaaaactccggggaggcagaatatattgaaaaagtagtatatactgtgaagcaaagtgcagaagatgttaagaagactttagatggtgaacttgatgaaaagtataaaaaagtagaaaatttaattgccaaaaaaactgaagagtcagctgatgccagaaggaaagccgaaatgctacaaaatgaagcaaaaactcttttagctcaagcaaatagcaagctgcaactgctcaaagatttagaaagaaaatatgaagacaatcaaagatacttagaagataaagctcaagaattagcaagactggaaggagaagtccgttcactcctaaaggatataagccagaaagttgctgtgtatagcacatgcttgtaacagaggagaataaaaaatggctgaggtgaccaaggtaaaacaactacattttaaaaactgacttaatgctcttcaaaataaaacatcacctatttaatgtttttaatcacattttgtatggagttaaataaagtacagtgcttttgtatata

SEQ ID NO: 458059 - DNA, 3638 bp, Homo sapiens
  misc_feature (21)..(21): n is a, c, g, or t
  misc_feature (54)..(54): n is a, c, g, or t
cgacccatcgcagacgatggnggcgtacacccgccgggccagggacttcttggncagcaggacggccaccacaccctccgagcggcagtacccattccccgctgtgtcgaaggccttgcaggtgccctcggggctgagcatccccagcctcaaaactacacggtgaggttggagctgcctcagtacacctcctctgatagcgacgtggagagcccctacacgctgatcgattctcttgttctcatgccatactgtaaatcactggacatcttcaccgtgggaggttcaggagatggggtggtcaccaacagtgcctgggaaacctttcagagataccgatgtctagagaacagcagaagcgttgtgaaaacaccgatgacagatgtttgcagaaacatcatctttagcatttctgccctgttacaccagacaggcctggcttgtgaatgcgaccctcagggttcgttaagttccgtgtgtgatcccaacggaggccagtgccagtgccggcccaacgtggttggaagaacctgcaacagatgtgcacctggaacttttggctttggccccagtggatgcaaaccttgtgagtgccatctgcaaggatctgtcaatgccttctgcaatcccgtcactggccagtgccactgtttccagggagtgtatgctcggcagtgtgatcggtgcttacctgggcactggggctttccaagttgccagccctgccagtgcaatggccacgccgatgactgcgacccagtgactggggagtgcttgaactgccaggactacaccatgggtcataactgtgaaaggtgcttggctggttactatggcgaccccatcattgggtcaggagatcactgccgcccttgcccttgcccagatggtcccgacagtggacgccagtttgccaggagctgctaccaagatcctgttactttacagcttgcctgtgtttgtgatcctggatacattggttccagatgtgacgactgtgcctcaggatactttggcaatccatcagaagttggggggtcgtgtcagccttgccagtgtcacaacaacattgacacgacagacccagaagcctgtgacaaggagactgggaggtgtctcaagtgcctgtaccacacggaaggggaacactgtcagttctgccggtttggatactatggtgatgccctccggcaggactgtcgaaagtgtgtctgtaattacctgggcaccgtgcaagagcactgtaacggctctgactgccagtgcgacaaagccactggtcagtgcttgtgtcttcctaatgtgatcgggcagaactgtgaccgctgtgcgcccaatacctggcagctggccagtggcactggctgtgacccatgcaactgcaatgctgctcattccttcgggccatcttgcaatgagttcacggggcagtgccagtgcatgcctgggtttggaggccgcacctgcagcgagtgccaggaactcttctggggagaccccgacgtggagtgccgagcctgtgactgtgaccccaggggcattgagacgccacagtgtgaccagtccacgggccagtgtgtctgcgttgagggtgttgagggtccacgctgtgacaagtgcacgcgagggtactcgggggtcttccctgactgcacaccctgccaccagtgctttgctctctgggatgtgatcattgccgagctgaccaacaggacacacagattcctggagaaagccaaggccttgaagatcagtggtgtgatcgggccttaccgtgagactgtggactcggtggagaggaaagtcagcgagataaaagacatcctggcgcagagccccgcagcagagccactgaaaaacattgggaatctctttgaggaagcagagaaactgattaaagatgttacagaaatgatggctcaagtagaagtgaaattatctgacacaacttcccaaagcaacagcacagccaaagaactggattctctacagacagaagccgaaagcctagacaacactgtgaaagaacttgctgaacaactggaatttatcaaaaactcagatattcggggtgccttggatagcattaccaagtatttccagatgtctcttgaggcagaggagagggtgaatgcctccaccacagaacccaacagcactgtggagcagtcagccctcatgagagacagagtagaagacgtgatgatggagcgagaatcccagttcaaggaaaaacaagaggagcaggctcgcctccttgatgaactggcaggcaagctacaaagcctagacctttcagccgctgccgaaatgacctgtggaacacccccaggggcctcctgttccgagactgaatgtggcgggccaaactgcagaactgacgaaggagagaggaagtgtggggggcctggctgtggtggtctggttactgttgcacacaacgcctggcagaaagccatggacttggaccaagatgtcctgagtgccctggctgaagtggaacagctctccaagatggtctctgaagcaaaactgagggcagatgaggcaaaacaaagtgctgaagacattctgttgaagacaaatgctaccaaagaaaaaatggacaagagcaatgaggagctgagaaatctaatcaagcaaatcagaaactttttgacccaggatagtgctgatttggacagcattgaagcagttgctaatgaagtattgaaaatggagatgcctagcaccccacagcagttacagaacttgacagaagatatacgtgaacgagttgaaagcctttctcaagtagaggttattcttcagcatagtgctgctgacattgccagagctgagatgttgttagaagaagctaaaagagcaagcaaaagtgcaacagatgttaaagtcactgcagatatggtaaaggaagctctggaagaagcagaaaaggcccaggtcgcagcagagaaggcaattaaacaagcagatgaagacattcaaggaacccagaacctgttaacttcgattgagtctgaaacagcagcttctgaggaaaccttgttcaacgcgtcccagcgcatcagcgagttagagaggaatgtggaagaacttaagcggaaagctgcccaaaactccggggaggcagaatatattgaaaaagtagtatatactgtgaagcaaagtgcagaagatgttaagaagactttagatggtgaacttgatgaaaagtataaaaaagtagaaaatttaattgccaaaaaaactgaagagtcagctgatgccagaaggaaagccgaaatgctacaaaatgaagcaaaaactcttttagctcaagcaaatagcaagctgcaactgctcaaagatttagaaagaaaatatgaagacaatcaaagatacttagaagataaagctcaagaattagcaagactggaaggagaagtccgttcactcctaaaggatataagccagaaagttgctgtgtatagcacatgcttgtaacagaggagaataaaaaatggctgaggtgaccaaggtaaaacaactacattttaaaaactgacttaatgctcttcaaaataaaacatcacctatttaatgtttttaatcacattttgtatggagttaaataaagtacagtgcttttgtatata

SEQ ID NO: 458060 - DNA, 5930 bp, Homo sapiens
gggacctggaagcgccccagccccgcagcgatcgcagattcggctttcaaacaaaagaggcgccccggggggtgggaccgggacctcacccggtcctcgcagagttgcggccgcccgccccttcagccccggctctccgtatgcgcatgagcagaggcgcctccctctgttcctcccaaggctaaactttctaattcccttctttgggctcgggggctcccggagcagggcgagagctcgcgtcgccggaaaggaagacgggaagaaagggcaggcggctcggcgggcgtcttctccactcctctgccgcgtccccgtggctgcagggagccggcatggggcttctccagttgctagctttcagtttcttagccctgtgcagagcccgagtgcgcgctcaggaacccgagttcagctacggctgcgcagaaggcagctgctatcccgccacgggcgaccttctcatcggccgagcacagaagctttcggtgacctcgacgtgcgggctgcacaagcccgaaccctactgtatcgtcagccacttgcaggaggacaaaaaatgcttcatatgcaattcccaagatccttatcatgagaccctgaatcctgacagccatctcattgaaaatgtggtcactacatttgctccaaaccgccttaagatttggtggcaatctgaaaatggtgtggaaaatgtaactatccaactggatttggaagcagaattccattttactcatctcataatgactttcaagacattccgtccagctgctatgctgatagaacgatcgtccgactttgggaaaacctggggtgtgtatagatacttcgcctatgactgtgaggcctcgtttccaggcatttcaactggccccatgaaaaaagtcgatgacataatttgtgattctcgatattctgacattgaaccctcaactgaaggagaggtgatatttcgtgctttagatcctgctttcaaaatagaagatccttatagcccaaggatacagaatttattaaaaattaccaacttgagaatcaagtttgtgaaactgcatactttgggagataaccttctggattccaggatggaaatcagagaaaagtattattatgcagtttatgatatggtggttcgaggaaattgcttctgctatggtcatgccagcgaatgtgcccctgtggatggattcaatgaagaagtggaaggaatggttcacggacactgcatgtgcaggcataacaccaagggcttaaactgtgaactctgcatggatttctaccatgatttaccttggagacctgctgaaggccgaaacagcaacgcctgtaaaaaatgtaactgcaatgaacattccatctcttgtcactttgacatggctgtttacctggccacggggaacgtcagcggaggcgtgtgtgatgactgtcagcacaacaccatggggcgcaactgtgagcagtgcaagccgttttactaccagcacccagagagggacatccgagatcctaatttctgtgaacgatgtacgtgtgacccagctggctctcaaaatgagggaatttgtgacagctatactgatttttctactggtctcattgctggccagtgtcggtgtaaattaaatgtggaaggagaacattgtgatgtttgcaaagaaggcttctatgatttaagcagtgaagatccatttggttgtaaatcttgtgcttgcaatcctctgggaacaattcctggagggaatccttgtgattccgagacaggtcactgctactgcaagcgtctggtgacaggacagcattgtgaccagtgcctgccagagcactggggcttaagcaatgatttggatggatgtcgaccatgtgactgtgaccttgggggagccttaaacaacagttgctttgcggagtcaggccagtgctcatgccggcctcacatgattggacgtcagtgcaacgaagtggaacctggttactactttgccaccctggatcactacctctatgaagcggaggaagccaacttggggcctggggttagcatagtggagcggcaatatatccaggaccggattccctcctggactggagccggcttcgtccgagtgcctgaaggggcttatttggagtttttcattgacaacataccatattccatggagtacgacatcctaattcgctacgagccacagctacccgaccactgggaaaaagctgtcatcacagtgcagcgacctggaaggattccaaccagcagccgatgtggtaataccatccccgatgatgacaaccaggtggtgtcattatcaccaggctcaagatatgtcgtccttcctcggccggtgtgctttgagaagggaacaaactacacggtgaggttggagctgcctcagtacacctcctctgatagcgacgtggagagcccctacacgctgatcgattctcttgttctcatgccatactgtaaatcactggacatcttcaccgtgggaggttcaggagatggggtggtcaccaacagtgcctgggaaacctttcagagataccgatgtctagagaacagcagaagcgttgtgaaaacaccgatgacagatgtttgcagaaacatcatctttagcatttctgccctgttacaccagacaggcctggcttgtgaatgcgaccctcagggttcgttaagttccgtgtgtgatcccaacggaggccagtgccagtgccggcccaacgtggttggaagaacctgcaacagatgtgcacctggaacttttggctttggccccagtggatgcaaaccttgtgagtgccatctgcaaggatctgtcaatgccttctgcaatcccgtcactggccagtgccactgtttccagggagtgtatgctcggcagtgtgatcggtgcttacctgggcactggggctttccaagttgccagccctgccagtgcaatggccacgccgatgactgcgacccagtgactggggagtgcttgaactgccaggactacaccatgggtcataactgtgaaaggtgcttggctggttactatggcgaccccatcattgggtcaggagatcactgccgcccttgcccttgcccagatggtcccgacagtggacgccagtttgccaggagctgctaccaagatcctgttactttacagcttgcctgtgtttgtgatcctggatacattggttccagatgtgacgactgtgcctcaggatactttggcaatccatcagaagttggggggtcgtgtcagccttgccagtgtcacaacaacattgacacgacagacccagaagcctgtgacaaggagactgggaggtgtctcaagtgcctgtaccacacggaaggggaacactgtcagttctgccggtttggatactatggtgatgccctccggcaggactgtcgaaagtgtgtctgtaattacctgggcaccgtgcaagagcactgtaacggctctgactgccagtgcgacaaagccactggtcagtgcttgtgtcttcctaatgtgatcgggcagaactgtgaccgctgtgcgcccaatacctggcagctggccagtggcactggctgtgacccatgcaactgcaatgctgctcattccttcgggccatcttgcaatgagttcacggggcagtgccagtgcatgcctgggtttggaggccgcacctgcagcgagtgccaggaactcttctggggagaccccgacgtggagtgccgagcctgtgactgtgaccccaggggcattgagacgccacagtgtgaccagtccacgggccagtgtgtctgcgttgagggtgttgagggtccacgctgtgacaagtgcacgcgagggtactcgggggtcttccctgactgcacaccctgccaccagtgctttgctctctgggatgtgatcattgccgagctgaccaacaggacacacagattcctggagaaagccaaggccttgaagatcagtggtgtgatcgggccttaccgtgagactgtggactcggtggagaggaaagtcagcgagataaaagacatcctggcgcagagccccgcagcagagccactgaaaaacattgggaatctctttgaggaagcagagaaactgattaaagatgttacagaaatgatggctcaagtagaagtgaaattatctgacacaacttcccaaagcaacagcacagccaaagaactggattctctacagacagaagccgaaagcctagacaacactgtgaaagaacttgctgaacaactggaatttatcaaaaactcagatattcggggtgccttggatagcattaccaagtatttccagatgtctcttgaggcagaggagagggtgaatgcctccaccacagaacccaacagcactgtggagcagtcagccctcatgagagacagagtagaagacgtgatgatggagcgagaatcccagttcaaggaaaaacaagaggagcaggctcgcctccttgatgaactggcaggcaagctacaaagcctagacctttcagccgctgccgaaatgacctgtggaacacccccaggggcctcctgttccgagactgaatgtggcgggccaaactgcagaactgacgaaggagagaggaagtgtggggggcctggctgtggtggtctggttactgttgcacacaacgcctggcagaaagccatggacttggaccaagatgtcctgagtgccctggctgaagtggaacagctctccaagatggtctctgaagcaaaactgagggcagatgaggcaaaacaaagtgctgaagacattctgttgaagacaaatgctaccaaagaaaaaatggacaagagcaatgaggagctgagaaatctaatcaagcaaatcagaaactttttgacccaggatagtgctgatttggacagcattgaagcagttgctaatgaagtattgaaaatggagatgcctagcaccccacagcagttacagaacttgacagaagatatacgtgaacgagttgaaagcctttctcaagtagaggttattcttcagcatagtgctgctgacattgccagagctgagatgttgttagaagaagctaaaagagcaagcaaaagtgcaacagatgttaaagtcactgcagatatggtaaaggaagctctggaagaagcagaaaaggcccaggtcgcagcagagaaggcaattaaacaagcagatgaagacattcaaggaacccagaacctgttaacttcgattgagtctgaaacagcagcttctgaggaaaccttgttcaacgcgtcccagcgcatcagcgagttagagaggaatgtggaagaacttaagcggaaagctgcccaaaactccggggaggcagaatatattgaaaaagtagtatatactgtgaagcaaagtgcagaagatgttaagaagactttagatggtgaacttgatgaaaagtataaaaaagtagaaaatttaattgccaaaaaaactgaagagtcagctgatgccagaaggaaagccgaaatgctacaaaatgaagcaaaaactcttttagctcaagcaaatagcaagctgcaactgctcaaagatttagaaagaaaatatgaagacaatcaaagatacttagaagataaagctcaagaattagcaagactggaaggagaagtccgttcactcctaaaggatataagccagaaagttgctgtgtatagcacatgcttgtaacagaggagaataaaaaatggctgaggtgaccaaggtaaaacaactacattttaaaaactgacttaatgctcttcaaaataaaacatcacctatttaatgtttttaatcacattttgtatggagttaaataaagtacagtgcttttgtatatattgtatatattttggtgtacttgttactttcactgattgttgatgaatcccttttttcactgtaaacgtggatttataaaca

SEQ ID NO: 458061 - DNA, 6859 bp, Homo sapiens
  misc_feature (5886)..(5886): n is a, c, g, or t
gggacctggaagcgccccagccccgcagcgatcgcagattcggctttcaaacaaaagaggcgccccggggggtgggaccgggacctcacccggtcctcgcagagttgcggccgcccgccccttcagccccggctctccgtatgcgcatgagcagaggcgcctccctctgttcctcccaaggctaaactttctaattcccttctttgggctcgggggctcccggagcagggcgagagctcgcgtcgccggaaaggaagacgggaagaaagggcaggcggctcggcgggcgtcttctccactcctctgccgcgtccccgtggctgcagggagccggcatggggcttctccagttgctagctttcagtttcttagccctgtgcagagcccgagtgcgcgctcaggaacccgagttcagctacggctgcgcagaaggcagctgctatcccgccacgggcgaccttctcatcggccgagcacagaagctttcggtgacctcgacgtgcgggctgcacaagcccgaaccctactgtatcgtcagccacttgcaggaggacaaaaaatgcttcatatgcaattcccaagatccttatcatgagaccctgaatcctgacagccatctcattgaaaatgtggtcactacatttgctccaaaccgccttaagatttggtggcaatctgaaaatggtgtggaaaatgtaactatccaactggatttggaagcagaattccattttactcatctcataatgactttcaagacattccgtccagctgctatgctgatagaacgatcgtccgactttgggaaaacctggggtgtgtatagatacttcgcctatgactgtgaggcctcgtttccaggcatttcaactggccccatgaaaaaagtcgatgacataatttgtgattctcgatattctgacattgaaccctcaactgaaggagaggtgatatttcgtgctttagatcctgctttcaaaatagaagatccttatagcccaaggatacagaatttattaaaaattaccaacttgagaatcaagtttgtgaaactgcatactttgggagataaccttctggattccaggatggaaatcagagaaaagtattattatgcagtttatgatatggtggttcgaggaaattgcttctgctatggtcatgccagcgaatgtgcccctgtggatggattcaatgaagaagtggaaggaatggttcacggacactgcatgtgcaggcataacaccaagggcttaaactgtgaactctgcatggatttctaccatgatttaccttggagacctgctgaaggccgaaacagcaacgcctgtaaaaaatgtaactgcaatgaacattccatctcttgtcactttgacatggctgtttacctggccacggggaacgtcagcggaggcgtgtgtgatgactgtcagcacaacaccatggggcgcaactgtgagcagtgcaagccgttttactaccagcacccagagagggacatccgagatcctaatttctgtgaacgatgtacgtgtgacccagctggctctcaaaatgagggaatttgtgacagctatactgatttttctactggtctcattgctggccagtgtcggtgtaaattaaatgtggaaggagaacattgtgatgtttgcaaagaaggcttctatgatttaagcagtgaagatccatttggttgtaaatcttgtgcttgcaatcctctgggaacaattcctggagggaatccttgtgattccgagacaggtcactgctactgcaagcgtctggtgacaggacagcattgtgaccagtgcctgccagagcactggggcttaagcaatgatttggatggatgtcgaccatgtgactgtgaccttgggggagccttaaacaacagttgctttgcggagtcaggccagtgctcatgccggcctcacatgattggacgtcagtgcaacgaagtggaacctggttactactttgccaccctggatcactacctctatgaagcggaggaagccaacttggggcctggggttagcatagtggagcggcaatatatccaggaccggattccctcctggactggagccggcttcgtccgagtgcctgaaggggcttatttggagtttttcattgacaacataccatattccatggagtacgacatcctaattcgctacgagccacagctacccgaccactgggaaaaagctgtcatcacagtgcagcgacctggaaggattccaaccagcagccgatgtggtaataccatccccgatgatgacaaccaggtggtgtcattatcaccaggctcaagatatgtcgtccttcctcggccggtgtgctttgagaagggaacaaactacacggtgaggttggagctgcctcagtacacctcctctgatagcgacgtggagagcccctacacgctgatcgattctcttgttctcatgccatactgtaaatcactggacatcttcaccgtgggaggttcaggagatggggtggtcaccaacagtgcctgggaaacctttcagagataccgatgtctagagaacagcagaagcgttgtgaaaacaccgatgacagatgtttgcagaaacatcatctttagcatttctgccctgttacaccagacaggcctggcttgtgaatgcgaccctcagggttcgttaagttccgtgtgtgatcccaacggaggccagtgccagtgccggcccaacgtggttggaagaacctgcaacagatgtgcacctggaacttttggctttggccccagtggatgcaaaccttgtgagtgccatctgcaaggatctgtcaatgccttctgcaatcccgtcactggccagtgccactgtttccagggagtgtatgctcggcagtgtgatcggtgcttacctgggcactggggctttccaagttgccagccctgccagtgcaatggccacgccgatgactgcgacccagtgactggggagtgcttgaactgccaggactacaccatgggtcataactgtgaaaggtgcttggctggttactatggcgaccccatcattgggtcaggagatcactgccgcccttgcccttgcccagatggtcccgacagtggacgccagtttgccaggagctgctaccaagatcctgttactttacagcttgcctgtgtttgtgatcctggatacattggttccagatgtgacgactgtgcctcaggatactttggcaatccatcagaagttggggggtcgtgtcagccttgccagtgtcacaacaacattgacacgacagacccagaagcctgtgacaaggagactgggaggtgtctcaagtgcctgtaccacacggaaggggaacactgtcagttctgccggtttggatactatggtgatgccctccggcaggactgtcgaaagtgtgtctgtaattacctgggcaccgtgcaagagcactgtaacggctctgactgccagtgcgacaaagccactggtcagtgcttgtgtcttcctaatgtgatcgggcagaactgtgaccgctgtgcgcccaatacctggcagctggccagtggcactggctgtgacccatgcaactgcaatgctgctcattccttcgggccatcttgcaatgagttcacggggcagtgccagtgcatgcctgggtttggaggccgcacctgcagcgagtgccaggaactcttctggggagaccccgacgtggagtgccgagcctgtgactgtgaccccaggggcattgagacgccacagtgtgaccagtccacgggccagtgtgtctgcgttgagggtgttgagggtccacgctgtgacaagtgcacgcgagggtactcgggggtcttccctgactgcacaccctgccaccagtgctttgctctctgggatgtgatcattgccgagctgaccaacaggacacacagattcctggagaaagccaaggccttgaagatcagtggtgtgatcgggccttaccgtgagactgtggactcggtggagaggaaagtcagcgagataaaagacatcctggcgcagagccccgcagcagagccactgaaaaacattgggaatctctttgaggaagcagagaaactgattaaagatgttacagaaatgatggctcaagtagaagtgaaattatctgacacaacttcccaaagcaacagcacagccaaagaactggattctctacagacagaagccgaaagcctagacaacactgtgaaagaacttgctgaacaactggaatttatcaaaaactcagatattcggggtgccttggatagcattaccaagtatttccagatgtctcttgaggcagaggagagggtgaatgcctccaccacagaacccaacagcactgtggagcagtcagccctcatgagagacagagtagaagacgtgatgatggagcgagaatcccagttcaaggaaaaacaagaggagcaggctcgcctccttgatgaactggcaggcaagctacaaagcctagacctttcagccgctgccgaaatgacctgtggaacacccccaggggcctcctgttccgagactgaatgtggcgggccaaactgcagaactgacgaaggagagaggaagtgtggggggcctggctgtggtggtctggttactgttgcacacaacgcctggcagaaagccatggacttggaccaagatgtcctgagtgccctggctgaagtggaacagctctccaagatggtctctgaagcaaaactgagggcagatgaggcaaaacaaagtgctgaagacattctgttgaagacaaatgctaccaaagaaaaaatggacaagagcaatgaggagctgagaaatctaatcaagcaaatcagaaactttttgacccaggatagtgctgatttggacagcattgaagcagttgctaatgaagtattgaaaatggagatgcctagcaccccacagcagttacagaacttgacagaagatatacgtgaacgagttgaaagcctttctcaagtagaggttattcttcagcatagtgctgctgacattgccagagctgagatgttgttagaagaagctaaaagagcaagcaaaagtgcaacagatgttaaagtcactgcagatatggtaaaggaagctctggaagaagcagaaaaggcccaggtcgcagcagagaaggcaattaaacaagcagatgaagacattcaaggaacccagaacctgttaacttcgattgagtctgaaacagcagcttctgaggaaaccttgttcaacgcgtcccagcgcatcagcgagttagagaggaatgtggaagaacttaagcggaaagctgcccaaaactccggggaggcagaatatattgaaaaagtagtatatactgtgaagcaaagtgcagaagatgttaagaagactttagatggtgaacttgatgaaaagtataaaaaagtagaaaatttaattgccaaaaaaactgaagagtcagctgatgccagaaggaaagccgaaatgctacaaaatgaagcaaaaactcttttagctcaagcaaatagcaagctgcaactgctcaaagatttagaaagaaaatatgaagacaatcaaagatacttagaagataaagctcaagaattagcaagactggaaggagaagtccgttcactcctaaaggatataagccagaaagttgctgtgtatagcacatgcttgtaacagaggagaataaaaaatggctgaggtgaccaaggtaaaacaactacattttaaaaactgacttaatgctcttcaaaataaaacatcacctatttaatgtttttaatcacattttgtatggagttaaataaagtacagtgcttttgtatatacaaaaaaaaaaaaaaaacacaaacaaacaaaaaaaaanaaaaaaaaaaaaaggggggggggcccgcaaaatcccccggggggggcgccacaagcagaccagaccaccacaatttattgaaaaaaaggagagcgccaaaaagagagacgacctaatatataaaaacgacggagaggagacgaggaacaaaacaaagacgaaagacaggagaaaaagaagacaagaagagaggcgacatccgagagaagaagaaaacaaacaaaagggggggaggagggaaaaaaacatatcgagccaaacaacaaccaaaagagagaaataataagaccacaacgacagagacaaaaacaaaacaaaacaacacggagcaaacacagaaggtgaaacaaaaaacacagaaacaataaacgaagacgccgaagaaaagaaaagagcaagagcaccagcaccaggcgcgagatcaaccgatcaaacagcacacaacaaccactatccaccaccagcgggggcgggcctaataaccgaacaagacacaagcaacacgaccgaacaacacaccacgccacaaccccacgccgcaaaaacacaacagaccacaacaacacgaccacaccggaccacgacaaaacaaaaaacaaacagcaaagaaaaagggaagacgagaaggagaggggaaagagaaggaacaggaacgagagagcaaaagagaaaacagggaaagcaagaggaagacaaaaagagagaagagaaagatagaaaacacagacaaaaagggaaaaggaaagaagacgaaaaagagaaaaggaagagcgccacagcgaccacacgaggaggcagcgggaggagaaacgacgacaagagacagaggagaaagaaaaaaccaaaacaaagaccggccaacacggccaaagcggcgaaaaaaggaagaagcagaaggagaacaagaggaaacagaagagaggagaggcgggaagaacggccgagaagaagaaagacgggaggaaggaaacgc

SEQ ID NO: 458062 - DNA, 2807 bp, Homo sapiens
cagacacccccaagttagattatacttagttgaaagcctttaaactggatacttagaattcctttgggttttgttttgttttgatcatgtttattgcatttcatcaagtatgttttgttgtgagatagagtcaggtacgtaaagagcttctcatttgtgatgtatccgatgccaggtggcacattatcaggatgtaacctggattgtttgtacagacatggtctgtggggaaatcctaagtaagggggaggcaaaggcaggacggaggtgaagagtatagactccggagttgcaaagaactgaatcagaattctggcgtggccttttccttgcagtgagacttggggcatgttacataatctctctgatctctgagttcccacatctgtgaaatagtgattattataacacgtatcccatagggttattgtgagagttaaatgggatcattcatataaaacatttctgtttaaagtattattactgctaagaaggggttagcaaccactgaagtcacgcatgtgctagaggaagctgctacagtctctacctgagccattggtcaattgttgtcgatggttgacaccttcccattttcacagtgaagtgagtattctaaatgccacatcttgtcactgaggttcatgattaagtagatcagctagcattgcttattcccttctagcctgtgactgtgaccccaggggcattgagacgccacagtgtgaccagtccacgggccagtgtgtctgcgttgagggtgttgagggtccacgctgtgacaagtgcacgcgagggtactcgggggtcttccctgactgcacaccctgccaccagtgctttgctctctgggatgtgatcattgccgagctgaccaacaggacacacagattcctggagaaagccaaggccttgaagatcagtggtgtgatcgggccttaccgtgagactgtggactcggtggagaggaaagtcagcgagataaaagacatcctggcgcagagccccgcagcagagccactgaaaaacattgggaatctctttgaggaagcagagaaactgattaaagatgttacagaaatgatggctcaagtagaagtgaaattatctgacacaacttcccaaagcaacagcacagccaaagaactggattctctacagacagaagccgaaagcctagacaacactgtgaaagaacttgctgaacaactggaatttatcaaaaactcagatattcggggtgccttggatagcattaccaagtatttccagatgtctcttgaggcagaggagagggtgaatgcctccaccacagaacccaacagcactgtggagcagtcagccctcatgagagacagagtagaagacgtgatgatggagcgagaatcccagttcaaggaaaaacaagaggagcaggctcgcctccttgatgaactggcaggcaagctacaaagcctagacctttcagccgctgccgaaatgacctgtggaacacccccaggggcctcctgttccgagactgaatgtggcgggccaaactgcagaactgacgaaggagagaggaagtgtggggggcctggctgtggtggtctggttactgttgcacacaacgcctggcagaaagccatggacttggaccaagatgtcctgagtgccctggctgaagtggaacagctctccaagatggtctctgaagcaaaactgagggcagatgaggcaaaacaaagtgctgaagacattctgttgaagacaaatgctaccaaagaaaaaatggacaagagcaatgaggagctgagaaatctaatcaagcaaatcagaaactttttgacccaggatagtgctgatttggacagcattgaagcagttgctaatgaagtattgaaaatggagatgcctagcaccccacagcagttacagaacttgacagaagatatacgtgaacgagttgaaagcctttctcaagtagaggttattcttcagcatagtgctgctgacattgccagagctgagatgttgttagaagaagctaaaagagcaagcaaaagtgcaacagatgttaaagtcactgcagatatggtaaaggaagctctggaagaagcagaaaaggcccaggtcgcagcagagaaggcaattaaacaagcagatgaagacattcaaggaacccagaacctgttaacttcgattgagtctgaaacagcagcttctgaggaaaccttgttcaacgcgtcccagcgcatcagcgagttagagaggaatgtggaagaacttaagcggaaagctgcccaaaactccggggaggcagaatatattgaaaaagtagtatatactgtgaagcaaagtgcagaagatgttaagaagactttagatggtgaacttgatgaaaagtataaaaaagtagaaaatttaattgccaaaaaaactgaagagtcagctgatgccagaaggaaagccgaaatgctacaaaatgaagcaaaaactcttttagctcaagcaaatagcaagctgcaactgctcaaagatttagaaagaaaatatgaagacaatcaaagatacttagaagataaagctcaagaattagcaagactggaaggagaagtccgttcactcctaaaggatataagccagaaagttgctgtgtatagcacatgcttgtaacagaggagaataaaaaatggctgaggtgaccaaggtaaaacaactacattttaaaaactgacttaatgctcttcaaaataaaacatcacctatttaatgtttttaatcacattttgtatggagttaaataaagtacagtgcttttgtatata

SEQ ID NO: 458063 - DNA, 5609 bp, Homo sapiens
  misc_feature (5400)..(5400): n is a, c, g, or t
  misc_feature (5404)..(5405): n is a, c, g, or t
gggacctggaagcgccccagccccgcagcgatcgcagattcggctttcaaacaaaagaggcgccccggggggtgggaccgggacctcacccggtcctcgcagagttgcggccgcccgccccttcagccccggctctccgtatgcgcatgagcagaggcgcctccctctgttcctcccaaggctaaactttctaattcccttctttgggctcgggggctcccggagcagggcgagagctcgcgtcgccggaaaggaagacgggaagaaagggcaggcggctcggcgggcgtcttctccactcctctgccgcgtccccgtggctgcagggagccggcatggggcttctccagttgctagctttcagtttcttagccctgtgcagagcccgagtgcgcgctcaggaacccgagttcagctacggctgcgcagaaggcagctgctatcccgccacgggcgaccttctcatcggccgagcacagaagctttcggtgacctcgacgtgcgggctgcacaagcccgaaccctactgtatcgtcagccacttgcaggaggacaaaaaatgcttcatatgcaattcccaagatccttatcatgagaccctgaatcctgacagccatctcattgaaaatgtggtcactacatttgctccaaaccgccttaagatttggtggcaatctgaaaatggtgtggaaaatgtaactatccaactggatttggaagcagaattccattttactcatctcataatgactttcaagacattccgtccagctgctatgctgatagaacgatcgtccgactttgggaaaacctggggtgtgtatagatacttcgcctatgactgtgaggcctcgtttccaggcatttcaactggccccatgaaaaaagtcgatgacataatttgtgattctcgatattctgacattgaaccctcaactgaaggagaggtgatatttcgtgctttagatcctgctttcaaaatagaagatccttatagcccaaggatacagaatttattaaaaattaccaacttgagaatcaagtttgtgaaactgcatactttgggagataaccttctggattccaggatggaaatcagagaaaagtattattatgcagtttatgatatggtggttcgaggaaattgcttctgctatggtcatgccagcgaatgtgcccctgtggatggattcaatgaagaagtggaaggaatggttcacggacactgcatgtgcaggcataacaccaagggcttaaactgtgaactctgcatggatttctaccatgatttaccttggagacctgctgaaggccgaaacagcaacgcctgtaaaaaatgtaactgcaatgaacattccatctcttgtcactttgacatggctgtttacctggccacggggaacgtcagcggaggcgtgtgtgatgactgtcagcacaacaccatggggcgcaactgtgagcagtgcaagccgttttactaccagcacccagagagggacatccgagatcctaatttctgtgaacgatgtacgtgtgacccagctggctctcaaaatgagggaatttgtgacagctatactgatttttctactggtctcattgctggccagtgtcggtgtaaattaaatgtggaaggagaacattgtgatgtttgcaaagaaggcttctatgatttaagcagtgaagatccatttggttgtaaatcttgtgcttgcaatcctctgggaacaattcctggagggaatccttgtgattccgagacaggtcactgctactgcaagcgtctggtgacaggacagcattgtgaccagtgcctgccagagcactggggcttaagcaatgatttggatggatgtcgaccatgtgactgtgaccttgggggagccttaaacaacagttgctttgcggagtcaggccagtgctcatgccggcctcacatgattggacgtcagtgcaacgaagtggaacctggttactactttgccaccctggatcactacctctatgaagcggaggaagccaacttggggcctggggttagcatagtggagcggcaatatatccaggaccggattccctcctggactggagccggcttcgtccgagtgcctgaaggggcttatttggagtttttcattgacaacataccatattccatggagtacgacatcctaattcgctacgagccacagctacccgaccactgggaaaaagctgtcatcacagtgcagcgacctggaaggattccaaccagcagccgatgtggtaataccatccccgatgatgacaaccaggtggtgtcattatcaccaggctcaagatatgtcgtccttcctcggccggtgtgctttgagaagggaacaaactacacggtgaggttggagctgcctcagtacacctcctctgatagcgacgtggagagcccctacacgctgatcgattctcttgttctcatgccatactgtaaatcactggacatcttcaccgtgggaggttcaggagatggggtggtcaccaacagtgcctgggaaacctttcagagataccgatgtctagagaacagcagaagcgttgtgaaaacaccgatgacagatgtttgcagaaacatcatctttagcatttctgccctgttacaccagacaggcctggcttgtgaatgcgaccctcagggttcgttaagttccgtgtgtgatcccaacggaggccagtgccagtgccggcccaacgtggttggaagaacctgcaacagatgtgcacctggaacttttggctttggccccagtggatgcaaaccttgtgagtgccatctgcaaggatctgtcaatgccttctgcaatcccgtcactggccagtgccactgtttccagggagtgtatgctcggcagtgtgatcggtgcttacctgggcactggggctttccaagttgccagccctgccagtgcaatggccacgccgatgactgcgacccagtgactggggagtgcttgaactgccaggactacaccatgggtcataactgtgaaaggtgcttggctggttactatggcgaccccatcattgggtcaggagatcactgccgcccttgcccttgcccagatggtcccgacagtggacgccagtttgccaggagctgctaccaagatcctgttactttacagcttgcctgtgtttgtgatcctggatacattggttccagatgtgacgactgtgcctcaggatactttggcaatccatcagaagttggggggtcgtgtcagccttgccagtgtcacaacaacattgacacgacagacccagaagcctgtgacaaggagactgggaggtgtctcaagtgcctgtaccacacggaaggggaacactgtcagttctgccggtttggatactatggtgatgccctccggcaggactgtcgaaagtgtgtctgtaattacctgggcaccgtgcaagagcactgtaacggctctgactgccagtgcgacaaagccactggtcagtgcttgtgtcttcctaatgtgatcgggcagaactgtgaccgctgtgcgcccaatacctggcagctggccagtggcactggctgtgacccatgcaactgcaatgctgctcattccttcgggccatcttgcaatgagttcacggggcagtgccagtgcatgcctgggtttggaggccgcacctgcagcgagtgccaggaactcttctggggagaccccgacgtggagtgccgagcctgtgactgtgaccccaggggcattgagacgccacagtgtgaccagtccacgggccagtgtgtctgcgttgagggtgttgagggtccacgctgtgacaagtgcacgcgagggtactcgggggtcttccctgactgcacaccctgccaccagtgctttgctctctgggatgtgatcattgccgagctgaccaacaggacacacagattcctggagaaagccaaggccttgaagatcagtggtgtgatcgggccttaccgtgagactgtggactcggtggagaggaaagtcagcgagataaaagacatcctggcgcagagccccgcagcagagccactgaaaaacattgggaatctctttgaggaagcagagaaactgattaaagatgttacagaaatgatggctcaagtagaagtgaaattatctgacacaacttcccaaagcaacagcacagccaaagaactggattctctacagacagaagccgaaagcctagacaacactgtgaaagaacttgctgaacaactggaatttatcaaaaactcagatattcggggtgccttggatagcattaccaagtatttccagatgtctcttgaggcagaggagagggtgaatgcctccaccacagaacccaacagcactgtggagcagtcagccctcatgagagacagagtagaagacgtgatgatggagcgagaatcccagttcaaggaaaaacaagaggagcaggctcgcctccttgatgaactggcaggcaagctacaaagcctagacctttcagccgctgccgaaatgacctgtggaacacccccaggggcctcctgttccgagactgaatgtggcgggccaaactgcagaactgacgaaggagagaggaagtgtggggggcctggctgtggtggtctggttactgttgcacacaacgcctggcagaaagccatggacttggaccaagatgtcctgagtgccctggctgaagtggaacagctctccaagatggtctctgaagcaaaactgagggcagatgaggcaaaacaaagtgctgaagacattctgttgaagacaaatgctaccaaagaaaaaatggacaagagcaatgaggagctgagaaatctaatcaagcaaatcagaaactttttgacccaggatagtgctgatttggacagcattgaagcagttgctaatgaagtattgaaaatggagatgcctagcaccccacagcagttacagaacttgacagaagatatacgtgaacgagttgaaagcctttctcaagtagaggttattcttcagcatagtgctgctgacattgccagagctgagatgttgttagaagaagctaaaagagcaagcaaaagtgcaacagatgttaaagtcactgcagatatggtaaaggaagctctggaagaagcagaaaaggcccaggtcgcagcagagaaggcaattaaacaagcagatgaagacattcaaggaacccagaacctgttaacttcgattgagtctgaaacagcagcttctgaggaaaccttgttcaacgcgtcccagcgcatcagcgagttagagaggaatgtggaagaacttaagcggaaagctgcccaaaactccggggaggcagaatatattgaaaaagtagtatatactgtgaagcaaagtgcagaagatgttaagaagncttnncatggtgcactgtctggcacagtttacacctcgacaatttttgccccaaacgtgagtcttgtgcccaggaaccgagcgctcaaatagagacaacttttctcaccatgagcgcaggccccataagagactcgccccccactaaaccccataaagaggagagacgcccagataccacagtgtattttcaggaagacgcgcgcacat

SEQ ID NO: 458064 - DNA, 5846 bp, Homo sapiens
  misc_feature (5321)..(5323): n is a, c, g, or t
  misc_feature (5338)..(5338): n is a, c, g, or t
  misc_feature (5355)..(5355): n is a, c, g, or t
  misc_feature (5357)..(5357): n is a, c, g, or t
  misc_feature (5376)..(5376): n is a, c, g, or t
  misc_feature (5401)..(5403): n is a, c, g, or t
  misc_feature (5415)..(5417): n is a, c, g, or t
  misc_feature (5427)..(5427): n is a, c, g, or t
  misc_feature (5437)..(5439): n is a, c, g, or t
  misc_feature (5447)..(5448): n is a, c, g, or t
  misc_feature (5464)..(5464): n is a, c, g, or t
  misc_feature (5468)..(5468): n is a, c, g, or t
  misc_feature (5485)..(5486): n is a, c, g, or t
  misc_feature (5490)..(5490): n is a, c, g, or t
  misc_feature (5500)..(5500): n is a, c, g, or t
  misc_feature (5508)..(5508): n is a, c, g, or t
  misc_feature (5519)..(5519): n is a, c, g, or t
  misc_feature (5526)..(5526): n is a, c, g, or t
  misc_feature (5532)..(5532): n is a, c, g, or t
  misc_feature (5545)..(5545): n is a, c, g, or t
  misc_feature (5553)..(5553): n is a, c, g, or t
gggacctggaagcgccccagccccgcagcgatcgcagattcggctttcaaacaaaagaggcgccccggggggtgggaccgggacctcacccggtcctcgcagagttgcggccgcccgccccttcagccccggctctccgtatgcgcatgagcagaggcgcctccctctgttcctcccaaggctaaactttctaattcccttctttgggctcgggggctcccggagcagggcgagagctcgcgtcgccggaaaggaagacgggaagaaagggcaggcggctcggcgggcgtcttctccactcctctgccgcgtccccgtggctgcagggagccggcatggggcttctccagttgctagctttcagtttcttagccctgtgcagagcccgagtgcgcgctcaggaacccgagttcagctacggctgcgcagaaggcagctgctatcccgccacgggcgaccttctcatcggccgagcacagaagctttcggtgacctcgacgtgcgggctgcacaagcccgaaccctactgtatcgtcagccacttgcaggaggacaaaaaatgcttcatatgcaattcccaagatccttatcatgagaccctgaatcctgacagccatctcattgaaaatgtggtcactacatttgctccaaaccgccttaagatttggtggcaatctgaaaatggtgtggaaaatgtaactatccaactggatttggaagcagaattccattttactcatctcataatgactttcaagacattccgtccagctgctatgctgatagaacgatcgtccgactttgggaaaacctggggtgtgtatagatacttcgcctatgactgtgaggcctcgtttccaggcatttcaactggccccatgaaaaaagtcgatgacataatttgtgattctcgatattctgacattgaaccctcaactgaaggagaggtgatatttcgtgctttagatcctgctttcaaaatagaagatccttatagcccaaggatacagaatttattaaaaattaccaacttgagaatcaagtttgtgaaactgcatactttgggagataaccttctggattccaggatggaaatcagagaaaagtattattatgcagtttatgatatggtggttcgaggaaattgcttctgctatggtcatgccagcgaatgtgcccctgtggatggattcaatgaagaagtggaaggaatggttcacggacactgcatgtgcaggcataacaccaagggcttaaactgtgaactctgcatggatttctaccatgatttaccttggagacctgctgaaggccgaaacagcaacgcctgtaaaaaatgtaactgcaatgaacattccatctcttgtcactttgacatggctgtttacctggccacggggaacgtcagcggaggcgtgtgtgatgactgtcagcacaacaccatggggcgcaactgtgagcagtgcaagccgttttactaccagcacccagagagggacatccgagatcctaatttctgtgaacgatgtacgtgtgacccagctggctctcaaaatgagggaatttgtgacagctatactgatttttctactggtctcattgctggccagtgtcggtgtaaattaaatgtggaaggagaacattgtgatgtttgcaaagaaggcttctatgatttaagcagtgaagatccatttggttgtaaatcttgtgcttgcaatcctctgggaacaattcctggagggaatccttgtgattccgagacaggtcactgctactgcaagcgtctggtgacaggacagcattgtgaccagtgcctgccagagcactggggcttaagcaatgatttggatggatgtcgaccatgtgactgtgaccttgggggagccttaaacaacagttgctttgcggagtcaggccagtgctcatgccggcctcacatgattggacgtcagtgcaacgaagtggaacctggttactactttgccaccctggatcactacctctatgaagcggaggaagccaacttggggcctggggttagcatagtggagcggcaatatatccaggaccggattccctcctggactggagccggcttcgtccgagtgcctgaaggggcttatttggagtttttcattgacaacataccatattccatggagtacgacatcctaattcgctacgagccacagctacccgaccactgggaaaaagctgtcatcacagtgcagcgacctggaaggattccaaccagcagccgatgtggtaataccatccccgatgatgacaaccaggtggtgtcattatcaccaggctcaagatatgtcgtccttcctcggccggtgtgctttgagaagggaacaaactacacggtgaggttggagctgcctcagtacacctcctctgatagcgacgtggagagcccctacacgctgatcgattctcttgttctcatgccatactgtaaatcactggacatcttcaccgtgggaggttcaggagatggggtggtcaccaacagtgcctgggaaacctttcagagataccgatgtctagagaacagcagaagcgttgtgaaaacaccgatgacagatgtttgcagaaacatcatctttagcatttctgccctgttacaccagacaggcctggcttgtgaatgcgaccctcagggttcgttaagttccgtgtgtgatcccaacggaggccagtgccagtgccggcccaacgtggttggaagaacctgcaacagatgtgcacctggaacttttggctttggccccagtggatgcaaaccttgtgagtgccatctgcaaggatctgtcaatgccttctgcaatcccgtcactggccagtgccactgtttccagggagtgtatgctcggcagtgtgatcggtgcttacctgggcactggggctttccaagttgccagccctgccagtgcaatggccacgccgatgactgcgacccagtgactggggagtgcttgaactgccaggactacaccatgggtcataactgtgaaaggtgcttggctggttactatggcgaccccatcattgggtcaggagatcactgccgcccttgcccttgcccagatggtcccgacagtggacgccagtttgccaggagctgctaccaagatcctgttactttacagcttgcctgtgtttgtgatcctggatacattggttccagatgtgacgactgtgcctcaggatactttggcaatccatcagaagttggggggtcgtgtcagccttgccagtgtcacaacaacattgacacgacagacccagaagcctgtgacaaggagactgggaggtgtctcaagtgcctgtaccacacggaaggggaacactgtcagttctgccggtttggatactatggtgatgccctccggcaggactgtcgaaagtgtgtctgtaattacctgggcaccgtgcaagagcactgtaacggctctgactgccagtgcgacaaagccactggtcagtgcttgtgtcttcctaatgtgatcgggcagaactgtgaccgctgtgcgcccaatacctggcagctggccagtggcactggctgtgacccatgcaactgcaatgctgctcattccttcgggccatcttgcaatgagttcacggggcagtgccagtgcatgcctgggtttggaggccgcacctgcagcgagtgccaggaactcttctggggagaccccgacgtggagtgccgagcctgtgactgtgaccccaggggcattgagacgccacagtgtgaccagtccacgggccagtgtgtctgcgttgagggtgttgagggtccacgctgtgacaagtgcacgcgagggtactcgggggtcttccctgactgcacaccctgccaccagtgctttgctctctgggatgtgatcattgccgagctgaccaacaggacacacagattcctggagaaagccaaggccttgaagatcagtggtgtgatcgggccttaccgtgagactgtggactcggtggagaggaaagtcagcgagataaaagacatcctggcgcagagccccgcagcagagccactgaaaaacattgggaatctctttgaggaagcagagaaactgattaaagatgttacagaaatgatggctcaagtagaagtgaaattatctgacacaacttcccaaagcaacagcacagccaaagaactggattctctacagacagaagccgaaagcctagacaacactgtgaaagaacttgctgaacaactggaatttatcaaaaactcagatattcggggtgccttggatagcattaccaagtatttccagatgtctcttgaggcagaggagagggtgaatgcctccaccacagaacccaacagcactgtggagcagtcagccctcatgagagacagagtagaagacgtgatgatggagcgagaatcccagttcaaggaaaaacaagaggagcaggctcgcctccttgatgaactggcaggcaagctacaaagcctagacctttcagccgctgccgaaatgacctgtggaacacccccaggggcctcctgttccgagactgaatgtggcgggccaaactgcagaactgacgaaggagagaggaagtgtggggggcctggctgtggtggtctggttactgttgcacacaacgcctggcagaaagccatggacttggaccaagatgtcctgagtgccctggctgaagtggaacagctctccaagatggtctctgaagcaaaactgagggcagatgaggcaaaacaaagtgctgaagacattctgttgaagacaaatgctaccaaagaaaaaatggacaagagcaatgaggagctgagaaatctaatcaagcaaatcagaaactttttgacccaggatagtgctgatttggacagcattgaagcagttgctaatgaagtattgaaaatggagatgcctagcaccccacagcagttacagaacttgacagaagatatacgtgaacgagttgaaagcctttctcaagtagaggttattcttcagcatagtgctgctgacattgccagagctgagatgttgttagaagaagctaaaagagcaagcaaaagtgcaacagatgttaaagtcactgcagatatggtaaaggaagctctggaagaagcagaaaaggcccaggtcgcagcagagaaggcaattaaacaagcagatgaagacattcaaggaacccagaacctgttaacttcgattgagtctgaaacagcagcttctgaggaaaccttgttcaacgcgtcccagcgcatcagcgagttagagaggaatgtggaagaacttaagcggggggcnnngggggggtccggggnggcggagtttattgggngngtggtatatactgtgaggnggagtgcggggggtgttgggggggnnntgggtggtgggnnngggggggggngggggggggnnncccatttnnttcccccccacactgnagantccgctgccccccgccnncccncccccctgcncccccctnccccccccccncttttcncccacncccatcgcccgcngccactgnccaaatttagaaagaaaatatgaagacaatcaaagatacttagaagataaagctcaagaattagcaagactggaaggagaagtccgttcactcctaaaggatataagccagaaagttgctgtgtatagcacatgcttgtaacagaggagaataaaaaatggctgaggtgaccaaggtaaaacaactacattttaaaaactgacttaatgctcttcaaaataaaacatcacctatttaatgtttttaatcacattttgtatggagttaaataaagtacagtgcttttgtatata

SEQ ID NO: 458065 - DNA, 2540 bp, Homo sapiens
cagacacccccaagttagattatacttagttgaaagcctttaaactggatacttagaattcctttgggttttgttttgttttgatcatgtttattgcatttcatcaagtatgttttgttgtgagatagagtcaggtacgtaaagagcttctcatttgtgatgtatccgatgccaggtggcacattatcaggatgtaacctggattgtttgtacagacatggtctgtggggaaatcctaagtaagggggaggcaaaggcaggacggaggtgaagagtatagactccggagttgcaaagaactgaatcagaattctggcgtggccttttccttgcagtgagacttggggcatgttacataatctctctgatctctgagttcccacatctgtgaaatagtgattattataacacgtatcccatagggttattgtgagagttaaatgggatcattcatataaaacatttctgtttaaagtattattactgctaagaaggggttagcaaccactgaagtcacgcatgtgctagaggaagctgctacagtctctacctgagccattggtcaattgttgtcgatggttgacaccttcccattttcacagtgaagtgagtattctaaatgccacatcttgtcactgaggttcatgattaagtagatcagctagcattgcttattcccttctagcctgtgactgtgaccccaggggcattgagacgccacagtgtgaccagtccacgggccagtgtgtctgcgttgagggtgttgagggtccacgctgtgacaagtgcacgcgagggtactcgggggtcttccctgactgcacaccctgccaccagtgctttgctctctgggatgtgatcattgccgagctgaccaacaggacacacagattcctggagaaagccaaggccttgaagatcagtggtgtgatcgggccttaccgtgagactgtggactcggtggagaggaaagtcagcgagataaaagacatcctggcgcagagccccgcagcagagccactgaaaaacattgggaatctctttgaggaagcagagaaactgattaaagatgttacagaaatgatggctcaagtagaagtgaaattatctgacacaaaatcccagttcaaggaaaaacaagaggagcaggctcgcctccttgatgaactggcaggcaagctacaaagcctagacctttcagccgctgccgaaatgacctgtggaacacccccaggggcctcctgttccgagactgaatgtggcgggccaaactgcagaactgacgaaggagagaggaagtgtggggggcctggctgtggtggtctggttactgttgcacacaacgcctggcagaaagccatggacttggaccaagatgtcctgagtgccctggctgaagtggaacagctctccaagatggtctctgaagcaaaactgagggcagatgaggcaaaacaaagtgctgaagacattctgttgaagacaaatgctaccaaagaaaaaatggacaagagcaatgaggagctgagaaatctaatcaagcaaatcagaaactttttgacccaggatagtgctgatttggacagcattgaagcagttgctaatgaagtattgaaaatggagatgcctagcaccccacagcagttacagaacttgacagaagatatacgtgaacgagttgaaagcctttctcaagtagaggttattcttcagcatagtgctgctgacattgccagagctgagatgttgttagaagaagctaaaagagcaagcaaaagtgcaacagatgttaaagtcactgcagatatggtaaaggaagctctggaagaagcagaaaaggcccaggtcgcagcagagaaggcaattaaacaagcagatgaagacattcaaggaacccagaacctgttaacttcgattgagtctgaaacagcagcttctgaggaaaccttgttcaacgcgtcccagcgcatcagcgagttagagaggaatgtggaagaacttaagcggaaagctgcccaaaactccggggaggcagaatatattgaaaaagtagtatatactgtgaagcaaagtgcagaagatgttaagaagactttagatggtgaacttgatgaaaagtataaaaaagtagaaaatttaattgccaaaaaaactgaagagtcagctgatgccagaaggaaagccgaaatgctacaaaatgaagcaaaaactcttttagctcaagcaaatagcaagctgcaactgctcaaagatttagaaagaaaatatgaagacaatcaaagatacttagaagataaagctcaagaattagcaagactggaaggagaagtccgttcactcctaaaggatataagccagaaagttgctgtgtatagcacatgcttgtaacagaggagaataaaaaatggctgaggtgaccaaggtaaaacaactacattttaaaaactgacttaatgctcttcaaaataaaacatcacctatttaatgtttttaatcacattttgtatggagttaaataaagtacagtgcttttgtatata

SEQ ID NO: 458066 - DNA, 3700 bp, Homo sapiens
gggacctggaagcgccccagccccgcagcgatcgcagattcggctttcaaacaaaagaggcgccccggggggtgggaccgggacctcacccggtcctcgcagagttgcggccgcccgccccttcagccccggctctccgtatgcgcatgagcagaggcgcctccctctgttcctcccaaggctaaactttctaattcccttctttgggctcgggggctcccggagcagggcgagagctcgcgtcgccggaaaggaagacgggaagaaagggcaggcggctcggcgggcgtcttctccactcctctgccgcgtccccgtggctgcagggagccggcatggggcttctccagttgctagctttcagtttcttagccctgtgcagagcccgagtgcgcgctcaggaacccgagttcagctacggctgcgcagaaggcagctgctatcccgccacgggcgaccttctcatcggccgagcacagaagctttcggtgacctcgacgtgcgggctgcacaagcccgaaccctactgtatcgtcagccacttgcaggaggacaaaaaatgcttcatatgcaattcccaagatccttatcatgagaccctgaatcctgacagccatctcattgaaaatgtggtcactacatttgctccaaaccgccttaagatttggtggcaatctgaaaatggtgtggaaaatgtaactatccaactggatttggaagcagaattccattttactcatctcataatgactttcaagacattccgtccagctgctatgctgatagaacgatcgtccgactttgggaaaacctggggtgtgtatagatacttcgcctatgactgtgaggcctcgtttccaggcatttcaactggccccatgaaaaaagtcgatgacataatttgtgattctcgatattctgacattgaaccctcaactgaaggagaggtgatatttcgtgctttagatcctgctttcaaaatagaagatccttatagcccaaggatacagaatttattaaaaattaccaacttgagaatcaagtttgtgaaactgcatactttgggagataaccttctggattccaggatggaaatcagagaaaagtattattatgcagtttatgatatggtggttcgaggaaattgcttctgctatggtcatgccagcgaatgtgcccctgtggatggattcaatgaagaagtggaaggaatggttcacggacactgcatgtgcaggcataacaccaagggcttaaactgtgaactctgcatggatttctaccatgatttaccttggagacctgctgaaggccgaaacagcaacgcctgtaaaaaatgtaactgcaatgaacattccatctcttgtcactttgacatggctgtttacctggccacggggaacgtcagcggaggcgtgtgtgatgactgtcagcacaacaccatggggcgcaactgtgagcagtgcaagccgttttactaccagcacccagagagggacatccgagatcctaatttctgtgaacgatgtacgtgtgacccagctggctctcaaaatgagggaatttgtgacagctatactgatttttctactggtctcattgctggccagtgtcggtgtaaattaaatgtggaaggagaacattgtgatgtttgcaaagaaggcttctatgatttaagcagtgaagatccatttggttgtaaatcttgtgcttgcaatcctctgggaacaattcctggagggaatccttgtgattccgagacaggtcactgctactgcaagcgtctggtgacaggacagcattgtgaccagtgcctgccagagcactggggcttaagcaatgatttggatggatgtcgaccatgtgactgtgaccttgggggagccttaaacaacagttgctttgcggagtcaggccagtgctcatgccggcctcacatgattggacgtcagtgcaacgaagtggaacctggttactactttgccaccctggatcactacctctatgaagcggaggaagccaacttggggcctggggttagcatagtggagcggcaatatatccaggaccggattccctcctggactggagccggcttcgtccgagtgcctgaaggggcttatttggagtttttcattgacaacataccatattccatggagtacgacatcctaattcgctacgagccacagctacccgaccactgggaaaaagctgtcatcacagtgcagcgacctggaaggattccaaccagcagccgatgtggtaataccatccccgatgatgacaaccaggtggtgtcattatcaccaggctcaagatatgtcgtccttcctcggccggtgtgctttgagaagggaacaaactacacggtgaggttggagctgcctcagtacacctcctgttccgagactgaatgtggcgggccaaactgcagaactgacgaaggagagaggaagtgtggggggcctggctgtggtggtctggttactgttgcacacaacgcctggcagaaagccatggacttggaccaagatgtcctgagtgccctggctgaagtggaacagctctccaagatggtctctgaagcaaaactgagggcagatgaggcaaaacaaagtgctgaagacattctgttgaagacaaatgctaccaaagaaaaaatggacaagagcaatgaggagctgagaaatctaatcaagcaaatcagaaactttttgacccaggatagtgctgatttggacagcattgaagcagttgctaatgaagtattgaaaatggagatgcctagcaccccacagcagttacagaacttgacagaagatatacgtgaacgagttgaaagcctttctcaagtagaggttattcttcagcatagtgctgctgacattgccagagctgagatgttgttagaagaagctaaaagagcaagcaaaagtgcaacagatgttaaagtcactgcagatatggtaaaggaagctctggaagaagcagaaaaggcccaggtcgcagcagagaaggcaattaaacaagcagatgaagacattcaaggaacccagaacctgttaacttcgattgagtctgaaacagcagcttctgaggaaaccttgttcaacgcgtcccagcgcatcagcgagttagagaggaatgtggaagaacttaagcggaaagctgcccaaaactccggggaggcagaatatattgaaaaagtagtatatactgtgaagcaaagtgcagaagatgttaagaagactttagatggtgaacttgatgaaaagtataaaaaagtagaaaatttaattgccaaaaaaactgaagagtcagctgatgccagaaggaaagccgaaatgctacaaaatgaagcaaaaactcttttagctcaagcaaatagcaagctgcaactgctcaaagatttagaaagaaaatatgaagacaatcaaagatacttagaagataaagctcaagaattagcaagactggaaggagaagtccgttcactcctaaaggatataagccagaaagttgctgtgtatagcacatgcttgtaacagaggagaataaaaaatggctgaggtgaccaaggtaaaacaactacattttaaaaactgacttaatgctcttcaaaataaaacatcacctatttaatgtttttaatcacattttgtatggagttaaataaagtacagtgcttttgtatata

SEQ ID NO: 458067 - DNA, 1156 bp, Homo sapiens
gtgactctgcaggatcctttaagctctctctgatggtctctgaagcaaaactgagggcagatgaggcaaaacaaagtgctgaagacattctgttgaagacaaatgctaccaaagaaaaaatggacaagagcaatgaggagctgagaaatctaatcaagcaaatcagaaactttttgacccaggatagtgctgatttggacagcattgaagcagttgctaatgaagtattgaaaatggagatgcctagcaccccacagcagttacagaacttgacagaagatatacgtgaacgagttgaaagcctttctcaagtagaggttattcttcagcatagtgctgctgacattgccagagctgagatgttgttagaagaagctaaaagagcaagcaaaagtgcaacagatgttaaagtcactgcagatatggtaaaggaagctctggaagaagcagaaaaggcccaggtcgcagcagagaaggcaattaaacaagcagatgaagacattcaaggaacccagaacctgttaacttcgattgagtctgaaacagcagcttctgaggaaaccttgttcaacgcgtcccagcgcatcagcgagttagagaggaatgtggaagaacttaagcggaaagctgcccaaaactccggggaggcagaatatattgaaaaagtagtatatactgtgaagcaaagtgcagaagatgttaagaagactttagatggtgaacttgatgaaaagtataaaaaagtagaaaatttaattgccaaaaaaactgaagagtcagctgatgccagaaggaaagccgaaatgctacaaaatgaagcaaaaactcttttagctcaagcaaatagcaagctgcaactgctcaaagatttagaaagaaaatatgaagacaatcaaagatacttagaagataaagctcaagaattagcaagactggaaggagaagtccgttcactcctaaaggatataagccagaaagttgctgtgtatagcacatgcttgtaacagaggagaataaaaaatggctgaggtgaccaaggtaaaacaactacattttaaaaactgacttaatgctcttcaaaataaaacatcacctatttaatgtttttaatcacattttgtatggagttaaataaagtacagtgcttttgtatata

SEQ ID NO: 458068 - DNA, 2253 bp, Homo sapiens
tgaaagggacttaatcaaaaaggatgtttattatctcacatcttaataagatatccagtagcaggatagcttcctgggtctgcgacccacatacttttcatctttctactctaccatcttaagcatatcagctttgtcctctagctcctcatggttacaaggtagctgccaaagttccagacatcatataaagattaataatggaagaagagaccacctattccttgcatctttttaaaaaggaggaagtcttccctagaagcctttaagcagtcatccttataaacctcactggccagcaataagtcacatgccaatgcataaatgtcactggaaaatggaaatgcgattacagtaattcacaaactaatatttaatgctgggttgataattttacctgacttagaggcaggtacctgaaaaaaaatcagtattctgttagcaagaaaaaaggcatggctaataaggagtcaacagtatttgctaaggatatcttaggtaatattttatggaagccatcattcaagtacatattttatttgaataaatcctctggggtccatttttatgttcaatagtttaaaacataagcaaagcttgaaagtaaatgaggatctgacgtatttgaagcttaacttcataaactttttttttcaccatcttccacattttacatttgaaactccttggctttgttgacaacccattattccggttctcctgcttctataattttctccctttctataatttcctgaatctagatcatttgtaggaaatatcaaatctccatatctgcattcacaagtttctgagctattcgtccaacctcaattaaaagatttcattgcctttaagtctcagctttaagctctggccctctatggttttccacaatgttcagattcactctgctatactttcccgtaacatactctgccgttcctgtctccccatctggaattgtcctttcttctttcaaattctattatcccttaaaatctgatcagctcctcatcttccacgaaggtttccctcactacccagcctaaaacaaattctagtagtactcaattgtctgcagttacttttttgtgtgtgtaggtctcatctcccctcaaaatcccagatagattataaactcttaaacaggaagttagtgtctcttggtgtgtaaccccaccatgctagtccatagtagatgaccagtaagtggttgaatgaatgaaccatctattcttttcacctctttttggggacatctttgcttttcacagaggatagtgctgatttggacagcattgaagcagttgctaatgaagtattgaaaatggagatgcctagcaccccacagcagttacagaacttgacagaagatatacgtgaacgagttgaaagcctttctcaagtagaggttattcttcagcatagtgctgctgacattgccagagctgagatgttgttagaagaagctaaaagagcaagcaaaagtgcaacagatgttaaagtcactgcagatatggtaaaggaagctctggaagaagcagaaaaggcccaggtcgcagcagagaaggcaattaaacaagcagatgaagacattcaaggaacccagaacctgttaacttcgattgagtctgaaacagcagcttctgaggaaaccttgttcaacgcgtcccagcgcatcagcgagttagagaggaatgtggaagaacttaagcggaaagctgcccaaaactccggggaggcagaatatattgaaaaagtagtatatactgtgaagcaaagtgcagaagatgttaagaagactttagatggtgaacttgatgaaaagtataaaaaagtagaaaatttaattgccaaaaaaactgaagagtcagctgatgccagaaggaaagccgaaatgctacaaaatgaagcaaaaactcttttagctcaagcaaatagcaagctgcaactgctcaaagatttagaaagaaaatatgaagacaatcaaagatacttagaagataaagctcaagaattagcaagactggaaggagaagtccgttcactcctaaaggatataagccagaaagttgctgtgtatagcacatgcttgtaacagaggagaataaaaaatggctgaggtgaccaaggtaaaacaactacattttaaaaactgacttaatgctcttcaaaataaaacatcacctatttaatgtttttaatcacattttgtatggagttaaataaagtacagtgcttttgtatata

SEQ ID NO: 458069 - DNA, 2459 bp, Homo sapiens
tgaaagggacttaatcaaaaaggatgtttattatctcacatcttaataagatatccagtagcaggatagcttcctgggtctgcgacccacatacttttcatctttctactctaccatcttaagcatatcagctttgtcctctagctcctcatggttacaaggtagctgccaaagttccagacatcatataaagattaataatggaagaagagaccacctattccttgcatctttttaaaaaggaggaagtcttccctagaagcctttaagcagtcatccttataaacctcactggccagcaataagtcacatgccaatgcataaatgtcactggaaaatggaaatgcgattacagtaattcacaaactaatatttaatgctgggttgataattttacctgacttagaggcaggtacctgaaaaaaaatcagtattctgttagcaagaaaaaaggcatggctaataaggagtcaacagtatttgctaaggatatcttaggtaatattttatggaagccatcattcaagtacatattttatttgaataaatcctctggggtccatttttatgttcaatagtttaaaacataagcaaagcttgaaagtaaatgaggatctgacgtatttgaagcttaacttcataaactttttttttcaccatcttccacattttacatttgaaactccttggctttgttgacaacccattattccggttctcctgcttctataattttctccctttctataatttcctgaatctagatcatttgtaggaaatatcaaatctccatatctgcattcacaagtttctgagctattcgtccaacctcaattaaaagatttcattgcctttaagtctcagctttaagctctggccctctatggttttccacaatgttcagattcactctgctatactttcccgtaacatactctgccgttcctgtctccccatctggaattgtcctttcttctttcaaattctattatcccttaaaatctgatcagctcctcatcttccacgaaggtttccctcactacccagcctaaaacaaattctagtagtactcaattgtctgcagttacttttttgtgtgtgtaggtctcatctcccctcaaaatcccagatagattataaactcttaaacaggaagttagtgtctcttggtgtgtaaccccaccatgctagtccatagtagatgaccagtaagtggttgaatgaatgaaccatctattcttttcacctctttttggggacatctttgcttttcacagaggatagtgctgatttggacagcattgaagcagttgctaatgaagtattgaaaatggagatgcctagcaccccacagcagttacagaacttgacagaagatatacgtgaacgagttgaaagcctttctcaagtagaggttattcttcagcatagtgctgctgacattgccagagctgagatgttgttagaagaagctaaaagagcaaggtatctaaagacatggcatctaaggggcttattttgtgtatctatcatggagtaaaaagtatctctttaaccaatgaaacttctaagaaggacctatgcgagtctctctgggtcatttcaggaaggctattctttaaagaaaagaacactgagagtacttttttcatgttcagcaacaatatactgtctcattattttttactcagcaaaagtgcaacagatgttaaagtcactgcagatatggtaaaggaagctctggaagaagcagaaaaggcccaggtcgcagcagagaaggcaattaaacaagcagatgaagacattcaaggaacccagaacctgttaacttcgattgagtctgaaacagcagcttctgaggaaaccttgttcaacgcgtcccagcgcatcagcgagttagagaggaatgtggaagaacttaagcggaaagctgcccaaaactccggggaggcagaatatattgaaaaagtagtatatactgtgaagcaaagtgcagaagatgttaagaagactttagatggtgaacttgatgaaaagtataaaaaagtagaaaatttaattgccaaaaaaactgaagagtcagctgatgccagaaggaaagccgaaatgctacaaaatgaagcaaaaactcttttagctcaagcaaatagcaagctgcaactgctcaaagatttagaaagaaaatatgaagacaatcaaagatacttagaagataaagctcaagaattagcaagactggaaggagaagtccgttcactcctaaaggatataagccagaaagttgctgtgtatagcacatgcttgtaacagaggagaataaaaaatggctgaggtgaccaaggtaaaacaactacattttaaaaactgacttaatgctcttcaaaataaaacatcacctatttaatgtttttaatcacattttgtatggagttaaataaagtacagtgcttttgtatata

SEQ ID NO: 458070 - DNA, 1003 bp, Homo sapiens
atccattttcaatacttcattagcaactgcttcatgctgtccaaatcagcattgaagcagttgctaatgaagtattgaaaatggagatgcctagcaccccacagcagttacagaacttgacagaagatatacgtgaacgagttgaaagcctttctcaagtagaggttattcttcagcatagtgctgctgacattgccagagctgagatgttgttagaagaagctaaaagagcaagcaaaagtgcaacagatgttaaagtcactgcagatatggtaaaggaagctctggaagaagcagaaaaggcccaggtcgcagcagagaaggcaattaaacaagcagatgaagacattcaaggaacccagaacctgttaacttcgattgagtctgaaacagcagcttctgaggaaaccttgttcaacgcgtcccagcgcatcagcgagttagagaggaatgtggaagaacttaagcggaaagctgcccaaaactccggggaggcagaatatattgaaaaagtagtatatactgtgaagcaaagtgcagaagatgttaagaagactttagatggtgaacttgatgaaaagtataaaaaagtagaaaatttaattgccaaaaaaactgaagagtcagctgatgccagaaggaaagccgaaatgctacaaaatgaagcaaaaactcttttagctcaagcaaatagcaagctgcaactgctcaaagatttagaaagaaaatatgaagacaatcaaagatacttagaagataaagctcaagaattagcaagactggaaggagaagtccgttcactcctaaaggatataagccagaaagttgctgtgtatagcacatgcttgtaacagaggagaataaaaaatggctgaggtgaccaaggtaaaacaactacattttaaaaactgacttaatgctcttcaaaataaaacatcacctatttaatgtttttaatcacattttgtatggagttaaataaagtacagtgcttttgtatata

SEQ ID NO: 458071 - DNA, 5664 bp, Homo sapiens
  misc_feature (4641)..(4641): n is a, c, g, or t
  misc_feature (4691)..(4691): n is a, c, g, or t
gggacctggaagcgccccagccccgcagcgatcgcagattcggctttcaaacaaaagaggcgccccggggggtgggaccgggacctcacccggtcctcgcagagttgcggccgcccgccccttcagccccggctctccgtatgcgcatgagcagaggcgcctccctctgttcctcccaaggctaaactttctaattcccttctttgggctcgggggctcccggagcagggcgagagctcgcgtcgccggaaaggaagacgggaagaaagggcaggcggctcggcgggcgtcttctccactcctctgccgcgtccccgtggctgcagggagccggcatggggcttctccagttgctagctttcagtttcttagccctgtgcagagcccgagtgcgcgctcaggaacccgagttcagctacggctgcgcagaaggcagctgctatcccgccacgggcgaccttctcatcggccgagcacagaagctttcggtgacctcgacgtgcgggctgcacaagcccgaaccctactgtatcgtcagccacttgcaggaggacaaaaaatgcttcatatgcaattcccaagatccttatcatgagaccctgaatcctgacagccatctcattgaaaatgtggtcactacatttgctccaaaccgccttaagatttggtggcaatctgaaaatggtgtggaaaatgtaactatccaactggatttggaagcagaattccattttactcatctcataatgactttcaagacattccgtccagctgctatgctgatagaacgatcgtccgactttgggaaaacctggggtgtgtatagatacttcgcctatgactgtgaggcctcgtttccaggcatttcaactggccccatgaaaaaagtcgatgacataatttgtgattctcgatattctgacattgaaccctcaactgaaggagaggtgatatttcgtgctttagatcctgctttcaaaatagaagatccttatagcccaaggatacagaatttattaaaaattaccaacttgagaatcaagtttgtgaaactgcatactttgggagataaccttctggattccaggatggaaatcagagaaaagtattattatgcagtttatgatatggtggttcgaggaaattgcttctgctatggtcatgccagcgaatgtgcccctgtggatggattcaatgaagaagtggaaggaatggttcacggacactgcatgtgcaggcataacaccaagggcttaaactgtgaactctgcatggatttctaccatgatttaccttggagacctgctgaaggccgaaacagcaacgcctgtaaaaaatgtaactgcaatgaacattccatctcttgtcactttgacatggctgtttacctggccacggggaacgtcagcggaggcgtgtgtgatgactgtcagcacaacaccatggggcgcaactgtgagcagtgcaagccgttttactaccagcacccagagagggacatccgagatcctaatttctgtgaacgatgtacgtgtgacccagctggctctcaaaatgagggaatttgtgacagctatactgatttttctactggtctcattgctggccagtgtcggtgtaaattaaatgtggaaggagaacattgtgatgtttgcaaagaaggcttctatgatttaagcagtgaagatccatttggttgtaaatcttgtgcttgcaatcctctgggaacaattcctggagggaatccttgtgattccgagacaggtcactgctactgcaagcgtctggtgacaggacagcattgtgaccagtgcctgccagagcactggggcttaagcaatgatttggatggatgtcgaccatgtgactgtgaccttgggggagccttaaacaacagttgctttgcggagtcaggccagtgctcatgccggcctcacatgattggacgtcagtgcaacgaagtggaacctggttactactttgccaccctggatcactacctctatgaagcggaggaagccaacttggggcctggggttagcatagtggagcggcaatatatccaggaccggattccctcctggactggagccggcttcgtccgagtgcctgaaggggcttatttggagtttttcattgacaacataccatattccatggagtacgacatcctaattcgctacgagccacagctacccgaccactgggaaaaagctgtcatcacagtgcagcgacctggaaggattccaaccagcagccgatgtggtaataccatccccgatgatgacaaccaggtggtgtcattatcaccaggctcaagatatgtcgtccttcctcggccggtgtgctttgagaagggaacaaactacacggtgaggttggagctgcctcagtacacctcctctgatagcgacgtggagagcccctacacgctgatcgattctcttgttctcatgccatactgtaaatcactggacatcttcaccgtgggaggttcaggagatggggtggtcaccaacagtgcctgggaaacctttcagagataccgatgtctagagaacagcagaagcgttgtgaaaacaccgatgacagatgtttgcagaaacatcatctttagcatttctgccctgttacaccagacaggcctggcttgtgaatgcgaccctcagggttcgttaagttccgtgtgtgatcccaacggaggccagtgccagtgccggcccaacgtggttggaagaacctgcaacagatgtgcacctggaacttttggctttggccccagtggatgcaaaccttgtgagtgccatctgcaaggatctgtcaatgccttctgcaatcccgtcactggccagtgccactgtttccagggagtgtatgctcggcagtgtgatcggtgcttacctgggcactggggctttccaagttgccagccctgccagtgcaatggccacgccgatgactgcgacccagtgactggggagtgcttgaactgccaggactacaccatgggtcataactgtgaaaggtgcttggctggttactatggcgaccccatcattgggtcaggagatcactgccgcccttgcccttgcccagatggtcccgacagtggacgccagtttgccaggagctgctaccaagatcctgttactttacagcttgcctgtgtttgtgatcctggatacattggttccagatgtgacgactgtgcctcaggatactttggcaatccatcagaagttggggggtcgtgtcagccttgccagtgtcacaacaacattgacacgacagacccagaagcctgtgacaaggagactgggaggtgtctcaagtgcctgtaccacacggaaggggaacactgtcagttctgccggtttggatactatggtgatgccctccggcaggactgtcgaaagtgtgtctgtaattacctgggcaccgtgcaagagcactgtaacggctctgactgccagtgcgacaaagccactggtcagtgcttgtgtcttcctaatgtgatcgggcagaactgtgaccgctgtgcgcccaatacctggcagctggccagtggcactggctgtgacccatgcaactgcaatgctgctcattccttcgggccatcttgcaatgagttcacggggcagtgccagtgcatgcctgggtttggaggccgcacctgcagcgagtgccaggaactcttctggggagaccccgacgtggagtgccgagcctgtgactgtgaccccaggggcattgagacgccacagtgtgaccagtccacgggccagtgtgtctgcgttgagggtgttgagggtccacgctgtgacaagtgcacgcgagggtactcgggggtcttccctgactgcacaccctgccaccagtgctttgctctctgggatgtgatcattgccgagctgaccaacaggacacacagattcctggagaaagccaaggccttgaagatcagtggtgtgatcgggccttaccgtgagactgtggactcggtggagaggaaagtcagcgagataaaagacatcctggcgcagagccccgcagcagagccactgaaaaacattgggaatctctttgaggaagcagagaaactgattaaagatgttacagaaatgatggctcaagtagaagtgaaattatctgacacaacttcccaaagcaacagcacagccaaagaactggattctctacagacagaagccgaaagcctagacaacactgtgaaagaacttgctgaacaactggaatttatcaaaaactcagatattcggggtgccttggatagcattaccaagtatttccagatgtctcttgaggcagaggagagggtgaatgcctccaccacagaacccaacagcactgtggagcagtcagccctcatgagagacagagtagaagacgtgatgatggagcgagaatcccagttcaaggaaaaacaagaggagcaggctcgcctccttgatgaactggcaggcaagctacaaagcctagacctttcagccgctgccgaaatggtaaggtttggggatgtggccttactgctatggtgccaagcaaaaaaaaaaaaaaaaaaaaaaaaaaaaaaaaaaaaaaaaaaaaaaaaaaaaaaaaaaaaaaaaaaaaaacaaaaanaaaaaaaaaaaacaaaaaaaaaaaaaaaacacaaacaaacaaaaaaaaanaaaaaaaaaaaaaggggggggggcccgcaaaatcccccggggggggcgccacaagcagaccagaccaccacaatttattgaaaaaaaggagagcgccaaaaagagagacgacctaatatataaaaacgacggagaggagacgaggaacaaaacaaagacgaaagacaggagaaaaagaagacaagaagagaggcgacatccgagagaagaagaaaacaaacaaaagggggggaggagggaaaaaaacatatcgagccaaacaacaaccaaaagagagaaataataagaccacaacgacagagacaaaaacaaaacaaaacaacacggagcaaacacagaaggtgaaacaaaaaacacagaaacaataaacgaagacgccgaagaaaagaaaagagcaagagcaccagcaccaggcgcgagatcaaccgatcaaacagcacacaacaaccactatccaccaccagcgggggcgggcctaataaccgaacaagacacaagcaacacgaccgaacaacacaccacgccacaaccccacgccgcaaaaacacaacagaccacaacaacacgaccacaccggaccacgacaaaacaaaaaacaaacagcaaagaaaaagggaagacgagaaggagaggggaaagagaaggaacaggaacgagagagcaaaagagaaaacagggaaagcaagaggaagacaaaaagagagaagagaaagatagaaaacacagacaaaaagggaaaaggaaagaagacgaaaaagagaaaaggaagagcgccacagcgaccacacgaggaggcagcgggaggagaaacgacgacaagagacagaggagaaagaaaaaaccaaaacaaagaccggccaacacggccaaagcggcgaaaaaaggaagaagcagaaggagaacaagaggaaacagaagagaggagaggcgggaagaacggccgagaagaagaaagacgggaggaaggaaacgc

SEQ ID NO: 458072 - DNA, 885 bp, Homo sapiens
tactgtcagaaaaaattttacatcaatctcagcttagatcatcagaagtactgaaagaatgaagtgaatatatgaaatgtagcaaagactaaagttagatacttcatgtaacttttcctgaaatattctttttagtaattacttcttttggtctagagcaaaatggcacagcagacttttaaatcttcctccaaacttgtactcatagtaattccatttcttaaactaatgtcttgctggaaaattgacatgcttttagattgagtctgaaacagcagcttctgaggaaaccttgttcaacgcgtcccagcgcatcagcgagttagagaggaatgtggaagaacttaagcggaaagctgcccaaaactccggggaggcagaatatattgaaaaagtagtatatactgtgaagcaaagtgcagaagatgttaagaagactttagatggtgaacttgatgaaaagtataaaaaagtagaaaatttaattgccaaaaaaactgaagagtcagctgatgccagaaggaaagccgaaatgctacaaaatgaagcaaaaactcttttagctcaagcaaatagcaagctgcaactgctcaaagatttagaaagaaaatatgaagacaatcaaagatacttagaagataaagctcaagaattagcaagactggaaggagaagtccgttcactcctaaaggatataagccagaaagttgctgtgtatagcacatgcttgtaacagaggagaataaaaaatggctgaggtgaccaaggtaaaacaactacattttaaaaactgacttaatgctcttcaaaataaaacatcacctatttaatgtttttaatcacattttgtatggagttaaataaagtacagtgcttttgtatata

SEQ ID NO: 458073 - DNA, 3851 bp, Homo sapiens
gggacctggaagcgccccagccccgcagcgatcgcagattcggctttcaaacaaaagaggcgccccggggggtgggaccgggacctcacccggtcctcgcagagttgcggccgcccgccccttcagccccggctctccgtatgcgcatgagcagaggcgcctccctctgttcctcccaaggctaaactttctaattcccttctttgggctcgggggctcccggagcagggcgagagctcgcgtcgccggaaaggaagacgggaagaaagggcaggcggctcggcgggcgtcttctccactcctctgccgcgtccccgtggctgcagggagccggcatggggcttctccagttgctagctttcagtttcttagccctgtgcagagcccgagtgcgcgctcaggaacccgagttcagctacggctgcgcagaaggcagctgctatcccgccacgggcgaccttctcatcggccgagcacagaagctttcggtgacctcgacgtgcgggctgcacaagcccgaaccctactgtatcgtcagccacttgcaggaggacaaaaaatgcttcatatgcaattcccaagatccttatcatgagaccctgaatcctgacagccatctcattgaaaatgtggtcactacatttgctccaaaccgccttaagatttggtggcaatctgaaaatggtgtggaaaatgtaactatccaactggatttggaagcagaattccattttactcatctcataatgactttcaagacattccgtccagctgctatgctgatagaacgatcgtccgactttgggaaaacctggggtgtgtatagatacttcgcctatgactgtgaggcctcgtttccaggcatttcaactggccccatgaaaaaagtcgatgacataatttgtgattctcgatattctgacattgaaccctcaactgaaggagaggtgatatttcgtgctttagatcctgctttcaaaatagaagatccttatagcccaaggatacagaatttattaaaaattaccaacttgagaatcaagtttgtgaaactgcatactttgggagataaccttctggattccaggatggaaatcagagaaaagtattattatgcagtttatgatatggtggttcgaggaaattgcttctgctatggtcatgccagcgaatgtgcccctgtggatggattcaatgaagaagtggaaggaatggttcacggacactgcatgtgcaggcataacaccaagggcttaaactgtgaactctgcatggatttctaccatgatttaccttggagacctgctgaaggccgaaacagcaacgcctgtaaaaaatgtaactgcaatgaacattccatctcttgtcactttgacatggctgtttacctggccacggggaacgtcagcggaggcgtgtgtgatgactgtcagcacaacaccatggggcgcaactgtgagcagtgcaagccgttttactaccagcacccagagagggacatccgagatcctaatttctgtgaacgatgtacgtgtgacccagctggctctcaaaatgagggaatttgtgacagctatactgatttttctactggtctcattgctggccagtgtcggtgtaaattaaatgtggaaggagaacattgtgatgtttgcaaagaaggcttctatgatttaagcagtgaagatccatttggttgtaaatcttgtgcttgcaatcctctgggaacaattcctggagggaatccttgtgattccgagacaggtcactgctactgcaagcgtctggtgacaggacagcattgtgaccagtgcctgccagagcactggggcttaagcaatgatttggatggatgtcgaccatgtgactgtgaccttgggggagccttaaacaacagttgctttgcggagtcaggccagtgctcatgccggcctcacatgattggacgtcagtgcaacgaagtggaacctggttactactttgccaccctggatcactacctctatgaagcggaggaagccaacttggggcctggggttagcatagtggagcggcaatatatccaggaccggattccctcctggactggagccggcttcgtccgagtgcctgaaggggcttatttggagtttttcattgacaacataccatattccatggagtacgacatcctaattcgctacgagccacagctacccgaccactgggaaaaagctgtcatcacagtgcagcgacctggaaggattccaaccagcagccgatgtggtaataccatccccgatgatgacaaccaggtggtgtcattatcaccaggctcaagatatgtcgtccttcctcggccggtgtgctttgagaagggaacaaactacacggtgaggttggagctgcctcagtacacctcctctgatagcgacgtggagagcccctacacgctgatcgattctcttgttctcatgccatactgtaaatcactggacatcttcaccgtgggaggttcaggagatggggtggtcaccaacagtgcctgggaaacctttcagagataccgatgtctagagaacagcagaagcgttgtgaaaacaccgatgacagatgtttgcagaaacatcatctttagcatttctgccctgttacaccagacaggcctggcttgtgaatgcgaccctcagggttcgttaagttccgtgtgtgatcccaacggaggccagtgccagtgccggcccaacgtggttggaagaacctgcaacagatgtgcacctggaacttttggctttggccccagtggatgcaaaccttgtgagtgccatctgcaaggatctgtcaatgccttctgcaatcccgtcactggccagtgccactgtttccagggagtgtatgctcggcagtgtgatcggtgcttacctgggcactggggctttccaagttgccagccctgccagtgcaatggccacgccgatgactgcgacccagtgactggggagtgcttgaactgccaggactacaccatgggtcataactgtgaaaggtgcttggctggttactatggcgaccccatcattgggtcaggagatcactgccgcccttgcccttgcccagatggtcccgacagtggacgccagtttgccaggagctgctaccaagatcctgttactttacagcttgcctgtgtttgtgatcctggatacattggttccagatgtgacgactgtgcctcaggatactttggcaatccatcagaagttggggggtcgtgtcagccttgccagtgtcacaacaacattgacacgacagacccagaagcctgtgacaaggagactgggaggtgtctcaagtgcctgtaccacacggaaggggaacactgtcagttctgccggtttggatactatggtgatgccctccggcaggactgtcgaaagtgtgtctgtaattacctgggcaccgtgcaagagcactgtaacggctctgactgccagtgcgacaaagccactggtcagtgcttgtgtcttcctaatgtgatcgggcagaactgtgaccgctgtgcgcccaatacctggcagctggccagtggcactggctgtgacccatgcaactgcaatgctgctcattccttcgggccatcttgcaatgagttcacggggcagtgccagtgcatgcctgggtttggaggccgcacctgcagcgagtgccaggaactcttctggggagaccccgacgtggagtgccgaggtgagttgtgggcgttctcgcattgacttgatcagagagtggagggaactggggttctacaagagccttctgtaaattataaaacacagtacaaattaacgtgtctataagaacctgtatttaat

SEQ ID NO: 458074 - DNA, 1528 bp, Homo sapiens
  misc_feature (555)..(555): n is a, c, g, or t
agatgtttgccatactcgagctggagtaggtgctaatgggacaaaacatattcattgctcatgaaaactgtacttcataaatattttttcttgaattttaaaactttacagtaaatttaggacccgaagacaccaaatatagacactgcttggggaggaagcctagtatgatgaggttaactgtgggcaatttcatttcctaccctaggtgccttggatagcattaccaagtatttccagatgtctcttgaggcagaggagagggtgaatgcctccaccacagaacccaacagcactgtggagcagtcagccctcatgagagacagagtagaagacgtgatgatggagcgagaatcccagttcaaggaaaaacaagaggagcaggctcgcctccttgatgaactggcaggcaagctacaaagcctagacctttcagccgctgccgaaatggtaaggtttggggatgtggccttactgctatggtgccaagcaaaaaaaaaaaaaaaaaaaaaaaaaacaaaaaaaaaaaaaaaacacaaacaaacaaaaaaaaanaaaaaaaaaaaaaggggggggggcccgcaaaatcccccggggggggcgccacaagcagaccagaccaccacaatttattgaaaaaaaggagagcgccaaaaagagagacgacctaatatataaaaacgacggagaggagacgaggaacaaaacaaagacgaaagacaggagaaaaagaagacaagaagagaggcgacatccgagagaagaagaaaacaaacaaaagggggggaggagggaaaaaaacatatcgagccaaacaacaaccaaaagagagaaataataagaccacaacgacagagacaaaaacaaaacaaaacaacacggagcaaacacagaaggtgaaacaaaaaacacagaaacaataaacgaagacgccgaagaaaagaaaagagcaagagcaccagcaccaggcgcgagatcaaccgatcaaacagcacacaacaaccactatccaccaccagcgggggcgggcctaataaccgaacaagacacaagcaacacgaccgaacaacacaccacgccacaaccccacgccgcaaaaacacaacagaccacaacaacacgaccacaccggaccacgacaaaacaaaaaacaaacagcaaagaaaaagggaagacgagaaggagaggggaaagagaaggaacaggaacgagagagcaaaagagaaaacagggaaagcaagaggaagacaaaaagagagaagagaaagatagaaaacacagacaaaaagggaaaaggaaagaagacgaaaaagagaaaaggaagagcgccacagcgaccacacgaggaggcagcgggaggagaaacgacgacaagagacagaggagaaagaaaaaaccaaaacaaagaccggccaacacggccaaagcggcgaaaaaaggaagaagcagaaggagaacaagaggaaacagaagagaggagaggcgggaagaacggccgagaagaagaaagacgggaggaaggaaacgc

SEQ ID NO: 458075 - DNA, 1201 bp, Homo sapiens
gggacctggaagcgccccagccccgcagcgatcgcagattcggctttcaaacaaaagaggcgccccggggggtgggaccgggacctcacccggtcctcgcagagttgcggccgcccgccccttcagccccggctctccgtatgcgcatgagcagaggcgcctccctctgttcctcccaaggctaaactttctaattcccttctttgggctcgggggctcccggagcagggcgagagctcgcgtcgccggaaaggaagacgggaagaaagggcaggcggctcggcgggcgtcttctccactcctctgccgcgtccccgtggctgcagggagccggcatggggcttctcctttcggagtccctgccttcccagcctctcctgcgctcatctctccattgtcttttctgtgcattttgctttcttccgaatggactgtcctctctccgcacccactcccccgcccccgcttgttcgtttttttcgggctccactccctgcttgtgtccccccaactctgttgcctgtccttcccgcagccctgtgcagagcccgagtgcgcgctcaggaacccgagttcagctacggctgcgcagaaggcagctgctatcccgccacgggcgaccttctcatcggccgagcacagaagctttcggtgacctcgacgtgcgggctgcacaagcccgaaccctactgtatcgtcagccacttgcaggtgagggctgagagcggggttcgaggctctgctagcgcctcctcccgtccagacctaaggggcaggccctggggactccgcatccttccagcaatccagataggaagcgcagccagccggggagtcccgggattaggcttgtagctcaacctttcgccccatctcagtttgcacagttgcatccgccacacatttcctgccggcgcggtgagtatggaaaggcaggactgccgacagccctggctgccctgacccagagcctccaaaaggcctgattgtgtgtgtgttttttaaaactttagttttggaagtgtgcattaaaggtgatttatcctctttttaaaacccttgggtttccccacccccctctaccgcatcttcacttgggtaaagaggattccagcaatgacaggcgtcttgcaaggtgattccaatcactgaacgaacccgttttcctctcctcatttggtgctgttcccaactagatatc

SEQ ID NO: 458076 - DNA, 722 bp, Homo sapiens
gggaagatgtttcacttctggctaggcaaaggatgtctttcttgacagcagctagaggcactctgccagatgtcttgttccagtgagcagattcaatctgttgaactccagaatgatttgtggaaaactaaagaatcattcaacttgtgctttaccacctaaataagcccatgggattattatttagtttcagcttcagcttaaggtagaatgcgaggataatttctatggggaacataaaagtaatttaaaaaatagtctcaactattcacagatgtttctatttacagtttcatttattgttttattttttttaaatctcctgtaggtgtggaaaatgtaactatccaactggatttggaagcagaattccattttactcatctcataatgactttcaaggtaagaaatccatgactttctcacaaatgacacatgagagcactgtgtaatgtcccctttcaaaatggatgtcagatgtgagttgacctaaatgggaacttaaatattattgttgccataaattggggtaattgagcagtttttaaaacgagcatgaataactgcatttaacaaatactctatcttcatgacaataagtagaaagagcctctattctaaggtaattcaactgtaaacttttaattaggtatctttttatttccccatagagtaaggcagtgttgacccttttccaaaccgcaataaaacatctggagagt

SEQ ID NO: 458077 - DNA, 273 bp, Homo sapiens
ccttgccagtgtcacaacaacattgacacgacagacccagaagcctgtgacaaggagactgggaggtgtctcaagtgcctgtaccacacggaaggggaacactgtcagttctgccggtttggatactatggtgatgccctccggcaggactgtcgaagtaagatgcacatttattctgcccacttcttagaatgacttccacctttttttcattatcagcagattttattcttcctgtatttatttcacttgggaaaacacttgttcagagag

SEQ ID NO: 458078 - DNA, 612 bp, Homo sapiens
tgtgcttgcaatcctctgggaacaattcctggagggaatccttgtgattccgagacaggtcactgctactgcaagcgtctggtgacaggacagcattgtgaccagtgcctggtaagtaaatcctcattacgtgggatgggtggttggtgaggatgacatgttttaatagagaagccttttcgccattgtagagtctgcgatcaccctcacgtgtacgtgttaaaagacatgagtagacaatgcacacaataggaattactaatggatgatttcacaagatgttcaccatccctgttagaagtgtaaaggaaagccacaataaaataccacttttatagacacaattaacacaagtttttaaaaatgggaatgtttactattaggatatcatgaggtactgctacttcttggctgctggtgggcatccatattggtttgtacttttgtgaaaagcattttggagatacatatcagtagcttgtagaaatgggcataccctttgacccagtaaccccacctctgggaatctattctaatgaaataatcagaaaattggacaaagatttattctccagaagactcattgcatcttttattaatcatagcagaaga

SEQ ID NO: 458079 - DNA, 503 bp, Homo sapiens
gcggccgcccgccccttcagccccggctctccgtatgcgcatgagcagaggcgcctccctctgttcctcccaaggctaaactttctaattcccttctttgggctcgggggctcccggagcagggcgagagctcgcgtcgccgggtgaggagaacaaagtggctgcacgattttcccccctttccagcccaccccccgcttccgtgggagcgacaggaaatggaagggcgcctcttctctctttgaacatttgccttttttcccctcctttccacctctccagaaaggaagacgggaagaaagggcaggcggctcggcgggcgtcttctccactcctctgccgcgtccccgtggctgcagggagccggcatggggcttctccagttgctagctttcagtttcttaggtaattccgtggaaacggtgcggggaggcggacggacttgggcatggggaaggaaaacccaaaagctgcttgctcaccttcgtgggatcctgggggct

SEQ ID NO: 458080 - DNA, 619 bp, Homo sapiens
gtgactctgcaggatcctttaagctctctctgatggtctctgaagcaaaactgagggcagatgaggcaaaacaaagtgctgaagacattctgttgaagacaaatgctaccaaagaaaaaatggacaagagcaatgaggagctgagaaatctaatcaagcaaatcagaaactttttgacccaggatagtgctgatttggacagcattgaagcagttgctaatgaagtattgaaaatggagatgcctagcaccccacagcagttacagaacttgacagaagatatacgtgaacgagttgaaagcctttctcaagtagaggttattcttcagcatagtgctgctgacattgccagagctgagatgttgttagaagaagctaaaagagcaagcaaaagtgcaacagatgttaaagtcactgcagatatggtaaaggaagctctggaagaagcagaaaaggcccaggtcgcagcagagaaggcaattaaacaagcagatgaagacattcaaggaacccagaacctgttaacttcgattgagtctgaaacagcagcttctgaggaaaccttgttcaacgcgtcccagcgcatcagcgagagctgcaggtaccggctcgattctaa

SEQ ID NO: 458081 - DNA, 5616 bp, Homo sapiens
gggacctggaagcgccccagccccgcagcgatcgcagattcggctttcaaacaaaagaggcgccccggggggtgggaccgggacctcacccggtcctcgcagagttgcggccgcccgccccttcagccccggctctccgtatgcgcatgagcagaggcgcctccctctgttcctcccaaggctaaactttctaattcccttctttgggctcgggggctcccggagcagggcgagagctcgcgtcgccggaaaggaagacgggaagaaagggcaggcggctcggcgggcgtcttctccactcctctgccgcgtccccgtggctgcagggagccggcatggggcttctccagttgctagctttcagtttcttagccctgtgcagagcccgagtgcgcgctcaggaacccgagttcagctacggctgcgcagaaggcagctgctatcccgccacgggcgaccttctcatcggccgagcacagaagctttcggtgacctcgacgtgcgggctgcacaagcccgaaccctactgtatcgtcagccacttgcaggaggacaaaaaatgcttcatatgcaattcccaagatccttatcatgagaccctgaatcctgacagccatctcattgaaaatgtggtcactacatttgctccaaaccgccttaagatttggtggcaatctgaaaatggtgtggaaaatgtaactatccaactggatttggaagcagaattccattttactcatctcataatgactttcaagacattccgtccagctgctatgctgatagaacgatcgtccgactttgggaaaacctggggtgtgtatagatacttcgcctatgactgtgaggcctcgtttccaggcatttcaactggccccatgaaaaaagtcgatgacataatttgtgattctcgatattctgacattgaaccctcaactgaaggagaggtgatatttcgtgctttagatcctgctttcaaaatagaagatccttatagcccaaggatacagaatttattaaaaattaccaacttgagaatcaagtttgtgaaactgcatactttgggagataaccttctggattccaggatggaaatcagagaaaagtattattatgcagtttatgatatggtggttcgaggaaattgcttctgctatggtcatgccagcgaatgtgcccctgtggatggattcaatgaagaagtggaaggaatggttcacggacactgcatgtgcaggcataacaccaagggcttaaactgtgaactctgcatggatttctaccatgatttaccttggagacctgctgaaggccgaaacagcaacgcctgtaaaaaatgtaactgcaatgaacattccatctcttgtcactttgacatggctgtttacctggccacggggaacgtcagcggaggcgtgtgtgatgactgtcagcacaacaccatggggcgcaactgtgagcagtgcaagccgttttactaccagcacccagagagggacatccgagatcctaatttctgtgaacgatgtacgtgtgacccagctggctctcaaaatgagggaatttgtgacagctatactgatttttctactggtctcattgctggccagtgtcggtgtaaattaaatgtggaaggagaacattgtgatgtttgcaaagaaggcttctatgatttaagcagtgaagatccatttggttgtaaatcttgtgcttgcaatcctctgggaacaattcctggagggaatccttgtgattccgagacaggtcactgctactgcaagcgtctggtgacaggacagcattgtgaccagtgcctgccagagcactggggcttaagcaatgatttggatggatgtcgaccatgtgactgtgaccttgggggagccttaaacaacagttgctttgcggagtcaggccagtgctcatgccggcctcacatgattggacgtcagtgcaacgaagtggaacctggttactactttgccaccctggatcactacctctatgaagcggaggaagccaacttggggcctggggttagcatagtggagcggcaatatatccaggaccggattccctcctggactggagccggcttcgtccgagtgcctgaaggggcttatttggagtttttcattgacaacataccatattccatggagtacgacatcctaattcgctacgagccacagctacccgaccactgggaaaaagctgtcatcacagtgcagcgacctggaaggattccaaccagcagccgatgtggtaataccatccccgatgatgacaaccaggtggtgtcattatcaccaggctcaagatatgtcgtccttcctcggccggtgtgctttgagaagggaacaaactacacggtgaggttggagctgcctcagtacacctcctctgatagcgacgtggagagcccctacacgctgatcgattctcttgttctcatgccatactgtaaatcactggacatcttcaccgtgggaggttcaggagatggggtggtcaccaacagtgcctgggaaacctttcagagataccgatgtctagagaacagcagaagcgttgtgaaaacaccgatgacagatgtttgcagaaacatcatctttagcatttctgccctgttacaccagacaggcctggcttgtgaatgcgaccctcagggttcgttaagttccgtgtgtgatcccaacggaggccagtgccagtgccggcccaacgtggttggaagaacctgcaacagatgtgcacctggaacttttggctttggccccagtggatgcaaacgtgcttggctggttactatggcgaccccatcattgggtcaggagatcactgccgcccttgcccttgcccagatggtcccgacagtggacgccagtttgccaggagctgctaccaagatcctgttactttacagcttgcctgtgtttgtgatcctggatacattggttccagatgtgacgactgtgcctcaggatactttggcaatccatcagaagttggggggtcgtgtcagccttgccagtgtcacaacaacattgacacgacagacccagaagcctgtgacaaggagactgggaggtgtctcaagtgcctgtaccacacggaaggggaacactgtcagttctgccggtttggatactatggtgatgccctccggcaggactgtcgaaagtgtgtctgtaattacctgggcaccgtgcaagagcactgtaacggctctgactgccagtgcgacaaagccactggtcagtgcttgtgtcttcctaatgtgatcgggcagaactgtgaccgctgtgcgcccaatacctggcagctggccagtggcactggctgtgacccatgcaactgcaatgctgctcattccttcgggccatcttgcaatgagttcacggggcagtgccagtgcatgcctgggtttggaggccgcacctgcagcgagtgccaggaactcttctggggagaccccgacgtggagtgccgagcctgtgactgtgaccccaggggcattgagacgccacagtgtgaccagtccacgggccagtgtgtctgcgttgagggtgttgagggtccacgctgtgacaagtgcacgcgagggtactcgggggtcttccctgactgcacaccctgccaccagtgctttgctctctgggatgtgatcattgccgagctgaccaacaggacacacagattcctggagaaagccaaggccttgaagatcagtggtgtgatcgggccttaccgtgagactgtggactcggtggagaggaaagtcagcgagataaaagacatcctggcgcagagccccgcagcagagccactgaaaaacattgggaatctctttgaggaagcagagaaactgattaaagatgttacagaaatgatggctcaagtagaagtgaaattatctgacacaacttcccaaagcaacagcacagccaaagaactggattctctacagacagaagccgaaagcctagacaacactgtgaaagaacttgctgaacaactggaatttatcaaaaactcagatattcggggtgccttggatagcattaccaagtatttccagatgtctcttgaggcagaggagagggtgaatgcctccaccacagaacccaacagcactgtggagcagtcagccctcatgagagacagagtagaagacgtgatgatggagcgagaatcccagttcaaggaaaaacaagaggagcaggctcgcctccttgatgaactggcaggcaagctacaaagcctagacctttcagccgctgccgaaatgacctgtggaacacccccaggggcctcctgttccgagactgaatgtggcgggccaaactgcagaactgacgaaggagagaggaagtgtggggggcctggctgtggtggtctggttactgttgcacacaacgcctggcagaaagccatggacttggaccaagatgtcctgagtgccctggctgaagtggaacagctctccaagatggtctctgaagcaaaactgagggcagatgaggcaaaacaaagtgctgaagacattctgttgaagacaaatgctaccaaagaaaaaatggacaagagcaatgaggagctgagaaatctaatcaagcaaatcagaaactttttgacccaggatagtgctgatttggacagcattgaagcagttgctaatgaagtattgaaaatggagatgcctagcaccccacagcagttacagaacttgacagaagatatacgtgaacgagttgaaagcctttctcaagtagaggttattcttcagcatagtgctgctgacattgccagagctgagatgttgttagaagaagctaaaagagcaagcaaaagtgcaacagatgttaaagtcactgcagatatggtaaaggaagctctggaagaagcagaaaaggcccaggtcgcagcagagaaggcaattaaacaagcagatgaagacattcaaggaacccagaacctgttaacttcgattgagtctgaaacagcagcttctgaggaaaccttgttcaacgcgtcccagcgcatcagcgagttagagaggaatgtggaagaacttaagcggaaagctgcccaaaactccggggaggcagaatatattgaaaaagtagtatatactgtgaagcaaagtgcagaagatgttaagaagactttagatggtgaacttgatgaaaagtataaaaaagtagaaaatttaattgccaaaaaaactgaagagtcagctgatgccagaaggaaagccgaaatgctacaaaatgaagcaaaaactcttttagctcaagcaaatagcaagctgcaactgctcaaagatttagaaagaaaatatgaagacaatcaaagatacttagaagataaagctcaagaattagcaagactggaaggagaagtccgttcactcctaaaggatataagccagaaagttgctgtgtatagcacatgcttgtaacagaggagaataaaaaatggctgaggtgaccaaggtaaaacaactacattttaaaaactgacttaatgctcttcaaaataaaacatcacctatttaatgtttttaatcacattttgtatggagttaaataaagtacagtgcttttgtatata

SEQ ID NO: 458082 - DNA, 6975 bp, Homo sapiens
  misc_feature (5952)..(5952): n is a, c, g, or t
  misc_feature (6002)..(6002): n is a, c, g, or t
gggacctggaagcgccccagccccgcagcgatcgcagattcggctttcaaacaaaagaggcgccccggggggtgggaccgggacctcacccggtcctcgcagagttgcggccgcccgccccttcagccccggctctccgtatgcgcatgagcagaggcgcctccctctgttcctcccaaggctaaactttctaattcccttctttgggctcgggggctcccggagcagggcgagagctcgcgtcgccggaaaggaagacgggaagaaagggcaggcggctcggcgggcgtcttctccactcctctgccgcgtccccgtggctgcagggagccggcatggggcttctccagttgctagctttcagtttcttagccctgtgcagagcccgagtgcgcgctcaggaacccgagttcagctacggctgcgcagaaggcagctgctatcccgccacgggcgaccttctcatcggccgagcacagaagctttcggtgacctcgacgtgcgggctgcacaagcccgaaccctactgtatcgtcagccacttgcaggaggacaaaaaatgcttcatatgcaattcccaagatccttatcatgagaccctgaatcctgacagccatctcattgaaaatgtggtcactacatttgctccaaaccgccttaagatttggtggcaatctgaaaatggtgtggaaaatgtaactatccaactggatttggaagcagaattccattttactcatctcataatgactttcaagacattccgtccagctgctatgctgatagaacgatcgtccgactttgggaaaacctggggtgtgtatagatacttcgcctatgactgtgaggcctcgtttccaggcatttcaactggccccatgaaaaaagtcgatgacataatttgtgattctcgatattctgacattgaaccctcaactgaaggagaggtgatatttcgtgctttagatcctgctttcaaaatagaagatccttatagcccaaggatacagaatttattaaaaattaccaacttgagaatcaagtttgtgaaactgcatactttgggagataaccttctggattccaggatggaaatcagagaaaagtattattatgcagtttatgatatggtggttcgaggaaattgcttctgctatggtcatgccagcgaatgtgcccctgtggatggattcaatgaagaagtggaaggaatggttcacggacactgcatgtgcaggcataacaccaagggcttaaactgtgaactctgcatggatttctaccatgatttaccttggagacctgctgaaggccgaaacagcaacgcctgtaaaaaatgtaactgcaatgaacattccatctcttgtcactttgacatggctgtttacctggccacggggaacgtcagcggaggcgtgtgtgatgactgtcagcacaacaccatggggcgcaactgtgagcagtgcaagccgttttactaccagcacccagagagggacatccgagatcctaatttctgtgaacgatgtacgtgtgacccagctggctctcaaaatgagggaatttgtgacagctatactgatttttctactggtctcattgctggccagtgtcggtgtaaattaaatgtggaaggagaacattgtgatgtttgcaaagaaggcttctatgatttaagcagtgaagatccatttggttgtaaatcttgtgcttgcaatcctctgggaacaattcctggagggaatccttgtgattccgagacaggtcactgctactgcaagcgtctggtgacaggacagcattgtgaccagtgcctgccagagcactggggcttaagcaatgatttggatggatgtcgaccatgtgactgtgaccttgggggagccttaaacaacagttgctttgcggagtcaggccagtgctcatgccggcctcacatgattggacgtcagtgcaacgaagtggaacctggttactactttgccaccctggatcactacctctatgaagcggaggaagccaacttggggcctggggttagcatagtggagcggcaatatatccaggaccggattccctcctggactggagccggcttcgtccgagtgcctgaaggggcttatttggagtttttcattgacaacataccatattccatggagtacgacatcctaattcgctacgagccacagctacccgaccactgggaaaaagctgtcatcacagtgcagcgacctggaaggattccaaccagcagccgatgtggtaataccatccccgatgatgacaaccaggtggtgtcattatcaccaggctcaagatatgtcgtccttcctcggccggtgtgctttgagaagggaacaaactacacggtgaggttggagctgcctcagtacacctcctctgatagcgacgtggagagcccctacacgctgatcgattctcttgttctcatgccatactgtaaatcactggacatcttcaccgtgggaggttcaggagatggggtggtcaccaacagtgcctgggaaacctttcagagataccgatgtctagagaacagcagaagcgttgtgaaaacaccgatgacagatgtttgcagaaacatcatctttagcatttctgccctgttacaccagacaggcctggcttgtgaatgcgaccctcagggttcgttaagttccgtgtgtgatcccaacggaggccagtgccagtgccggcccaacgtggttggaagaacctgcaacagatgtgcacctggaacttttggctttggccccagtggatgcaaaccttgtgagtgccatctgcaaggatctgtcaatgccttctgcaatcccgtcactggccagtgccactgtttccagggagtgtatgctcggcagtgtgatcggtgcttacctgggcactggggctttccaagttgccagccctgccagtgcaatggccacgccgatgactgcgacccagtgactggggagtgcttgaactgccaggactacaccatgggtcataactgtgaaaggtgcttggctggttactatggcgaccccatcattgggtcaggagatcactgccgcccttgcccttgcccagatggtcccgacagtggacgccagtttgccaggagctgctaccaagatcctgttactttacagcttgcctgtgtttgtgatcctggatacattggttccagatgtgacgactgtgcctcaggatactttggcaatccatcagaagttggggggtcgtgtcagccttgccagtgtcacaacaacattgacacgacagacccagaagcctgtgacaaggagactgggaggtgtctcaagtgcctgtaccacacggaaggggaacactgtcagttctgccggtttggatactatggtgatgccctccggcaggactgtcgaaagtgtgtctgtaattacctgggcaccgtgcaagagcactgtaacggctctgactgccagtgcgacaaagccactggtcagtgcttgtgtcttcctaatgtgatcgggcagaactgtgaccgctgtgcgcccaatacctggcagctggccagtggcactggctgtgacccatgcaactgcaatgctgctcattccttcgggccatcttgcaatgagttcacggggcagtgccagtgcatgcctgggtttggaggccgcacctgcagcgagtgccaggaactcttctggggagaccccgacgtggagtgccgagcctgtgactgtgaccccaggggcattgagacgccacagtgtgaccagtccacgggccagtgtgtctgcgttgagggtgttgagggtccacgctgtgacaagtgcacgcgagggtactcgggggtcttccctgactgcacaccctgccaccagtgctttgctctctgggatgtgatcattgccgagctgaccaacaggacacacagattcctggagaaagccaaggccttgaagatcagtggtgtgatcgggccttaccgtgagactgtggactcggtggagaggaaagtcagcgagataaaagacatcctggcgcagagccccgcagcagagccactgaaaaacattgggaatctctttgaggaagcagagaaactgattaaagatgttacagaaatgatggctcaagtagaagtgaaattatctgacacaacttcccaaagcaacagcacagccaaagaactggattctctacagacagaagccgaaagcctagacaacactgtgaaagaacttgctgaacaactggaatttatcaaaaactcagatattcggggtgccttggatagcattaccaagtatttccagatgtctcttgaggcagaggagagggtgaatgcctccaccacagaacccaacagcactgtggagcagtcagccctcatgagagacagagtagaagacgtgatgatggagcgagaatcccagttcaaggaaaaacaagaggagcaggctcgcctccttgatgaactggcaggcaagctacaaagcctagacctttcagccgctgccgaaatgacctgtggaacacccccaggggcctcctgttccgagactgaatgtggcgggccaaactgcagaactgacgaaggagagaggaagtgtggggggcctggctgtggtggtctggttactgttgcacacaacgcctggcagaaagccatggacttggaccaagatgtcctgagtgccctggctgaagtggaacagctctccaagatggtctctgaagcaaaactgagggcagatgaggcaaaacaaagtgctgaagacattctgttgaagacaaatgctaccaaagaaaaaatggacaagagcaatgaggagctgagaaatctaatcaagcaaatcagaaactttttgacccaggatagtgctgatttggacagcattgaagcagttgctaatgaagtattgaaaatggagatgcctagcaccccacagcagttacagaacttgacagaagatatacgtgaacgagttgaaagcctttctcaagtagaggttattcttcagcatagtgctgctgacattgccagagctgagatgttgttagaagaagctaaaagagcaagcaaaagtgcaacagatgttaaagtcactgcagatatggtaaaggaagctctggaagaagcagaaaaggcccaggtcgcagcagagaaggcaattaaacaagcagatgaagacattcaaggaacccagaacctgttaacttcgattgagtctgaaacagcagcttctgaggaaaccttgttcaacgcgtcccagcgcatcagcgagttagagaggaatgtggaagaacttaagcggaaagctgcccaaaactccggggaggcagaatatattgaaaaagtagtatatactgtgaagcaaagtgcagaagatgttaagaagactttagatggtgaacttgatgaaaagtataaaaaagtagaaaatttaattgccaaaaaaactgaagagtcagctgatgccagaaggaaagccgaaatgctacaaaatgaagcaaaaactcttttagctcaagcaaatagcaagctgcaactgctcaaagatttagaaagaaaatatgaagacaatcaaagatacttagaagataaagctcaagaattagcaagactggaaggagaagtccgttcactcctaaaggatataagccagaaagttgctgtgtatagcacatgcttgtaacagaggagaataaaaaatggctgaggtgaccaaggtaaaacaactacattttaaaaactgacttaatgctcttcaaaataaaacatcacctatttaatgtttttaatcacattttgtatggagttaaataaagtacagtgcttttgtatataaaaaaaaaaaaaaaaaaaaaaaaaaaaaaaaaaaaaaaaaaaaaaaaaaaaaaaaaaaaaaaaaaaaaaaaaaaaaaaaaaaaaaaaaaaaaaaaaacaaaaanaaaaaaaaaaaacaaaaaaaaaaaaaaaacacaaacaaacaaaaaaaaanaaaaaaaaaaaaaggggggggggcccgcaaaatcccccggggggggcgccacaagcagaccagaccaccacaatttattgaaaaaaaggagagcgccaaaaagagagacgacctaatatataaaaacgacggagaggagacgaggaacaaaacaaagacgaaagacaggagaaaaagaagacaagaagagaggcgacatccgagagaagaagaaaacaaacaaaagggggggaggagggaaaaaaacatatcgagccaaacaacaaccaaaagagagaaataataagaccacaacgacagagacaaaaacaaaacaaaacaacacggagcaaacacagaaggtgaaacaaaaaacacagaaacaataaacgaagacgccgaagaaaagaaaagagcaagagcaccagcaccaggcgcgagatcaaccgatcaaacagcacacaacaaccactatccaccaccagcgggggcgggcctaataaccgaacaagacacaagcaacacgaccgaacaacacaccacgccacaaccccacgccgcaaaaacacaacagaccacaacaacacgaccacaccggaccacgacaaaacaaaaaacaaacagcaaagaaaaagggaagacgagaaggagaggggaaagagaaggaacaggaacgagagagcaaaagagaaaacagggaaagcaagaggaagacaaaaagagagaagagaaagatagaaaacacagacaaaaagggaaaaggaaagaagacgaaaaagagaaaaggaagagcgccacagcgaccacacgaggaggcagcgggaggagaaacgacgacaagagacagaggagaaagaaaaaaccaaaacaaagaccggccaacacggccaaagcggcgaaaaaaggaagaagcagaaggagaacaagaggaaacagaagagaggagaggcgggaagaacggccgagaagaagaaagacgggaggaaggaaacgc

SEQ ID NO: 458083 - DNA, 6922 bp, Homo sapiens
  misc_feature (5899)..(5899): n is a, c, g, or t
  misc_feature (5949)..(5949): n is a, c, g, or t
gggacctggaagcgccccagccccgcagcgatcgcagattcggctttcaaacaaaagaggcgccccggggggtgggaccgggacctcacccggtcctcgcagagttgcggccgcccgccccttcagccccggctctccgtatgcgcatgagcagaggcgcctccctctgttcctcccaaggctaaactttctaattcccttctttgggctcgggggctcccggagcagggcgagagctcgcgtcgccggaaaggaagacgggaagaaagggcaggcggctcggcgggcgtcttctccactcctctgccgcgtccccgtggctgcagggagccggcatggggcttctccagttgctagctttcagtttcttagccctgtgcagagcccgagtgcgcgctcaggaacccgagttcagctacggctgcgcagaaggcagctgctatcccgccacgggcgaccttctcatcggccgagcacagaagctttcggtgacctcgacgtgcgggctgcacaagcccgaaccctactgtatcgtcagccacttgcaggaggacaaaaaatgcttcatatgcaattcccaagatccttatcatgagaccctgaatcctgacagccatctcattgaaaatgtggtcactacatttgctccaaaccgccttaagatttggtggcaatctgaaaatggtgtggaaaatgtaactatccaactggatttggaagcagaattccattttactcatctcataatgactttcaagacattccgtccagctgctatgctgatagaacgatcgtccgactttgggaaaacctggggtgtgtatagatacttcgcctatgactgtgaggcctcgtttccaggcatttcaactggccccatgaaaaaagtcgatgacataatttgtgattctcgatattctgacattgaaccctcaactgaaggagaggtgatatttcgtgctttagatcctgctttcaaaatagaagatccttatagcccaaggatacagaatttattaaaaattaccaacttgagaatcaagtttgtgaaactgcatactttgggagataaccttctggattccaggatggaaatcagagaaaagtattattatgcagtttatgatatggtggttcgaggaaattgcttctgctatggtcatgccagcgaatgtgcccctgtggatggattcaatgaagaagtggaaggaatggttcacggacactgcatgtgcaggcataacaccaagggcttaaactgtgaactctgcatggatttctaccatgatttaccttggagacctgctgaaggccgaaacagcaacgcctgtaaaaaatgtaactgcaatgaacattccatctcttgtcactttgacatggctgtttacctggccacggggaacgtcagcggaggcgtgtgtgatgactgtcagcacaacaccatggggcgcaactgtgagcagtgcaagccgttttactaccagcacccagagagggacatccgagatcctaatttctgtgaacgatgtacgtgtgacccagctggctctcaaaatgagggaatttgtgacagctatactgatttttctactggtctcattgctggccagtgtcggtgtaaattaaatgtggaaggagaacattgtgatgtttgcaaagaaggcttctatgatttaagcagtgaagatccatttggttgtaaatcttgtgcttgcaatcctctgggaacaattcctggagggaatccttgtgattccgagacaggtcactgctactgcaagcgtctggtgacaggacagcattgtgaccagtgcctgccagagcactggggcttaagcaatgatttggatggatgtcgaccatgtgactgtgaccttgggggagccttaaacaacagttgctttgcggagtcaggccagtgctcatgccggcctcacatgattggacgtcagtgcaacgaagtggaacctggttactactttgccaccctggatcactacctctatgaagcggaggaagccaacttggggcctggggttagcatagtggagcggcaatatatccaggaccggattccctcctggactggagccggcttcgtccgagtgcctgaaggggcttatttggagtttttcattgacaacataccatattccatggagtacgacatcctaattcgctacgagccacagctacccgaccactgggaaaaagctgtcatcacagtgcagcgacctggaaggattccaaccagcagccgatgtggtaataccatccccgatgatgacaaccaggtggtgtcattatcaccaggctcaagatatgtcgtccttcctcggccggtgtgctttgagaagggaacaaactacacggtgaggttggagctgcctcagtacacctcctctgatagcgacgtggagagcccctacacgctgatcgattctcttgttctcatgccatactgtaaatcactggacatcttcaccgtgggaggttcaggagatggggtggtcaccaacagtgcctgggaaacctttcagagataccgatgtctagagaacagcagaagcgttgtgaaaacaccgatgacagatgtttgcagaaacatcatctttagcatttctgccctgttacaccagacaggcctggcttgtgaatgcgaccctcagggttcgttaagttccgtgtgtgatcccaacggaggccagtgccagtgccggcccaacgtggttggaagaacctgcaacagatgtgcacctggaacttttggctttggccccagtggatgcaaaccttgtgagtgccatctgcaaggatctgtcaatgccttctgcaatcccgtcactggccagtgccactgtttccagggagtgtatgctcggcagtgtgatcggtgcttacctgggcactggggctttccaagttgccagccctgccagtgcaatggccacgccgatgactgcgacccagtgactggggagtgcttgaactgccaggactacaccatgggtcataactgtgaaaggtgcttggctggttactatggcgaccccatcattgggtcaggagatcactgccgcccttgcccttgcccagatggtcccgacagtggacgccagtttgccaggagctgctaccaagatcctgttactttacagcttgcctgtgtttgtgatcctggatacattggttccagatgtgacgactgtgcctcaggatactttggcaatccatcagaagttggggggtcgtgtcagccttgccagtgtcacaacaacattgacacgacagacccagaagcctgtgacaaggagactgggaggtgtctcaagtgcctgtaccacacggaaggggaacactgtcagttctgccggtttggatactatggtgatgccctccggcaggactgtcgaaagtgtgtctgtaattacctgggcaccgtgcaagagcactgtaacggctctgactgccagtgcgacaaagccactggtcagtgcttgtgtcttcctaatgtgatcgggcagaactgtgaccgctgtgcgcccaatacctggcagctggccagtggcactggctgtgacccatgcaactgcaatgctgctcattccttcgggccatcttgcaatgagttcacggggcagtgccagtgcatgcctgggtttggaggccgcacctgcagcgagtgccaggaactcttctggggagaccccgacgtggagtgccgagcctgtgactgtgaccccaggggcattgagacgccacagtgtgaccagtccacgggccagtgtgtctgcgttgagggtgttgagggtccacgctgtgacaagtgcacgcgagggtactcgggggtcttccctgactgcacaccctgccaccagtgctttgctctctgggatgtgatcattgccgagctgaccaacaggacacacagattcctggagaaagccaaggccttgaagatcagtggtgtgatcgggccttaccgtgagactgtggactcggtggagaggaaagtcagcgagataaaagacatcctggcgcagagccccgcagcagagccactgaaaaacattgggaatctctttgaggaagcagagaaactgattaaagatgttacagaaatgatggctcaagtagaagtgaaattatctgacacaacttcccaaagcaacagcacagccaaagaactggattctctacagacagaagccgaaagcctagacaacactgtgaaagaacttgctgaacaactggaatttatcaaaaactcagatattcggggtgccttggatagcattaccaagtatttccagatgtctcttgaggcagaggagagggtgaatgcctccaccacagaacccaacagcactgtggagcagtcagccctcatgagagacagagtagaagacgtgatgatggagcgagaatcccagttcaaggaaaaacaagaggagcaggctcgcctccttgatgaactggcaggcaagctacaaagcctagacctttcagccgctgccgaaatgacctgtggaacacccccaggggcctcctgttccgagactgaatgtggcgggccaaactgcagaactgacgaaggagagaggaagtgtggggggcctggctgtggtggtctggttactgttgcacacaacgcctggcagaaagccatggacttggaccaagatgtcctgagtgccctggctgaagtggaacagctctccaagatggtctctgaagcaaaactgagggcagatgaggcaaaacaaagtgctgaagacattctgttgaagacaaatgctaccaaagaaaaaatggacaagagcaatgaggagctgagaaatctaatcaagcaaatcagaaactttttgacccaggatagtgctgatttggacagcattgaagcagttgctaatgaagtattgaaaatggagatgcctagcaccccacagcagttacagaacttgacagaagatatacgtgaacgagttgaaagcctttctcaagtagaggttattcttcagcatagtgctgctgacattgccagagctgagatgttgttagaagaagctaaaagagcaagcaaaagtgcaacagatgttaaagtcactgcagatatggtaaaggaagctctggaagaagcagaaaaggcccaggtcgcagcagagaaggcaattaaacaagcagatgaagacattcaaggaacccagaacctgttaacttcgattgagtctgaaacagcagcttctgaggaaaccttgttcaacgcgtcccagcgcatcagcgagttagagaggaatgtggaagaacttaagcggaaagctgcccaaaactccggggaggcagaatatattgaaaaagtagtatatactgtgaagcaaagtgcagaagatgttaagaagactttagatggtgaacttgatgaaaagtataaaaaagtagaaaatttaattgccaaaaaaactgaagagtcagctgatgccagaaggaaagccgaaatgctacaaaatgaagcaaaaactcttttagctcaagcaaatagcaagctgcaactgctcaaagatttagaaagaaaatatgaagacaatcaaagatacttagaagataaagctcaagaattagcaagactggaaggagaagtccgttcactcctaaaggatataagccagaaagttgctgtgtatagcacatgcttgtaacagaggagaataaaaaatggctgaggtgaccaaggtaaaacaactacattttaaaaactgacttaatgctcttcaaaataaaacatcacctatttaatgtttttaatcacattttgtatggagttaaataaagtacagtgcttttgtatataaaaaaaaaaaaaaaaaaaaaaaaaaaaaaaaaaaaaaaaaaaaacaaaaanaaaaaaaaaaaacaaaaaaaaaaaaaaaacacaaacaaacaaaaaaaaanaaaaaaaaaaaaaggggggggggcccgcaaaatcccccggggggggcgccacaagcagaccagaccaccacaatttattgaaaaaaaggagagcgccaaaaagagagacgacctaatatataaaaacgacggagaggagacgaggaacaaaacaaagacgaaagacaggagaaaaagaagacaagaagagaggcgacatccgagagaagaagaaaacaaacaaaagggggggaggagggaaaaaaacatatcgagccaaacaacaaccaaaagagagaaataataagaccacaacgacagagacaaaaacaaaacaaaacaacacggagcaaacacagaaggtgaaacaaaaaacacagaaacaataaacgaagacgccgaagaaaagaaaagagcaagagcaccagcaccaggcgcgagatcaaccgatcaaacagcacacaacaaccactatccaccaccagcgggggcgggcctaataaccgaacaagacacaagcaacacgaccgaacaacacaccacgccacaaccccacgccgcaaaaacacaacagaccacaacaacacgaccacaccggaccacgacaaaacaaaaaacaaacagcaaagaaaaagggaagacgagaaggagaggggaaagagaaggaacaggaacgagagagcaaaagagaaaacagggaaagcaagaggaagacaaaaagagagaagagaaagatagaaaacacagacaaaaagggaaaaggaaagaagacgaaaaagagaaaaggaagagcgccacagcgaccacacgaggaggcagcgggaggagaaacgacgacaagagacagaggagaaagaaaaaaccaaaacaaagaccggccaacacggccaaagcggcgaaaaaaggaagaagcagaaggagaacaagaggaaacagaagagaggagaggcgggaagaacggccgagaagaagaaagacgggaggaaggaaacgc

SEQ ID NO: 458084 - DNA, 2097 bp, Homo sapiens
gactcagctacagcgagttcagaccatgtaccagggagcaagccaggagaccggtgagggtccacgctgtgacaagtgcacgcgagggtactcgggggtcttccctgactgcacaccctgccaccagtgctttgctctctgggatgtgatcattgccgagctgaccaacaggacacacagattcctggagaaagccaaggccttgaagatcagtggtgtgatcgggccttaccgtgagactgtggactcggtggagaggaaagtcagcgagataaaagacatcctggcgcagagccccgcagcagagccactgaaaaacattgggaatctctttgaggaagcagagaaactgattaaagatgttacagaaatgatggctcaagtagaagtgaaattatctgacacaacttcccaaagcaacagcacagccaaagaactggattctctacagacagaagccgaaagcctagacaacactgtgaaagaacttgctgaacaactggaatttatcaaaaactcagatattcggggtgccttggatagcattaccaagtatttccagatgtctcttgaggcagaggagagggtgaatgcctccaccacagaacccaacagcactgtggagcagtcagccctcatgagagacagagtagaagacgtgatgatggagcgagaatcccagttcaaggaaaaacaagaggagcaggctcgcctccttgatgaactggcaggcaagctacaaagcctagacctttcagccgctgccgaaatgacctgtggaacacccccaggggcctcctgttccgagactgaatgtggcgggccaaactgcagaactgacgaaggagagaggaagtgtggggggcctggctgtggtggtctggttactgttgcacacaacgcctggcagaaagccatggacttggaccaagatgtcctgagtgccctggctgaagtggaacagctctccaagatggtctctgaagcaaaactgagggcagatgaggcaaaacaaagtgctgaagacattctgttgaagacaaatgctaccaaagaaaaaatggacaagagcaatgaggagctgagaaatctaatcaagcaaatcagaaactttttgacccaggatagtgctgatttggacagcattgaagcagttgctaatgaagtattgaaaatggagatgcctagcaccccacagcagttacagaacttgacagaagatatacgtgaacgagttgaaagcctttctcaagtagaggttattcttcagcatagtgctgctgacattgccagagctgagatgttgttagaagaagctaaaagagcaagcaaaagtgcaacagatgttaaagtcactgcagatatggtaaaggaagctctggaagaagcagaaaaggcccaggtcgcagcagagaaggcaattaaacaagcagatgaagacattcaaggaacccagaacctgttaacttcgattgagtctgaaacagcagcttctgaggaaaccttgttcaacgcgtcccagcgcatcagcgagttagagaggaatgtggaagaacttaagcggaaagctgcccaaaactccggggaggcagaatatattgaaaaagtagtatatactgtgaagcaaagtgcagaagatgttaagaagactttagatggtgaacttgatgaaaagtataaaaaagtagaaaatttaattgccaaaaaaactgaagagtcagctgatgccagaaggaaagccgaaatgctacaaaatgaagcaaaaactcttttagctcaagcaaatagcaagctgcaactgctcaaagatttagaaagaaaatatgaagacaatcaaagatacttagaagataaagctcaagaattagcaagactggaaggagaagtccgttcactcctaaaggatataagccagaaagttgctgtgtatagcacatgcttgtaacagaggagaataaaaaatggctgaggtgaccaaggtaaaacaactacattttaaaaactgacttaatgctcttcaaaataaaacatcacctatttaatgtttttaatcacattttgtatggagttaaataaagtacagtgcttttgtatata

SEQ ID NO: 458085 - DNA, 6054 bp, Homo sapiens
gggacctggaagcgccccagccccgcagcgatcgcagattcggctttcaaacaaaagaggcgccccggggggtgggaccgggacctcacccggtcctcgcagagttgcggccgcccgccccttcagccccggctctccgtatgcgcatgagcagaggcgcctccctctgttcctcccaaggctaaactttctaattcccttctttgggctcgggggctcccggagcagggcgagagctcgcgtcgccggaaaggaagacgggaagaaagggcaggcggctcggcgggcgtcttctccactcctctgccgcgtccccgtggctgcagggagccggcatggggcttctccagttgctagctttcagtttcttagccctgtgcagagcccgagtgcgcgctcaggaacccgagttcagctacggctgcgcagaaggcagctgctatcccgccacgggcgaccttctcatcggccgagcacagaagctttcggtgacctcgacgtgcgggctgcacaagcccgaaccctactgtatcgtcagccacttgcaggaggacaaaaaatgcttcatatgcaattcccaagatccttatcatgagaccctgaatcctgacagccatctcattgaaaatgtggtcactacatttgctccaaaccgccttaagatttggtggcaatctgaaaatggtgtggaaaatgtaactatccaactggatttggaagcagaattccattttactcatctcataatgactttcaagacattccgtccagctgctatgctgatagaacgatcgtccgactttgggaaaacctggggtgtgtatagatacttcgcctatgactgtgaggcctcgtttccaggcatttcaactggccccatgaaaaaagtcgatgacataatttgtgattctcgatattctgacattgaaccctcaactgaaggagaggtgatatttcgtgctttagatcctgctttcaaaatagaagatccttatagcccaaggatacagaatttattaaaaattaccaacttgagaatcaagtttgtgaaactgcatactttgggagataaccttctggattccaggatggaaatcagagaaaagtattattatgcagtttatgatatggtggttcgaggaaattgcttctgctatggtcatgccagcgaatgtgcccctgtggatggattcaatgaagaagtggaaggaatggttcacggacactgcatgtgcaggcataacaccaagggcttaaactgtgaactctgcatggatttctaccatgatttaccttggagacctgctgaaggccgaaacagcaacgcctgtaaaaaatgtaactgcaatgaacattccatctcttgtcactttgacatggctgtttacctggccacggggaacgtcagcggaggcgtgtgtgatgactgtcagcacaacaccatggggcgcaactgtgagcagtgcaagccgttttactaccagcacccagagagggacatccgagatcctaatttctgtgaacgatgtacgtgtgacccagctggctctcaaaatgagggaatttgtgacagctatactgatttttctactggtctcattgctggccagtgtcggtgtaaattaaatgtggaaggagaacattgtgatgtttgcaaagaaggcttctatgatttaagcagtgaagatccatttggttgtaaatcttgtgcttgcaatcctctgggaacaattcctggagggaatccttgtgattccgagacaggtcactgctactgcaagcgtctggtgacaggacagcattgtgaccagtgcctgccagagcactggggcttaagcaatgatttggatggatgtcgaccatgtgactgtgaccttgggggagccttaaacaacagttgctttgcggagtcaggccagtgctcatgccggcctcacatgattggacgtcagtgcaacgaagtggaacctggttactactttgccaccctggatcactacctctatgaagcggaggaagccaacttggggcctggggttagcatagtggagcggcaatatatccaggaccggattccctcctggactggagccggcttcgtccgagtgcctgaaggggcttatttggagtttttcattgacaacataccatattccatggagtacgacatcctaattcgctacgagccacagctacccgaccactgggaaaaagctgtcatcacagtgcagcgacctggaaggattccaaccagcagccgatgtggtaataccatccccgatgatgacaaccaggtggtgtcattatcaccaggctcaagatatgtcgtccttcctcggccggtgtgctttgagaagggaacaaactacacggtgaggttggagctgcctcagtacacctcctctgatagcgacgtggagagcccctacacgctgatcgattctcttgttctcatgccatactgtaaatcactggacatcttcaccgtgggaggttcaggagatggggtggtcaccaacagtgcctgggaaacctttcagagataccgatgtctagagaacagcagaagcgttgtgaaaacaccgatgacagatgtttgcagaaacatcatctttagcatttctgccctgttacaccagacaggcctggcttgtgaatgcgaccctcagggttcgttaagttccgtgtgtgatcccaacggaggccagtgccagtgccggcccaacgtggttggaagaacctgcaacagatgtgcacctggaacttttggctttggccccagtggatgcaaaccttgtgagtgccatctgcaaggatctgtcaatgccttctgcaatcccgtcactggccagtgccactgtttccagggagtgtatgctcggcagtgtgatcggtgcttacctgggcactggggctttccaagttgccagccctgccagtgcaatggccacgccgatgactgcgacccagtgactggggagtgcttgaactgccaggactacaccatgggtcataactgtgaaaggtgcttggctggttactatggcgaccccatcattgggtcaggagatcactgccgcccttgcccttgcccagatggtcccgacagtggacgccagtttgccaggagctgctaccaagatcctgttactttacagcttgcctgtgtttgtgatcctggatacattggttccagatgtgacgactgtgcctcaggatactttggcaatccatcagaagttggggggtcgtgtcagccttgccagtgtcacaacaacattgacacgacagacccagaagcctgtgacaaggagactgggaggtgtctcaagtgcctgtaccacacggaaggggaacactgtcagttctgccggtttggatactatggtgatgccctccggcaggactgtcgaaagtgtgtctgtaattacctgggcaccgtgcaagagcactgtaacggctctgactgccagtgcgacaaagccactggtcagtgcttgtgtcttcctaatgtgatcgggcagaactgtgaccgctgtgcgcccaatacctggcagctggccagtggcactggctgtgacccatgcaactgcaatgctgctcattccttcgggccatcttgcaatgagttcacggggcagtgccagtgcatgcctgggtttggaggccgcacctgcagcgagtgccaggaactcttctggggagaccccgacgtggagtgccgagcctgtgactgtgaccccaggggcattgagacgccacagtgtgaccagtccacgggccagtgtgtctgcgttgagggtgttgagggtccacgctgtgacaagtgcacgcgagggtactcgggggtcttccctgactgcacaccctgccaccagtgctttgctctctgggatgtgatcattgccgagctgaccaacaggacacacagattcctggagaaagccaaggccttgaagatcagtggtgtgatcgggccttaccgtgagactgtggactcggtggagaggaaagtcagcgagataaaagacatcctggcgcagagccccgcagcagagccactgaaaaacattgggaatctctttgaggaagcagagaaactgattaaagatgttacagaaatgatggctcaagtagaagtgaaattatctgacacaacttcccaaagcaacagcacagccaaagaactggattctctacagacagaagccgaaagcctagacaacactgtgaaagaacttgctgaacaactggaatttatcaaaaactcagatattcggggtgccttggatagcattaccaagtatttccagatgtctcttgaggcagaggagagggtgaatgcctccaccacagaacccaacagcactgtggagcagtcagccctcatgagagacagagtagaagacgtgatgatggagcgagaatcccagttcaaggaaaaacaagaggagcaggctcgcctccttgatgaactggcaggcaagctacaaagcctagacctttcagccgctgccgaaatgacctgtggaacacccccaggggcctcctgttccgagactgaatgtggcgggccaaactgcagaactgacgaaggagagaggaagtgtggggggcctggctgtggtggtctggttactgttgcacacaacgcctggcagaaagccatggacttggaccaagatgtcctgagtgccctggctgaagtggaacagctctccaagatggtctctgaagcaaaactgagggcagatgaggcaaaacaaagtgctgaagacattctgttgaagacaaatgctaccaaagaaaaaatggacaagagcaatgaggagctgagaaatctaatcaagcaaatcagaaactttttgacccaggatagtgctgatttggacagcattgaagcagttgctaatgaagtattgaaaatggagatgcctagcaccccacagcagttacagaacttgacagaagatatacgtgaacgagttgaaagcctttctcaagtagaggttattcttcagcatagtgctgctgacattgccagagctgagatgttgttagaagaagctaaaagagcaaggtatctaaagacatggcatctaaggggcttattttgtgtatctatcatggagtaaaaagtatctctttaaccaatgaaacttctaagaaggacctatgcgagtctctctgggtcatttcaggaaggctattctttaaagaaaagaacactgagagtacttttttcatgttcagcaacaatatactgtctcattattttttactcagcaaaagtgcaacagatgttaaagtcactgcagatatggtaaaggaagctctggaagaagcagaaaaggcccaggtcgcagcagagaaggcaattaaacaagcagatgaagacattcaaggaacccagaacctgttaacttcgattgagtctgaaacagcagcttctgaggaaaccttgttcaacgcgtcccagcgcatcagcgagttagagaggaatgtggaagaacttaagcggaaagctgcccaaaactccggggaggcagaatatattgaaaaagtagtatatactgtgaagcaaagtgcagaagatgttaagaagactttagatggtgaacttgatgaaaagtataaaaaagtagaaaatttaattgccaaaaaaactgaagagtcagctgatgccagaaggaaagccgaaatgctacaaaatgaagcaaaaactcttttagctcaagcaaatagcaagctgcaactgctcaaagatttagaaagaaaatatgaagacaatcaaagatacttagaagataaagctcaagaattagcaagactggaaggagaagtccgttcactcctaaaggatataagccagaaagttgctgtgtatagcacatgcttgtaacagaggagaataaaaaatggctgaggtgaccaaggtaaaacaactacattttaaaaactgacttaatgctcttcaaaataaaacatcacctatttaatgtttttaatcacattttgtatggagttaaataaagtacagtgcttttgtatata

SEQ ID NO: 458086 - DNA, 5311 bp, Homo sapiens
gggacctggaagcgccccagccccgcagcgatcgcagattcggctttcaaacaaaagaggcgccccggggggtgggaccgggacctcacccggtcctcgcagagttgcggccgcccgccccttcagccccggctctccgtatgcgcatgagcagaggcgcctccctctgttcctcccaaggctaaactttctaattcccttctttgggctcgggggctcccggagcagggcgagagctcgcgtcgccggaaaggaagacgggaagaaagggcaggcggctcggcgggcgtcttctccactcctctgccgcgtccccgtggctgcagggagccggcatggggcttctccagttgctagctttcagtttcttagccctgtgcagagcccgagtgcgcgctcaggaacccgagttcagctacggctgcgcagaaggcagctgctatcccgccacgggcgaccttctcatcggccgagcacagaagctttcggtgacctcgacgtgcgggctgcacaagcccgaaccctactgtatcgtcagccacttgcaggaggacaaaaaatgcttcatatgcaattcccaagatccttatcatgagaccctgaatcctgacagccatctcattgaaaatgtggtcactacatttgctccaaaccgccttaagatttggtggcaatctgaaaatggtgtggaaaatgtaactatccaactggatttggaagcagaattccattttactcatctcataatgactttcaagacattccgtccagctgctatgctgatagaacgatcgtccgactttgggaaaacctggggtgtgtatagatacttcgcctatgactgtgaggcctcgtttccaggcatttcaactggccccatgaaaaaagtcgatgacataatttgtgattctcgatattctgacattgaaccctcaactgaaggagaggtgatatttcgtgctttagatcctgctttcaaaatagaagatccttatagcccaaggatacagaatttattaaaaattaccaacttgagaatcaagtttgtgaaactgcatactttgggagataaccttctggattccaggatggaaatcagagaaaagtattattatgcagtttatgatatggtggttcgaggaaattgcttctgctatggtcatgccagcgaatgtgcccctgtggatggattcaatgaagaagtggaaggaatggttcacggacactgcatgtgcaggcataacaccaagggcttaaactgtgaactctgcatggatttctaccatgatttaccttggagacctgctgaaggccgaaacagcaacgcctgtaaaaaatgtaactgcaatgaacattccatctcttgtcactttgacatggctgtttacctggccacggggaacgtcagcggaggcgtgtgtgatgactgtcagcacaacaccatggggcgcaactgtgagcagtgcaagccgttttactaccagcacccagagagggacatccgagatcctaatttctgtgaacgatgtacgtgtgacccagctggctctcaaaatgagggaatttgtgacagctatactgatttttctactggtctcattgctggccagtgtcggtgtaaattaaatgtggaaggagaacattgtgatgtttgcaaagaaggcttctatgatttaagcagtgaagatccatttggttgtaaatcttgtgcttgcaatcctctgggaacaattcctggagggaatccttgtgattccgagacaggtcactgctactgcaagcgtctggtgacaggacagcattgtgaccagtgcctgccagagcactggggcttaagcaatgatttggatggatgtcgaccatgtgactgtgaccttgggggagccttaaacaacagttgctttgcggagtcaggccagtgctcatgccggcctcacatgattggacgtcagtgcaacgaagtggaacctggttactactttgccaccctggatcactacctctatgaagcggaggaagccaacttggggcctggggttagcatagtggagcggcaatatatccaggaccggattccctcctggactggagccggcttcgtccgagtgcctgaaggggcttatttggagtttttcattgacaacataccatattccatggagtacgacatcctaattcgctacgagccacagctacccgaccactgggaaaaagctgtcatcacagtgcagcgacctggaaggattccaaccagcagccgatgtggtaataccatccccgatgatgacaaccaggtggtgtcattatcaccaggctcaagatatgtcgtccttcctcggccggtgtgctttgagaagggaacaaactacacggtgaggttggagctgcctcagtacacctcctctgatagcgacgtggagagcccctacacgctgatcgattctcttgttctcatgccatactgtaaatcactggacatcttcaccgtgggaggttcaggagatggggtggtcaccaacagtgcctgggaaacctttcagagataccgatgtctagagaacagcagaagcgttgtgaaaacaccgatgacagatgtttgcagaaacatcatctttagcatttctgccctgttacaccagacaggcctggcttgtgaatgcgaccctcagggttcgttaagttccgtgtgtgatcccaacggaggccagtgccagtgccggcccaacgtggttggaagaacctgcaacagatgtgcacctggaacttttggctttggccccagtggatgcaaaccttgtgagtgccatctgcaaggatctgtcaatgccttctgcaatcccgtcactggccagtgccactgtttccagggagtgtatgctcggcagtgtgatcggtgcttacctgggcactggggctttccaagttgccagccctgccagtgcaatggccacgccgatgactgcgacccagtgactggggagtgcttgaactgccaggactacaccatgggtcataactgtgaaaggtgcttggctggttactatggcgaccccatcattgggtcaggagatcactgccgcccttgcccttgcccagatggtcccgacagtggacgccagtttgccaggagctgctaccaagatcctgttactttacagcttgcctgtgtttgtgatcctggatacattggttccagatgtgacgactgtgcctcaggatactttggcaatccatcagaagttggggggtcgtgtcagccttgccagtgtcacaacaacattgacacgacagacccagaagcctgtgacaaggagactgggaggtgtctcaagtgcctgtaccacacggaaggggaacactgtcagttctgccggtttggatactatggtgatgccctccggcaggactgtcgaaagtgtgtctgtaattacctgggcaccgtgcaagagcactgtaacggctctgactgccagtgcgacaaagccactggtcagtgcttgtgtcttcctaatgtgatcgggcagaactgtgaccgctgtgcgcccaatacctggcagctggccagtggcactggctgtgacccatgcaactgcaatgctgctcattccttcgggccatcttgcaatgagttcacggggcagtgccagtgcatgcctgggtttggaggccgcacctgcagcgagtgccaggaactcttctggggagaccccgacgtggagtgccgagcctgtgactgtgaccccaggggcattgagacgccacagtgtgaccagtccacgggccagtgtgtctgcgttgagggtgttgagggtccacgctgtgacaagtgcacgcgagggtactcgggggtcttccctgactgcacaccctgccaccagtgctttgctctctgggatgtgatcattgccgagctgaccaacaggacacacagattcctggagaaagccaaggccttgaagatcagtggtgtgatcgggccttaccgtgagactgtggactcggtggagaggaaagtcagcgagataaaagacatcctggcgcagagccccgcagcagagccactgaaaaacattgggaatctctttgaggaagcagagaaactgattaaagatgttacagaaatgatggctcaagtagaagtgaaattatctgacacaacttcccaaagcaacagcacagccaaagaactggattctctacagacagaagccgaaagcctagacaacactgtgaaagaacttgctgaacaactggaatttatcaaaaactcagatattcggggtgccttggatagcattaccaagtatttccagatgtctcttgaggcagaggagagggtgaatgcctccaccacagaacccaacagcactgtggagcagtcagccctcatgagagacagagtagaagacgtgatgatggagcgagaatcccagttcaaggaaaaacaagaggagcaggctcgcctccttgatgaactggcaggcaagctacaaagcctagacctttcagccgctgccgaaatgacctgtggaacacccccaggggcctcctgttccgagactgaatgtggcgggccaaactgcagaactgacgaaggagagaggaagtgtggggggcctggctgtggtggtctggttactgttgcacacaacgcctggcagaaagccatggacttggaccaagatgtcctgagtgccctggctgaagtggaacagctctccaagatggtctctgaagcaaaactgagggcagatgaggcaaaacaaagtgctgaagacattctgttgaagacaaatgctaccaaagaaaaaatggacaagagcaatgaggagctgagaaatctaatcaagcaaatcagaaactttttgacccaggatagtgctgatttggacagcattgaagcagttgctaatgaagtattgaaaatggagatgcctagcaccccacagcagttacagaacttgacagaagatatacgtgaacgagttgaaagcctttctcaagtagaggttattcttcagcatagtgctgctgacattgccagagctgagatgttgttagaagaagctaaaagagcaagcaaaagtgcaacagatgttaaagtcactgcagatatggtaaaggaagctctggaagaagcagaaaaggcccaggtcgcagcagagaaggcaattaaacaagcagatgaagacattcaaggaacccagaacctgttaacttcgattgagtctgaaacagcagcttctgaggaaaccttgttcaacgcgtcccagcgcatcagcgagagctgcaggtaccggctcgattctaa

SEQ ID NO: 458087 - DNA, 5640 bp, Homo sapiens
gggacctggaagcgccccagccccgcagcgatcgcagattcggctttcaaacaaaagaggcgccccggggggtgggaccgggacctcacccggtcctcgcagagttgcggccgcccgccccttcagccccggctctccgtatgcgcatgagcagaggcgcctccctctgttcctcccaaggctaaactttctaattcccttctttgggctcgggggctcccggagcagggcgagagctcgcgtcgccggaaaggaagacgggaagaaagggcaggcggctcggcgggcgtcttctccactcctctgccgcgtccccgtggctgcagggagccggcatggggcttctccagttgctagctttcagtttcttagccctgtgcagagcccgagtgcgcgctcaggaacccgagttcagctacggctgcgcagaaggcagctgctatcccgccacgggcgaccttctcatcggccgagcacagaagctttcggtgacctcgacgtgcgggctgcacaagcccgaaccctactgtatcgtcagccacttgcaggaggacaaaaaatgcttcatatgcaattcccaagatccttatcatgagaccctgaatcctgacagccatctcattgaaaatgtggtcactacatttgctccaaaccgccttaagatttggtggcaatctgaaaatggtgtggaaaatgtaactatccaactggatttggaagcagaattccattttactcatctcataatgactttcaagacattccgtccagctgctatgctgatagaacgatcgtccgactttgggaaaacctggggtgtgtatagatacttcgcctatgactgtgaggcctcgtttccaggcatttcaactggccccatgaaaaaagtcgatgacataatttgtgattctcgatattctgacattgaaccctcaactgaaggagaggtgatatttcgtgctttagatcctgctttcaaaatagaagatccttatagcccaaggatacagaatttattaaaaattaccaacttgagaatcaagtttgtgaaactgcatactttgggagataaccttctggattccaggatggaaatcagagaaaagtattattatgcagtttatgatatggtggttcgaggaaattgcttctgctatggtcatgccagcgaatgtgcccctgtggatggattcaatgaagaagtggaaggaatggttcacggacactgcatgtgcaggcataacaccaagggcttaaactgtgaactctgcatggatttctaccatgatttaccttggagacctgctgaaggccgaaacagcaacgcctgtaaaaaatgtaactgcaatgaacattccatctcttgtcactttgacatggctgtttacctggccacggggaacgtcagcggaggcgtgtgtgatgactgtcagcacaacaccatggggcgcaactgtgagcagtgcaagccgttttactaccagcacccagagagggacatccgagatcctaatttctgtgaacgatgtacgtgtgacccagctggctctcaaaatgagggaatttgtgacagctatactgatttttctactggtctcattgctggccagtgtcggtgtaaattaaatgtggaaggagaacattgtgatgtttgcaaagaaggcttctatgatttaagcagtgaagatccatttggttgtaaatcttgtgcttgcaatcctctgggaacaattcctggagggaatccttgtgattccgagacaggtcactgctactgcaagcgtctggtgacaggacagcattgtgaccagtgcctgccagagcactggggcttaagcaatgatttggatggatgtcgaccatgtgactgtgaccttgggggagccttaaacaacagttgctttgcggagtcaggccagtgctcatgccggcctcacatgattggacgtcagtgcaacgaagtggaacctggttactactttgccaccctggatcactacctctatgaagcggaggaagccaacttggggcctggggttagcatagtggagcggcaatatatccaggaccggattccctcctggactggagccggcttcgtccgagtgcctgaaggggcttatttggagtttttcattgacaacataccatattccatggagtacgacatcctaattcgctacgagccacagctacccgaccactgggaaaaagctgtcatcacagtgcagcgacctggaaggattccaaccagcagccgatgtggtaataccatccccgatgatgacaaccaggtggtgtcattatcaccaggctcaagatatgtcgtccttcctcggccggtgtgctttgagaagggaacaaactacacggtgaggttggagctgcctcagtacacctcctctgatagcgacgtggagagcccctacacgctgatcgattctcttgttctcatgccatactgtaaatcactggacatcttcaccgtgggaggttcaggagatggggtggtcaccaacagtgcctgggaaacctttcagagataccgatgtctagagaacagcagaagcgttgtgaaaacaccgatgacagatgtttgcagaaacatcatctttagcatttctgccctgttacaccagacaggcctggcttgtgaatgcgaccctcagggttcgttaagttccgtgtgtgatcccaacggaggccagtgccagtgccggcccaacgtggttggaagaacctgcaacagatgtgcacctggaacttttggctttggccccagtggatgcaaaccttgtgagtgccatctgcaaggatctgtcaatgccttctgcaatcccgtcactggccagtgccactgtttccagggagtgtatgctcggcagtgtgatcggtgcttacctgggcactggggctttccaagttgccagccctgccagtgcaatggccacgccgatgactgcgacccagtgactggggagtgcttgaactgccaggactacaccatgggtcataactgtgaaaggtgcttggctggttactatggcgaccccatcattgggtcaggagatcactgccgcccttgcccttgcccagatggtcccgacagtggacgccagtttgccaggagctgctaccaagatcctgttactttacagcttgcctgtgtttgtgatcctggatacattggttccagatgtgacgactgtgcctcaggatactttggcaatccatcagaagttggggggtcgtgtcagccttgccagtgtcacaacaacattgacacgacagacccagaagcctgtgacaaggagactgggaggtgtctcaagtgcctgtaccacacggaaggggaacactgtcagttctgccggtttggatactatggtgatgccctccggcaggactgtcgaaagtgtgtctgtaattacctgggcaccgtgcaagagcactgtaacggctctgactgccagtgcgacaaagccactggtcagtgcttgtgtcttcctaatgtgatcgggcagaactgtgaccgctgtgcgcccaatacctggcagctggccagtggcactggctgtgacccatgcaactgcaatgctgctcattccttcgggccatcttgcaatgagttcacggggcagtgccagtgcatgcctgggtttggaggccgcacctgcagcgagtgccaggaactcttctggggagaccccgacgtggagtgccgagcctgtgactgtgaccccaggggcattgagacgccacagtgtgaccagtccacgggccagtgtgtctgcgttgagggtgttgagggtccacgctgtgacaagtgcacgcgagggtactcgggggtcttccctgactgcacaccctgccaccagtgctttgctctctgggatgtgatcattgccgagctgaccaacaggacacacagattcctggagaaagccaaggccttgaagatcagtggtgtgatcgggccttaccgtgagactgtggactcggtggagaggaaagtcagcgagataaaagacatcctggcgcagagccccgcagcagagccactgaaaaacattgggaatctctttgaggaagcagagaaactgattaaagatgttacagaaatgatggctcaagtagaagtgaaattatctgacacaacttcccaaagcaacagcacagccaaagaactggattctctacagacagaagccgaaagcctagacaacactgtgaaagaacttgctgaacaactggaatttatcaaaaactcagatattcggggtgccttggatagcattaccaagtatttccagatgtctcttgaggcagaggagagggtgaatgcctccaccacagaacccaacagcactgtggagcagtcagccctcatgagagacagagtagaagacgtgatgatggagcgagaatcccagttcaaggaaaaacaagaggagcaggctcgcctccttgatgaactggcaggcaagctacaaagcctagacctttcagccgctgccgaaatgacctgtggaacacccccaggggcctcctgttccgagactgaatgtggcgggccaaactgcagaactgacgaaggagagaggaagtgtggggggcctggctgtggtggtctggttactgttgcacacaacgcctggcagaaagccatggacttggaccaagatgtcctgagtgccctggctgaagtggaacagctctccaagatggtctctgaagcaaaactgagggcagatgaggcaaaacaaagtgctgaagacattctgttgaagacaaatgctaccaaagaaaaaatggacaagagcaatgaggagctgagaaatctaatcaagcaaatcagaaactttttgaccccaaaagtgcaacagatgttaaagtcactgcagatatggtaaaggaagctctggaagaagcagaaaaggcccaggtcgcagcagagaaggcaattaaacaagcagatgaagacattcaaggaacccagaacctgttaacttcgattgagtctgaaacagcagcttctgaggaaaccttgttcaacgcgtcccagcgcatcagcgagttagagaggaatgtggaagaacttaagcggaaagctgcccaaaactccggggaggcagaatatattgaaaaagtagtatatactgtgaagcaaagtgcagaagatgttaagaagactttagatggtgaacttgatgaaaagtataaaaaagtagaaaatttaattgccaaaaaaactgaagagtcagctgatgccagaaggaaagccgaaatgctacaaaatgaagcaaaaactcttttagctcaagcaaatagcaagctgcaactgctcaaagatttagaaagaaaatatgaagacaatcaaagatacttagaagataaagctcaagaattagcaagactggaaggagaagtccgttcactcctaaaggatataagccagaaagttgctgtgtatagcacatgcttgtaacagaggagaataaaaaatggctgaggtgaccaaggtaaaacaactacattttaaaaactgacttaatgctcttcaaaataaaacatcacctatttaatgtttttaatcacattttgtatggagttaaataaagtacagtgcttttgtatata

SEQ ID NO: 458088 - DNA, 5173 bp, Homo sapiens
gggacctggaagcgccccagccccgcagcgatcgcagattcggctttcaaacaaaagaggcgccccggggggtgggaccgggacctcacccggtcctcgcagagttgcggccgcccgccccttcagccccggctctccgtatgcgcatgagcagaggcgcctccctctgttcctcccaaggctaaactttctaattcccttctttgggctcgggggctcccggagcagggcgagagctcgcgtcgccggaaaggaagacgggaagaaagggcaggcggctcggcgggcgtcttctccactcctctgccgcgtccccgtggctgcagggagccggcatggggcttctccagttgctagctttcagtttcttagccctgtgcagagcccgagtgcgcgctcaggaacccgagttcagctacggctgcgcagaaggcagctgctatcccgccacgggcgaccttctcatcggccgagcacagaagctttcggtgacctcgacgtgcgggctgcacaagcccgaaccctactgtatcgtcagccacttgcaggaggacaaaaaatgcttcatatgcaattcccaagatccttatcatgagaccctgaatcctgacagccatctcattgaaaatgtggtcactacatttgctccaaaccgccttaagatttggtggcaatctgaaaatggtgtggaaaatgtaactatccaactggatttggaagcagaattccattttactcatctcataatgactttcaagacattccgtccagctgctatgctgatagaacgatcgtccgactttgggaaaacctggggtgtgtatagatacttcgcctatgactgtgaggcctcgtttccaggcatttcaactggccccatgaaaaaagtcgatgacataatttgtgattctcgatattctgacattgaaccctcaactgaaggagaggtgatatttcgtgctttagatcctgctttcaaaatagaagatccttatagcccaaggatacagaatttattaaaaattaccaacttgagaatcaagtttgtgaaactgcatactttgggagataaccttctggattccaggatggaaatcagagaaaagtattattatgcagtttatgatatggtggttcgaggaaattgcttctgctatggtcatgccagcgaatgtgcccctgtggatggattcaatgaagaagtggaaggaatggttcacggacactgcatgtgcaggcataacaccaagggcttaaactgtgaactctgcatggatttctaccatgatttaccttggagacctgctgaaggccgaaacagcaacgcctgtaaaaaatgtaactgcaatgaacattccatctcttgtcactttgacatggctgtttacctggccacggggaacgtcagcggaggcgtgtgtgatgactgtcagcacaacaccatggggcgcaactgtgagcagtgcaagccgttttactaccagcacccagagagggacatccgagatcctaatttctgtgaacgatgtacgtgtgacccagctggctctcaaaatgagggaatttgtgacagctatactgatttttctactggtctcattgctggccagtgtcggtgtaaattaaatgtggaaggagaacattgtgatgtttgcaaagaaggcttctatgatttaagcagtgaagatccatttggttgtaaatcttgtgcttgcaatcctctgggaacaattcctggagggaatccttgtgattccgagacaggtcactgctactgcaagcgtctggtgacaggacagcattgtgaccagtgcctgccagagcactggggcttaagcaatgatttggatggatgtcgaccatgtgactgtgaccttgggggagccttaaacaacagttgctttgcggagtcaggccagtgctcatgccggcctcacatgattggacgtcagtgcaacgaagtggaacctggttactactttgccaccctggatcactacctctatgaagcggaggaagccaacttggggcctggggttagcatagtggagcggcaatatatccaggaccggattccctcctggactggagccggcttcgtccgagtgcctgaaggggcttatttggagtttttcattgacaacataccatattccatggagtacgacatcctaattcgctacgagccacagctacccgaccactgggaaaaagctgtcatcacagtgcagcgacctggaaggattccaaccagcagccgatgtggtaataccatccccgatgatgacaaccaggtggtgtcattatcaccaggctcaagatatgtcgtccttcctcggccggtgtgctttgagaagggaacaaactacacggtgaggttggagctgcctcagtacacctcctctgatagcgacgtggagagcccctacacgctgatcgattctcttgttctcatgccatactgtaaatcactggacatcttcaccgtgggaggttcaggagatggggtggtcaccaacagtgcctgggaaacctttcagagataccgatgtctagagaacagcagaagcgttgtgaaaacaccgatgacagatgtttgcagaaacatcatctttagcatttctgccctgttacaccagacaggcctggcttgtgaatgcgaccctcagggttcgttaagttccgtgtgtgatcccaacggaggccagtgccagtgccggcccaacgtggttggaagaacctgcaacagatgtgcacctggaacttttggctttggccccagtggatgcaaaccttgtgagtgccatctgcaaggatctgtcaatgccttctgcaatcccgtcactggccagtgccactgtttccagggagtgtatgctcggcagtgtgatcggtgcttacctgggcactggggctttccaagttgccagccctgccagtgcaatggccacgccgatgactgcgacccagtgactggggagtgcttgaactgccaggactacaccatgggtcataactgtgaaaggtgcttggctggttactatggcgaccccatcattgggtcaggagatcactgccgcccttgcccttgcccagatggtcccgacagtggacgccagtttgccaggagctgctaccaagatcctgttactttacagcttgcctgtgtttgtgatcctggatacattggttccagatgtgacgactgtgcctcaggatactttggcaatccatcagaagttggggggtcgtgtcagccttgccagtgtcacaacaacattgacacgacagacccagaagcctgtgacaaggagactgggaggtgtctcaagtgcctgtaccacacggaaggggaacactgtcagttctgccggtttggatactatggtgatgccctccggcaggactgtcgaaagtgtgtctgtaattacctgggcaccgtgcaagagcactgtaacggctctgactgccagtgcgacaaagccactggtcagtgcttgtgtcttcctaatgtgatcgggcagaactgtgaccgctgtgcgcccaatacctggcagctggccagtggcactggctgtgacccatgcaactgcaatgctgctcattccttcgggccatcttgcaatgagttcacggggcagtgccagtgcatgcctgggtttggaggccgcacctgcagcgagtgccaggaactcttctggggagaccccgacgtggagtgccgagcctgtgactgtgaccccaggggcattgagacgccacagtgtgaccagtccacgggccagtgtgtctgcgttgagggtgttgagggtccacgctgtgacaagtgcacgcgagggtactcgggggtcttccctgactgcacaccctgccaccagtgctttgctctctgggatgtgatcattgccgagctgaccaacaggacacacagattcctggagaaagccaaggccttgaagatcagtggtgtgatcgggccttaccgtgagactgtggactcggtggagaggaaagtcagcgagataaaagacatcctggcgcagagccccgcagcagagccactgaaaaacattgggaatctctttgaggaagcagagaaactgattaaagatgttacagaaatgatggctcaagtagaagtgaaattatctgacacaacttcccaaagcaacagcacagccaaagaactggattctctacagacagaagccgaaagcctagacaacactgtgaaagaacttgctgaacaactggaatttatcaaaaactcagatattcggggtgccttggatagcattaccaagtatttccagatgtctcttgaggcagaggagagggtgaatgcctccaccacagaacccaacagcactgtggagcagtcagccctcatgagagacagagtagaagacgtgatgatggagcgagaatcccagttcaaggaaaaacaagaggagcaggctcgcctccttgatgaactggcaggcaagctacaaagcctagacctttcagccgctgccgaaatgacctgtggaacacccccaggggcctcctgttccgagactgaatgtggcgggccaaactgcagaactgacgaaggagagaggaagtgtggggggcctggctgtggtggtctggttactgttgcacacaacgcctggcagaaagccatggacttggaccaagatgtcctgagtgccctggctgaagtggaacagctctccaagatggtctctgaagcaaaactgagggcagatgaggcaaaacaaagtgctgaagacattctgttgaagacaaatgctaccaaagaaaaaatggacaagagcaatgaggagctgagaaatctaatcaagcaaatcagaaactttttgacccaggatagtgctgatttggacagcattgaagcagttgctaatgaagtattgaaaatggagatgcctagcaccccacagcagttacagaacttgacagaagatatacgtgaacgagttgaaagcctttctcaagtagaggttattcttcagcatagtgctgctgacattgccagagctgagatgttgttagaagaagctaaaagagcaagcaaagtgcacagatgtaaagtctcctccagatatgatacaggtagctctggcagaagcaggaagcatggcagacagcaggaatcaggttttga

SEQ ID NO: 458089 - DNA, 1504 bp, Homo sapiens
tcgagctcggtaccccgccatttacaactatctcaaatctccatatctgcattcacaagtttctgagctattcgtccaacctcaattaaaagatttcattgcctttaagtctcagctttaagctctggccctctatggttttccacaatgttcagattcactctgctatactttcccgtaacatactctgccgttcctgtctccccatctggaattgtcctttcttctttcaaattctattatcccttaaaatctgatcagctcctcatcttccacgaaggtttccctcactacccagcctaaaacaaattctagtagtactcaattgtctgcagttacttttttgtgtgtgtaggtctcatctcccctcaaaatcccagatagattataaactcttaaacaggaagttagtgtctcttggtgtgtaaccccaccatgctagtccatagtagatgaccagtaagtggttgaatgaatgaaccatctattcttttcacctctttttggggacatctttgcttttcacagaggatagtgctgatttggacagcattgaagcagttgctaatgaagtattgaaaatggagatgcctagcaccccacagcagttacagaacttgacagaagatatacgtgaacgagttgaaagcctttctcaagtagaggttattcttcagcatagtgctgctgacattgccagagctgagatgttgttagaagaagctaaaagagcaagcaaaagtgcaacagatgttaaagtcactgcagatatggtaaaggaagctctggaagaagcagaaaaggcccaggtcgcagcagagaaggcaattaaacaagcagatgaagacattcaaggaacccagaacctgttaacttcgattgagtctgaaacagcagcttctgaggaaaccttgttcaacgcgtcccagcgcatcagcgagttagagaggaatgtggaagaacttaagcggaaagctgcccaaaactccggggaggcagaatatattgaaaaagtagtatatactgtgaagcaaagtgcagaagatgttaagaagactttagatggtgaacttgatgaaaagtataaaaaagtagaaaatttaattgccaaaaaaactgaagagtcagctgatgccagaaggaaagccgaaatgctacaaaatgaagcaaaaactcttttagctcaagcaaatagcaagctgcaactgctcaaagatttagaaagaaaatatgaagacaatcaaagatacttagaagataaagctcaagaattagcaagactggaaggagaagtccgttcactcctaaaggatataagccagaaagttgctgtgtatagcacatgcttgtaacagaggagaataaaaaatggctgaggtgaccaaggtaaaacaactacattttaaaaactgacttaatgctcttcaaaataaaacatcacctatttaatgtttttaatcacattttgtatggagttaaataaagtacagtgcttttgtatata

SEQ ID NO: 458090 - DNA, 5601 bp, Homo sapiens
  misc_feature (4628)..(4628): n is a, c, g, or t
gggacctggaagcgccccagccccgcagcgatcgcagattcggctttcaaacaaaagaggcgccccggggggtgggaccgggacctcacccggtcctcgcagagttgcggccgcccgccccttcagccccggctctccgtatgcgcatgagcagaggcgcctccctctgttcctcccaaggctaaactttctaattcccttctttgggctcgggggctcccggagcagggcgagagctcgcgtcgccggaaaggaagacgggaagaaagggcaggcggctcggcgggcgtcttctccactcctctgccgcgtccccgtggctgcagggagccggcatggggcttctccagttgctagctttcagtttcttagccctgtgcagagcccgagtgcgcgctcaggaacccgagttcagctacggctgcgcagaaggcagctgctatcccgccacgggcgaccttctcatcggccgagcacagaagctttcggtgacctcgacgtgcgggctgcacaagcccgaaccctactgtatcgtcagccacttgcaggaggacaaaaaatgcttcatatgcaattcccaagatccttatcatgagaccctgaatcctgacagccatctcattgaaaatgtggtcactacatttgctccaaaccgccttaagatttggtggcaatctgaaaatggtgtggaaaatgtaactatccaactggatttggaagcagaattccattttactcatctcataatgactttcaagacattccgtccagctgctatgctgatagaacgatcgtccgactttgggaaaacctggggtgtgtatagatacttcgcctatgactgtgaggcctcgtttccaggcatttcaactggccccatgaaaaaagtcgatgacataatttgtgattctcgatattctgacattgaaccctcaactgaaggagaggtgatatttcgtgctttagatcctgctttcaaaatagaagatccttatagcccaaggatacagaatttattaaaaattaccaacttgagaatcaagtttgtgaaactgcatactttgggagataaccttctggattccaggatggaaatcagagaaaagtattattatgcagtttatgatatggtggttcgaggaaattgcttctgctatggtcatgccagcgaatgtgcccctgtggatggattcaatgaagaagtggaaggaatggttcacggacactgcatgtgcaggcataacaccaagggcttaaactgtgaactctgcatggatttctaccatgatttaccttggagacctgctgaaggccgaaacagcaacgcctgtaaaaaatgtaactgcaatgaacattccatctcttgtcactttgacatggctgtttacctggccacggggaacgtcagcggaggcgtgtgtgatgactgtcagcacaacaccatggggcgcaactgtgagcagtgcaagccgttttactaccagcacccagagagggacatccgagatcctaatttctgtgaacgatgtacgtgtgacccagctggctctcaaaatgagggaatttgtgacagctatactgatttttctactggtctcattgctggccagtgtcggtgtaaattaaatgtggaaggagaacattgtgatgtttgcaaagaaggcttctatgatttaagcagtgaagatccatttggttgtaaatcttgtgcttgcaatcctctgggaacaattcctggagggaatccttgtgattccgagacaggtcactgctactgcaagcgtctggtgacaggacagcattgtgaccagtgcctgccagagcactggggcttaagcaatgatttggatggatgtcgaccatgtgactgtgaccttgggggagccttaaacaacagttgctttgcggagtcaggccagtgctcatgccggcctcacatgattggacgtcagtgcaacgaagtggaacctggttactactttgccaccctggatcactacctctatgaagcggaggaagccaacttggggcctggggttagcatagtggagcggcaatatatccaggaccggattccctcctggactggagccggcttcgtccgagtgcctgaaggggcttatttggagtttttcattgacaacataccatattccatggagtacgacatcctaattcgctacgagccacagctacccgaccactgggaaaaagctgtcatcacagtgcagcgacctggaaggattccaaccagcagccgatgtggtaataccatccccgatgatgacaaccaggtggtgtcattatcaccaggctcaagatatgtcgtccttcctcggccggtgtgctttgagaagggaacaaactacacggtgaggttggagctgcctcagtacacctcctctgatagcgacgtggagagcccctacacgctgatcgattctcttgttctcatgccatactgtaaatcactggacatcttcaccgtgggaggttcaggagatggggtggtcaccaacagtgcctgggaaacctttcagagataccgatgtctagagaacagcagaagcgttgtgaaaacaccgatgacagatgtttgcagaaacatcatctttagcatttctgccctgttacaccagacaggcctggcttgtgaatgcgaccctcagggttcgttaagttccgtgtgtgatcccaacggaggccagtgccagtgccggcccaacgtggttggaagaacctgcaacagatgtgcacctggaacttttggctttggccccagtggatgcaaaccttgtgagtgccatctgcaaggatctgtcaatgccttctgcaatcccgtcactggccagtgccactgtttccagggagtgtatgctcggcagtgtgatcggtgcttacctgggcactggggctttccaagttgccagccctgccagtgcaatggccacgccgatgactgcgacccagtgactggggagtgcttgaactgccaggactacaccatgggtcataactgtgaaaggtgcttggctggttactatggcgaccccatcattgggtcaggagatcactgccgcccttgcccttgcccagatggtcccgacagtggacgccagtttgccaggagctgctaccaagatcctgttactttacagcttgcctgtgtttgtgatcctggatacattggttccagatgtgacgactgtgcctcaggatactttggcaatccatcagaagttggggggtcgtgtcagccttgccagtgtcacaacaacattgacacgacagacccagaagcctgtgacaaggagactgggaggtgtctcaagtgcctgtaccacacggaaggggaacactgtcagttctgccggtttggatactatggtgatgccctccggcaggactgtcgaaagtgtgtctgtaattacctgggcaccgtgcaagagcactgtaacggctctgactgccagtgcgacaaagccactggtcagtgcttgtgtcttcctaatgtgatcgggcagaactgtgaccgctgtgcgcccaatacctggcagctggccagtggcactggctgtgacccatgcaactgcaatgctgctcattccttcgggccatcttgcaatgagttcacggggcagtgccagtgcatgcctgggtttggaggccgcacctgcagcgagtgccaggaactcttctggggagaccccgacgtggagtgccgagcctgtgactgtgaccccaggggcattgagacgccacagtgtgaccagtccacgggccagtgtgtctgcgttgagggtgttgagggtccacgctgtgacaagtgcacgcgagggtactcgggggtcttccctgactgcacaccctgccaccagtgctttgctctctgggatgtgatcattgccgagctgaccaacaggacacacagattcctggagaaagccaaggccttgaagatcagtggtgtgatcgggccttaccgtgagactgtggactcggtggagaggaaagtcagcgagataaaagacatcctggcgcagagccccgcagcagagccactgaaaaacattgggaatctctttgaggaagcagagaaactgattaaagatgttacagaaatgatggctcaagtagaagtgaaattatctgacacaacttcccaaagcaacagcacagccaaagaactggattctctacagacagaagccgaaagcctagacaacactgtgaaagaacttgctgaacaactggaatttatcaaaaactcagatattcggggtgccttggatagcattaccaagtatttccagatgtctcttgaggcagaggagagggtgaatgcctccaccacagaacccaacagcactgtggagcagtcagccctcatgagagacagagtagaagacgtgatgatggagcgagaatcccagttcaaggaaaaacaagaggagcaggctcgcctccttgatgaactggcaggcaagctacaaagcctagacctttcagccgctgccgaaatggtaaggtttggggatgtggccttactgctatggtgccaagcaaaaaaaaaaaaaaaaaaaaaaaaaacaaaaaaaaaaaaaaaacacaaacaaacaaaaaaaaanaaaaaaaaaaaaaggggggggggcccgcaaaatcccccggggggggcgccacaagcagaccagaccaccacaatttattgaaaaaaaggagagcgccaaaaagagagacgacctaatatataaaaacgacggagaggagacgaggaacaaaacaaagacgaaagacaggagaaaaagaagacaagaagagaggcgacatccgagagaagaagaaaacaaacaaaagggggggaggagggaaaaaaacatatcgagccaaacaacaaccaaaagagagaaataataagaccacaacgacagagacaaaaacaaaacaaaacaacacggagcaaacacagaaggtgaaacaaaaaacacagaaacaataaacgaagacgccgaagaaaagaaaagagcaagagcaccagcaccaggcgcgagatcaaccgatcaaacagcacacaacaaccactatccaccaccagcgggggcgggcctaataaccgaacaagacacaagcaacacgaccgaacaacacaccacgccacaaccccacgccgcaaaaacacaacagaccacaacaacacgaccacaccggaccacgacaaaacaaaaaacaaacagcaaagaaaaagggaagacgagaaggagaggggaaagagaaggaacaggaacgagagagcaaaagagaaaacagggaaagcaagaggaagacaaaaagagagaagagaaagatagaaaacacagacaaaaagggaaaaggaaagaagacgaaaaagagaaaaggaagagcgccacagcgaccacacgaggaggcagcgggaggagaaacgacgacaagagacagaggagaaagaaaaaaccaaaacaaagaccggccaacacggccaaagcggcgaaaaaaggaagaagcagaaggagaacaagaggaaacagaagagaggagaggcgggaagaacggccgagaagaagaaagacgggaggaaggaaacgc

SEQ ID NO: 458091 - DNA, 4323 bp, Homo sapiens
gggacctggaagcgccccagccccgcagcgatcgcagattcggctttcaaacaaaagaggcgccccggggggtgggaccgggacctcacccggtcctcgcagagttgcggccgcccgccccttcagccccggctctccgtatgcgcatgagcagaggcgcctccctctgttcctcccaaggctaaactttctaattcccttctttgggctcgggggctcccggagcagggcgagagctcgcgtcgccggaaaggaagacgggaagaaagggcaggcggctcggcgggcgtcttctccactcctctgccgcgtccccgtggctgcagggagccggcatggggcttctccagttgctagctttcagtttcttagccctgtgcagagcccgagtgcgcgctcaggaacccgagttcagctacggctgcgcagaaggcagctgctatcccgccacgggcgaccttctcatcggccgagcacagaagctttcggtgacctcgacgtgcgggctgcacaagcccgaaccctactgtatcgtcagccacttgcaggaggacaaaaaatgcttcatatgcaattcccaagatccttatcatgagaccctgaatcctgacagccatctcattgaaaatgtggtcactacatttgctccaaaccgccttaagatttggtggcaatctgaaaatggtgtggaaaatgtaactatccaactggatttggaagcagaattccattttactcatctcataatgactttcaagacattccgtccagctgctatgctgatagaacgatcgtccgactttgggaaaacctggggtgtgtatagatacttcgcctatgactgtgaggcctcgtttccaggcatttcaactggccccatgaaaaaagtcgatgacataatttgtgattctcgatattctgacattgaaccctcaactgaaggagaggtgatatttcgtgctttagatcctgctttcaaaatagaagatccttatagcccaaggatacagaatttattaaaaattaccaacttgagaatcaagtttgtgaaactgcatactttgggagataaccttctggattccaggatggaaatcagagaaaagtattattatgcagtttatgatatggtggttcgaggaaattgcttctgctatggtcatgccagcgaatgtgcccctgtggatggattcaatgaagaagtggaaggaatggttcacggacactgcatgtgcaggcataacaccaagggcttaaactgtgaactctgcatggatttctaccatgatttaccttggagacctgctgaaggccgaaacagcaacgcctgtaaaaaatgtaactgcaatgaacattccatctcttgtcactttgacatggctgtttacctggccacggggaacgtcagcggaggcgtgtgtgatgactgtcagcacaacaccatggggcgcaactgtgagcagtgcaagccgttttactaccagcacccagagagggacatccgagatcctaatttctgtgaacgatgtacgtgtgacccagctggctctcaaaatgagggaatttgtgacagctatactgatttttctactggtctcattgctggccagtgtcggtgtaaattaaatgtggaaggagaacattgtgatgtttgcaaagaaggcttctatgatttaagcagtgaagatccatttggttgtaaatcttgtgcttgcaatcctctgggaacaattcctggagggaatccttgtgattccgagacaggtcactgctactgcaagcgtctggtgacaggacagcattgtgaccagtgcctgccagagcactggggcttaagcaatgatttggatggatgtcgaccatgtgactgtgaccttgggggagccttaaacaacagttgctttgcggagtcaggccagtgctcatgccggcctcacatgattggacgtcagtgcaacgaagtggaacctggttactactttgccaccctggatcactacctctatgaagcggaggaagccaacttggggcctggggttagcatagtggagcggcaatatatccaggaccggattccctcctggactggagccggcttcgtccgagtgcctgaaggggcttatttggagtttttcattgacaacataccatattccatggagtacgacatcctaattcgctacgagccacagctacccgaccactgggaaaaagctgtcatcacagtgcagcgacctggaaggattccaaccagcagccgatgtggtaataccatccccgatgatgacaaccaggtggtgtcattatcaccaggctcaagatatgtcgtccttcctcggccggtgtgctttgagaagggaacaaactacacggtgaggttggagctgcctcagtacacctcctctgatagcgacgtggagagcccctacacgctgatcgattctcttgttctcatgccatactgtaaatcactggacatcttcaccgtgggaggttcaggagatggggtggtcaccaacagtgcctgggaaacctttcagagataccgatgtctagagaacagcagaagcgttgtgaaaacaccgatgacagatgtttgcagaaacatcatctttagcatttctgccctgttacaccagacaggcctggcttgtgaatgcgaccctcagggttcgttaagttccgtgtgtgatcccaacggaggccagtgccagtgccggcccaacgtggttggaagaacctgcaacagatgtgcacctggaacttttggctttggccccagtggatgcaaaccttgtgagtgccatctgcaaggatctgtcaatgccttctgcaatcccgtcactggccagtgccactgtttccagggagtgtatgctcggcagtgtgatcggtgcttacctgggcactggggctttccaagttgccagccctgccagtgcaatggccacgccgatgactgcgacccagtgactggggagtgcttgaactgccaggactacaccatgggtcataactgtgaaaggtgcttggctggttactatggcgaccccatcattgggtcaggagatcactgccgcccttgcccttgcccagatggtcccgacagtggacgccagtttgccaggagctgctaccaagatcctgttactttacagcttgcctgtgtttgtgatcctggatacattggttccagatgtgacgactgtgcctcaggatactttggcaatccatcagaagttggggggtcgtgtcagccttgccagtgtcacaacaacattgacacgacagacccagaagcctgtgacaaggagactgggaggtgtctcaagtgcctgtaccacacggaaggggaacactgtcagttctgccggtttggatactatggtgatgccctccggcaggactgtcgaaagtgtgtctgtaattacctgggcaccgtgcaagagcactgtaacggctctgactgccagtgcgacaaagccactggtcagtgcttgtgtcttcctaatgtgatcgggcagaactgtgaccgctgtgcgcccaatacctggcagctggccagtggcactggctgtgacccatgcaactgcaatgctgctcattccttcgggccatcttgcaatgagttcacggggcagtgccagtgcatgcctgggtttggaggccgcacctgcagcgagtgccaggaactcttctggggagaccccgacgtggagtgccgagatgtggaagacgtgactcagtttcctgattacccagggtcacataacatgtgtggagaaggcaggatttaccacctcagtccgcagttcatgctcttaaccataatgctgtactcctcaaacctgccactcgagagcttggaatgtagggggagaacaaagacaataaaaagataaactagcaatacaaggcaggatgtggtgagggccaaatgaatgggccacaaacacacacctctgggttgaaaggatggtgatgttatagcagatctcaggaccctcagtataactggttctgggagatgttccattagaaagtttttcagaggaaggccgggcgcggtggctcacgcctgtaatcccagcacttcgggaggccaaggtgggcggatcacaaggtgaagagatggagaccatgctggccaacatggtgaaaccccgtctctactaaaaatacaaaaattagctgggcatggtggtgcatgcctgtagtcccagctatttaggaggcagaggcagaatagcttgaacccgggaagtggaggttgcagtgagccgagatcatgccactgcactccagcctgggagacagagtgag

SEQ ID NO: 458092 - DNA, 3784 bp, Homo sapiens
gggacctggaagcgccccagccccgcagcgatcgcagattcggctttcaaacaaaagaggcgccccggggggtgggaccgggacctcacccggtcctcgcagagttgcggccgcccgccccttcagccccggctctccgtatgcgcatgagcagaggcgcctccctctgttcctcccaaggctaaactttctaattcccttctttgggctcgggggctcccggagcagggcgagagctcgcgtcgccggaaaggaagacgggaagaaagggcaggcggctcggcgggcgtcttctccactcctctgccgcgtccccgtggctgcagggagccggcatggggcttctccagttgctagctttcagtttcttagccctgtgcagagcccgagtgcgcgctcaggaacccgagttcagctacggctgcgcagaaggcagctgctatcccgccacgggcgaccttctcatcggccgagcacagaagctttcggtgacctcgacgtgcgggctgcacaagcccgaaccctactgtatcgtcagccacttgcaggaggacaaaaaatgcttcatatgcaattcccaagatccttatcatgagaccctgaatcctgacagccatctcattgaaaatgtggtcactacatttgctccaaaccgccttaagatttggtggcaatctgaaaatggtgtggaaaatgtaactatccaactggatttggaagcagaattccattttactcatctcataatgactttcaagacattccgtccagctgctatgctgatagaacgatcgtccgactttgggaaaacctggggtgtgtatagatacttcgcctatgactgtgaggcctcgtttccaggcatttcaactggccccatgaaaaaagtcgatgacataatttgtgattctcgatattctgacattgaaccctcaactgaaggagaggtgatatttcgtgctttagatcctgctttcaaaatagaagatccttatagcccaaggatacagaatttattaaaaattaccaacttgagaatcaagtttgtgaaactgcatactttgggagataaccttctggattccaggatggaaatcagagaaaagtattattatgcagtttatgatatggtggttcgaggaaattgcttctgctatggtcatgccagcgaatgtgcccctgtggatggattcaatgaagaagtggaaggaatggttcacggacactgcatgtgcaggcataacaccaagggcttaaactgtgaactctgcatggatttctaccatgatttaccttggagacctgctgaaggccgaaacagcaacgcctgtaaaaaatgtaactgcaatgaacattccatctcttgtcactttgacatggctgtttacctggccacggggaacgtcagcggaggcgtgtgtgatgactgtcagcacaacaccatggggcgcaactgtgagcagtgcaagccgttttactaccagcacccagagagggacatccgagatcctaatttctgtgaacgatgtacgtgtgacccagctggctctcaaaatgagggaatttgtgacagctatactgatttttctactggtctcattgctggccagtgtcggtgtaaattaaatgtggaaggagaacattgtgatgtttgcaaagaaggcttctatgatttaagcagtgaagatccatttggttgtaaatcttgtgcttgcaatcctctgggaacaattcctggagggaatccttgtgattccgagacaggtcactgctactgcaagcgtctggtgacaggacagcattgtgaccagtgcctgccagagcactggggcttaagcaatgatttggatggatgtcgaccatgtgactgtgaccttgggggagccttaaacaacagttgctttgcggagtcaggccagtgctcatgccggcctcacatgattggacgtcagtgcaacgaagtggaacctggttactactttgccaccctggatcactacctctatgaagcggaggaagccaacttggggcctggggttagcatagtggagcggcaatatatccaggaccggattccctcctggactggagccggcttcgtccgagtgcctgaaggggcttatttggagtttttcattgacaacataccatattccatggagtacgacatcctaattcgctacgagccacagctacccgaccactgggaaaaagctgtcatcacagtgcagcgacctggaaggattccaaccagcagccgatgtggtaataccatccccgatgatgacaaccaggtggtgtcattatcaccaggctcaagatatgtcgtccttcctcggccggtgtgctttgagaagggaacaaactacacggtgaggttggagctgcctcagtacacctcctctgatagcgacgtggagagcccctacacgctgatcgattctcttgttctcatgccatactgtaaatcactggacatcttcaccgtgggaggttcaggagatggggtggtcaccaacagtgcctgggaaacctttcagagataccgatgtctagagaacagcagaagcgttgtgaaaacaccgatgacagatgtttgcagaaacatcatctttagcatttctgccctgttacaccagacaggcctggcttgtgaatgcgaccctcagggttcgttaagttccgtgtgtgatcccaacggaggccagtgccagtgccggcccaacgtggttggaagaacctgcaacagatgtgcacctggaacttttggctttggccccagtggatgcaaaccttgtgagtgccatctgcaaggatctgtcaatgccttctgcaatcccgtcactggccagtgccactgtttccagggagtgtatgctcggcagtgtgatcggtgcttacctgggcactggggctttccaagttgccagccctgccagtgcaatggccacgccgatgactgcgacccagtgactggggagtgcttgaactgccaggactacaccatgggtcataactgtgaaaggtgcttggctggttactatggcgaccccatcattgggtcaggagatcactgccgcccttgcccttttcacggggcagtgccagtgcatgcctgggtttggaggccgcacctgcagcgagtgccaggaactcttctggggagaccccgacgtggagtgccgagatgtggaagacgtgactcagtttcctgattacccagggtcacataacatgtgtggagaaggcaggatttaccacctcagtccgcagttcatgctcttaaccataatgctgtactcctcaaacctgccactcgagagcttggaatgtagggggagaacaaagacaataaaaagataaactagcaatacaaggcaggatgtggtgagggccaaatgaatgggccacaaacacacacctctgggttgaaaggatggtgatgttatagcagatctcaggaccctcagtataactggttctgggagatgttccattagaaagtttttcagaggaaggccgggcgcggtggctcacgcctgtaatcccagcacttcgggaggccaaggtgggcggatcacaaggtgaagagatggagaccatgctggccaacatggtgaaaccccgtctctactaaaaatacaaaaattagctgggcatggtggtgcatgcctgtagtcccagctatttaggaggcagaggcagaatagcttgaacccgggaagtggaggttgcagtgagccgagatcatgccactgcactccagcctgggagacagagtgag

SEQ ID NO: 458093 - DNA, 336 bp, Homo sapiens
agttgatcacaccaacccatgagcattctgaattggggacagggtgcttataaaaggagcatgtttccattgaatgagtttctcaaggcagttccttgtttgcctgtttctttagcttgtgagtgccatctgcaaggatctgtcaatgccttctgcaatcccgtcactggccagtgccactgtttccagggagtgtatgctcggcagtgtgatcggtgcttacctgggcactggggctttccaagttgccagccctgccagtgcaatggccacgccgatgactgcgacccagtgactggggagtgcttgaactgccaggactacaccatgggtcat

SEQ ID NO: 458094 - DNA, 2027 bp, Homo sapiens
ggaaacagagagagaacagaagaagagaaagctcagcaaattttcttgccatacttcatgacttcactgtggctaagtgtggggaccagacaggactcgtggagacatccaggtgctgaagccttcagctactgtctcagttttttgaagtttagcaatggcgtctttctctgctgagaccaattcaactgacctactctcacagccatggaatgagcccccagtaattctctccatggtcattctcagccttacttttttactgggattgccaggcaatgggctggtgctgtgggtggctggcctgaagatgcagcggacagtgaacacaatttggttcctccacctcaccttggcggacctcctctgctgcctctccttgcccttctcgctggctcacttggctctccagggacagtggccctacggcaggttcctatgcaagctcatcccctccatcattgtcctcaacatgtttgccagtgtcttcctgcttactgccattagcctggatcgctgtcttgtggtattcaagccaatctggtgtcagaatcatcgcaatgtagggatggcctgctctatctgtggatgtatctgggtggtggcttttgtgatgtgcattcctgtgttcgtgtaccgggaaatcttcactacagacaaccataatagatgtggctacaaatttggtctctccagctcattagattatccagacttttatggagatccactagaaaacaggtctcttgaaaacattgttcagccgcctggagaaatgaatgataggttagatccttcctctttccaaacaaatgatcatccttggacagtccccactgtcttccaacctcaaacatttcaaagaccttctgcagattcactccctaggggttctgctaggttaacaagtcaaaatctgtattctaatgtatttaaacctgctgatgtggtctcacctaaaatccccagtgggtttcctattgaagatcacgaaaccagcccactggataactctgatgcttttctctctactcatttaaagctgttccctagcgcttctagcaattccttctacgagtctgagctaccacaaggtttccaggattattacaatttaggccaattcacagatgacgatcaagtgccaacacccctcgtggcaataacgatcactaggctagtggtgggtttcctgctgccctctgttatcatgatagcctgttacagcttcattgtcttccgaatgcaaaggggccgcttcgccaagtctcagagcaaaacctttcgagtggccgtggtggtggtggctgtctttcttgtctgctggactccataccacatttttggagtcctgtcattgcttactgacccagaaactcccttggggaaaactctgatgtcctgggatcatgtatgcattgctctagcatctgccaatagttgctttaatcccttcctttatgccctcttggggaaagattttaggaagaaagcaaggcagtccattcagggaattctggaggcagccttcagtgaggagctcacacgttccacccactgtccctcaaacaatgtcatttcagaaagaaatagtacaactgtgtgaaaatgtggagcagccaacaagcaggggctcttaggcaatcacatagtgaaagtttataagaggatgaagtgatatggtgagcagcggacttcaaaaactgtcaaagaatcaatccagcggttctcaaacggtacacagactattgacatcagcatcacctagaaacttgttagaaatgcaaattctcaagccgcatcccagacttgctgaatcggaatctctgggggttgggacccagcaagggcacttaacaaaccctcgtttctgattaatgctaaatgtaagaatcattgtaaacattagttctatttctatcccaaactaagctatgtgaaataagagaagctactttgtttttaaatgatgttgaatatttgtcgatatttccatcattaaatttttccttagcattgtctaagtc

SEQ ID NO: 458095 - DNA, 755 bp, Homo sapiens
ggaaacagagagagaacagaagaagagaaagctcagcaaattttcttgccatacttcatgacttcactgtggctaagtgtggggaccagacaggactcgtggagacatccaggtgctgaagccttcagctactgtctcagttttttgaagtttagcaatggcgtctttctctgctgagaccaattcaactgacctactctcacagccatggaatgagcccccagtaattctctccatggtcattctcagccttacttttttactgggattgccaggcaatgggctggtgctgtgggtggctggcctgaagatgcagcggacagtgaacacaatttggttcctccacctcaccttggcggacctcctctgctgcctctccttgcccttctcgctggctcacttggctctccagggacagtggccctacggcaggttcctatgcaagctcatcccctccatcattgtcctcaacatgtttgccagtgtcttcctgcttactgccattagcctggatcgctgtcttgtggtattcaagccaatctggtgtcagaatcatcgcaatgtagggatggcctgctctatctgtggatgtatctgggtggtggcttttgtgatgtgcattcctgtgttcgtgtaccgggaaatctcctaagagagccttatgattggctccaattgggactcaggcctaattaccacgttttgggtccctaacaggtctgtacatttgcccgggaaataaaggaaaccactca

SEQ ID NO: 458096 - DNA, 1410 bp, Homo sapiens
ggaaacagagagagaacagaagaagagaaagctcagcaaattttcttgccatacttcatgacttcactgtggctaagtgtggggaccagacaggactcgtggagacatccaggtgctgaagccttcagctactgtctcagttttttgaagtttagcaatggcgtctttctctgctgagaccaattcaactgacctactctcacagccatggaatgagcccccagtaattctctccatggtcattctcagccttacttttttactgggattgccaggcaatgggctggtgctgtgggtggctggcctgaagatgcagcggacagtgaacacaatttggttcctccacctcaccttggcggacctcctctgctgcctctccttgcccttctcgctggctcacttggctctccagggacagtggccctacggcaggttcctatgcaagctcatcccctccatcattgtcctcaacatgtttgccagtgtcttcctgcttactgccattagcctggatcgctgtcttgtggtattcaagccaatctggtgtcagaatcatcgcaatgtagggatggcctgctctatctgtggatgtatctgggtggtggcttttgtgatgtgcattcctgtgttcgtgtaccgggaaatcttcactacagacaaccataatagatgtggctacaaatttggtctctccagctcattagattatccagacttttatggagatccactagaaaacaggtctcttgaaaacattgttcagccgcctggagaaatgaatgataggttagatccttcctctttccaaacaaatgatcatccttggacagtccccactgtcttccaacctcaaacatttcaaagaccttctgcagattcactccctaggggttctgctaggttaacaagtcaaaatctgtattctaatgtatttaaacctgctgatgtggtctcacctaaaatccccagtgggtttcctattgaagatcacgaaaccagcccactggataactctgatgcttttctctctactcatttaaagctgttccctagcgcttctagcaattccttctacgagtctgagctaccacaaggtttccaggattattacaatttaggccaattcacagatgacgatcaagtgccaacacccctcgtggcaataacgatcactaggctagtggtgggtttcctgctgccctctgttatcatgatagcctgttacagcttcattgtcttccgaatgcaaaggggccgcttcgccaagtctcagagcaaaacctttcgagtggccgtggtggtggtggcacttgagtcgtactctgtgaattggcctacctcgtaataatcctggaaaccttgtggtagctcagactcgtagaaggaattgctgaagcgccagaggaaatg

SEQ ID NO: 458097 - DNA, 2098 bp, Homo sapiens
ggaaacagagagagaacagaagaagagaaagctcagcaaattttcttgccatacttcatgacttcactgtggctaagtgtggggaccagacaggactcgtggagacatccaggtgctgaagccttcagctactgtctcagttttttgaagtttagcaatggcgtctttctctgctgagaccaattcaactgacctactctcacagccatggaatgagcccccagtaattctctccatggtcattctcagccttacttttttactgggattgccaggcaatgggctggtgctgtgggtggctggcctgaagatgcagcggacagtgaacacaatttggttcctccacctcaccttggcggacctcctctgctgcctctccttgcccttctcgctggctcacttggctctccagggacagtggccctacggcaggttcctatgcaagctcatcccctccatcattgtcctcaacatgtttgccagtgtcttcctgcttactgccattagcctggatcgctgtcttgtggtattcaagccaatctggtgtcagaatcatcgcaatgtagggatggcctgctctatctgtggatgtatctgggtggtggcttttgtgatgtgcattcctgtgttcgtgtaccgggaaatcttcactacagacaaccataatagatgtggctacaaatttggtctctccagctcattagattatccagacttttatggagatccactagaaaacaggtctcttgaaaacattgttcagccgcctggagaaatgaatgataggttagatccttcctctttccaaacaaatgatcatccttggacagtccccactgtcttccaacctcaaacatttcaaagaccttctgcagattcactccctaggggttctgctaggttaacaagtcaaaatctgtattctaatgtatttaaacctgctgatgtggtctcacctaaaatccccagtgggtttcctattgaagatcacgaaaccagcccactggataactctgatgcttttctctctactcatttaaagctgttccctagcgcttctagcaattccttctacgagtctgagctaccacaaggtttccaggattattacaatttaggccaattcacagatgacgatcaagtgccaacacccctcgtggcaataacgatcactaggctagtggtgggtttcctgctgccctctgttatcatgatagcctgttacagcttcattgtcttccgaatgcaaaggggccgcttcgccaagtctcagagcaaaacctttcgagtggccgtggtggtggtggctgtctttcttgtctgctggactccataccacatttttggagtcctgtcattgcttactgacccagaaactcccttggggaaaactctgatgtcctgggatcatgtatgcattgctctagcatctgccaatagttgctttaatcccttcctttatgccctcttggggaaagattttaggaagaaagcaaggcagtccattcagggaattctggaggcagccttcagtgaggagctcacacgttccacccactgtccctcaaacaatgtcatttcagaaagaaatagtacaactgtgtgaaaatgtggagcagccaacaagcaggggctcttaggcaatcacatagtgaaagtttataagaggatgaagtgatatggtgagcagcggacttcaaaaactgtcaaagaatcaatccagcggttctcaaacggtacacagactattgacatcagcatcacctagaaacttgttagaaatgcaaattctcaagccgcatcccagacttgctgaatcggaatctctgggggttgggacccagcaagggcacttaacaaaccctcgtttctgattaatgctaaatgtaagaatcattgtaaacattagttctatttctatcccaaactaagctatgtgaaataagagaagctactttgtttttaaatgatgttgaatatttgtcgatatttccatcattaaatttttccttagcattgtctaagtcttccagattccatttaaaaccatttcttgttctcctacgtgagtgaaagatgatcatatatcctaatgctt

SEQ ID NO: 458098 - DNA, 1958 bp, Homo sapiens
gtctgtggtcggtgccggagatctagaggataggagacatccaggtgctgaagccatcatatactgtctcagtgtttgaagtttagcaatggcgtctttctctgctgagaccaattcaactgacctactctcacagccatggaatgagcccccagtaattctctccatggtcattctcagccttacttttttactgggattgccaggcaatgggctggtgctgtgggtggctggcctgaagatgcagcggacagtgaacacaatttggttcctccacctcaccttggcggacctcctctgctgcctctccttgcccttctcgctggctcacttggctctccagggacagtggccctacggcaggttcctatgcaagctcatcccctccatcattgtcctcaacatgtttgccagtgtcttcctgcttactgccattagcctggatcgctgtcttgtggtattcaagccaatctggtgtcagaatcatcgcaatgtagggatggcctgctctatctgtggatgtatctgggtggtggcttttgtgatgtgcattcctgtgttcgtgtaccgggaaatcttcactacagacaaccataatagatgtggctacaaatttggtctctccagctcattagattatccagacttttatggagatccactagaaaacaggtctcttgaaaacattgttcagccgcctggagaaatgaatgataggttagatccttcctctttccaaacaaatgatcatccttggacagtccccactgtcttccaacctcaaacatttcaaagaccttctgcagattcactccctaggggttctgctaggttaacaagtcaaaatctgtattctaatgtatttaaacctgctgatgtggtctcacctaaaatccccagtgggtttcctattgaagatcacgaaaccagcccactggataactctgatgcttttctctctactcatttaaagctgttccctagcgcttctagcaattccttctacgagtctgagctaccacaaggtttccaggattattacaatttaggccaattcacagatgacgatcaagtgccaacacccctcgtggcaataacgatcactaggctagtggtgggtttcctgctgccctctgttatcatgatagcctgttacagcttcattgtcttccgaatgcaaaggggccgcttcgccaagtctcagagcaaaacctttcgagtggccgtggtggtggtggctgtctttcttgtctgctggactccataccacatttttggagtcctgtcattgcttactgacccagaaactcccttggggaaaactctgatgtcctgggatcatgtatgcattgctctagcatctgccaatagttgctttaatcccttcctttatgccctcttggggaaagattttaggaagaaagcaaggcagtccattcagggaattctggaggcagccttcagtgaggagctcacacgttccacccactgtccctcaaacaatgtcatttcagaaagaaatagtacaactgtgtgaaaatgtggagcagccaacaagcaggggctcttaggcaatcacatagtgaaagtttataagaggatgaagtgatatggtgagcagcggacttcaaaaactgtcaaagaatcaatccagcggttctcaaacggtacacagactattgacatcagcatcacctagaaacttgttagaaatgcaaattctcaagccgcatcccagacttgctgaatcggaatctctgggggttgggacccagcaagggcacttaacaaaccctcgtttctgattaatgctaaatgtaagaatcattgtaaacattagttctatttctatcccaaactaagctatgtgaaataagagaagctactttgtttttaaatgatgttgaatatttgtcgatatttccatcattaaatttttccttagcattgtctaagtc

SEQ ID NO: 458099 - DNA, 3841 bp, Homo sapiens
catgtttatatctcctttcttttgtttgctctgtttcgctgttgtcactatgccgttttttagttctcgtatgcctcatctttctggtgtctttgtccgtttgtgttgtccagtgggtttgtgtcttgcatgtccacgctgtccgttttcccacgttctgatggtgtattgcgcgtccttttgtgtttttaattgtctctcttttgggcccctttggtcatcgtgacgtgggttcgctggtatcttggtgcccttctgggttatctctccttgtcgtgctccctcttgttttttctttttgttttttttcttcttgtttctcagcacaatcgacatttatttacgtaggtaaaattactgttgctatgggtaaattcacagaaataaagcccagagaatccggttggctggcagggagcggcggaaccaatcccgggctcagcaagttctcgcgataccgtgagatctccagtcctgacgacaccgccgctgaaatgttagtgagactgtagggtgggcggtgcgagcggcggttagctcccagttcggcctctgaggaaaacgggcgttcgcctgcggttggtccgactgttagcaacatgagcggcctggatggggtcaagaggaccactcccctccaaacccacagcatcattatttctgaccaagtcccgagcgaccaggacgcacaccagtacctgaggctccgcgaccaaagcgaggcgacacaggtgatggcggagccgggtgagggaggctcggagaccgtcgcgctcccgcctccaccgccttcagaggaggggggcgtaccccaggatgccgcgggccgtggcggtactccccagatccgagttgttgggggtcgcggtcatgtggcgatcaaagccgggcaggaagagggccagcctcccgccgaaggcctggcagccgcttctgtggtgatggcagccgaccgcagcctgaaaaagggcgttcagggtggagagaaggccctagaaatctgtggcgcccagagatccgcgtctgagctgacggcgggggcggaggctgaggcggaggaggtgaagacaggaaagtgcgccaccgtctcagcagccgtggctgagagggagagcgctgaggtggtggtgaagggaaggcctggcggagaaggaggtaatggaggagcagatggaggtagaggagcagccgccagaaggtgaagaaatagaagtggcggaggaggatagattggaggaggaggcgagggaggaagaagggccctggcctttgcatgaggctctccgcatggaccctctggaggccatccagctggaactggacactgtgaatgctcaggccgacagggccttccaacagctggagcacaagtttgggcggatgcgtcgacactacctggagcggaggaactacatcattcagaatatcccgggcttctggatgactgcttttcgaaaccacccccagttgtccgccatgattaggggccaagatgcagagatgttaaggtacataaccaatttagaggtgaaggaactcagacaccctagaaccggttgcaagttcaagttcttctttagaagaaacccctacttcagaaacaagctgattgtcaaggaatatgaggtaagatcctccggccgagtggtgtctctttctactccaattatatggcgcagggggcatgaaccccagtccttcattcgcagaaaccaagacctcatctgcagcttcttcacttggttttcagaccacagccttccagagtccgacaaaattgctgagattattaaagaggatctgtggccaaatccactgcaatactacctgttgcgtgaaggagtccgtagagcccgacgtcgcccgctaagggagcctgtagagatccccaggccctttgggttccagtctggttaacatttgcccttgggaatactcctgcacaaggtctcctaccaccttctgctggacctgtgcttgggcatcagcaatgagtatgccttctattgtgctttgtttttgctgacttttctgcaccctgtttcctttggatattcagttctctcaacctcaagattgagacggtggtgggtatgcttctccacttccatatgaccttcatgctgttctggaatatcacatgctacgaggtcatccttcacactacttgtaagccaagcaaatgatactgtagattgtactgcctttatctgcactgcttggaccctgtttattcccagggcctctgaactggttgctgtcacttggatttctagctttgggagcctgttccacctactcagctctgcattgagcagtatgggcacatgccctgtggacagttactggacgttaatgaactcagaggagaaaagcagtgagccacttgttctgtgtgatttatggtacttcattgctcttccttcacctctagtcactttctattgctacctgccctacattggctcctgccaaggtccctctctctccctgttttcctttttttttttttttttttttttttttgagacggaggacggagtcttgctctgtcgcccaggttggagtgcagtggcgcgatctcggctcactgcaacctccacctcccgggttcaagcgattctcctgcctcagcctcccgagtagctgggactacaggcgcgcgccgccacgcccggctaatttttatatttttagtagagacggggtttcaccatgctggccaggctggtctcgaaccccgatctcgtgatccgccctccttagcctcccaatcctctcttaaaaaagtgatagctcagaaacatttgtaaaagcaaggtttttatttcattttggctctgtcattttcagaggcaaagaagttggcctgtaaaatagagtgctagagctcttacgcccctccccttcttcccaacttcctacttcctagcccttttatcaactcctagaatagttaaagagagacacatctagatgggatgaaaggtgccctaagcaggagaaactgaacaaaaggctagaggcatgggccaggtaaaaattgggcctagagtgaagactgtgctgtcgttaagagctttcgaggaaggagtacttactccccaatgatgatgaatggaaaaatacttttcagggagaattgaaggggttaaagtgttaaatatgttgcctagacaagggttctttaaagaaagacagcgcaactttgaatgctttcttacttgttttgtgacctaatttatgtggaagattgttatttcattaggatttagtaaaatttttttttctgattctaaacttattgtgaaaattgagctgtacagatattcttttgatttcaattgggaacatttggaagaacaacagtcttacttgcctgtacaatatagagacatatgaatagtcataacagttttcaacttgttcttgtttctgttaaactatattcctagaaacatagtttgaacaacttggtctttgttaggcttgtcaaattgccttcatggaaaaataatctacaaaagtatggtttaattgattgtcttacatgataattttccctggtaacaacttagtaagtgatatatcttttttcctaaattgcttaaatactgtgaaattgctctgacaaattggaagtgtaccattggcatatttgtcttcctttttatgcatgatggtaaaataaaagcatgttgttctgctaaaaaaaaaaaaaaaaaatttgggggcgggccgaaagtttaaaattgggggggggccatgtaagacggcacggtcaagacgggcaagggggtcccaaaagcggcggggtgaaagggggggtggccaaggcgta

SEQ ID NO: 458100 - DNA, 2239 bp, Homo sapiens
gatagggtcgagatgcagagatgtgagggtacgtggactcctctagaaggtcgaccggacatgcgacatgaccacgtatgagccgggggccggcgcaagtacacgtcgagaatgggcccctacttcagaaacaagctgattgtcaaggaatatgaggtaagatcctccggccgagtggtgtctctttctactccaattatatggcgcagggggcatgaaccccagtccttcattcgcagaaaccaagacctcatctgcagcttcttcacttggttttcagaccacagccttccagagtccgacaaaattgctgagattattaaagaggatctgtggccaaatccactgcaatactacctgttgcgtgaaggagtccgtagagcccgacgtcgcccgctaagggagcctgtagagatccccaggccctttgggttccagtctggttaacatttgcccttgggaatactcctgcacaaggtctcctaccaccttctgctggacctgtgcttgggcatcagcaatgagtatgccttctattgtgctttgtttttgctgacttttctgcaccctgtttcctttggatattcagttctctcaacctcaagattgagacggtggtgggtatgcttctccacttccatatgaccttcatgctgttctggaatatcacatgctacgaggtcatccttcacactacttgtaagccaagcaaatgatactgtagattgtactgcctttatctgcactgcttggaccctgtttattcccagggcctctgaactggttgctgtcacttggatttctagctttgggagcctgttccacctactcagctctgcattgagcagtatgggcacatgccctgtggacagttactggacgttaatgaactcagaggagaaaagcagtgagccacttgttctgtgtgatttatggtacttcattgctcttccttcacctctagtcactttctattgctacctgccctacattggctcctgccaaggtccctctctctccctgttttcctttttttttttttttttttttttttttgagacggaggacggagtcttgctctgtcgcccaggttggagtgcagtggcgcgatctcggctcactgcaacctccacctcccgggttcaagcgattctcctgcctcagcctcccgagtagctgggactacaggcgcgcgccgccacgcccggctaatttttatatttttagtagagacggggtttcaccatgctggccaggctggtctcgaaccccgatctcgtgatccgccctccttagcctcccaatcctctcttaaaaaagtgatagctcagaaacatttgtaaaagcaaggtttttatttcattttggctctgtcattttcagaggcaaagaagttggcctgtaaaatagagtgctagagctcttacgcccctccccttcttcccaacttcctacttcctagcccttttatcaactcctagaatagttaaagagagacacatctagatgggatgaaaggtgccctaagcaggagaaactgaacaaaaggctagaggcatgggccaggtaaaaattgggcctagagtgaagactgtgctgtcgttaagagctttcgaggaaggagtacttactccccaatgatgatgaatggaaaaatacttttcagggagaattgaaggggttaaagtgttaaatatgttgcctagacaagggttctttaaagaaagacagcgcaactttgaatgctttcttacttgttttgtgacctaatttatgtggaagattgttatttcattaggatttagtaaaatttttttttctgattctaaacttattgtgaaaattgagctgtacagatattcttttgatttcaattgggaacatttggaagaacaacagtcttacttgcctgtacaatatagagacatatgaatagtcataacagttttcaacttgttcttgtttctgttaaactatattcctagaaacatagtttgaacaacttggtctttgttaggcttgtcaaattgccttcatggaaaaataatctacaaaagtatggtttaattgattgtcttacatgataattttccctggtaacaacttagtaagtgatatatcttttttcctaaattgcttaaatactgtgaaattgctctgacaaattggaagtgtaccattggcatatttgtcttcctttttatgcatgatggtaaaataaaagcatgttgttctgcta

SEQ ID NO: 458101 - DNA, 4032 bp, Homo sapiens
catgtttatatctcctttcttttgtttgctctgtttcgctgttgtcactatgccgttttttagttctcgtatgcctcatctttctggtgtctttgtccgtttgtgttgtccagtgggtttgtgtcttgcatgtccacgctgtccgttttcccacgttctgatggtgtattgcgcgtccttttgtgtttttaattgtctctcttttgggcccctttggtcatcgtgacgtgggttcgctggtatcttggtgcccttctgggttatctctccttgtcgtgctccctcttgttttttctttttgttttttttcttcttgtttctcagcacaatcgacatttatttacgtaggtaaaattactgttgctatgggtaaattcacagaaataaagcccagagaatccggttggctggcagggagcggcggaaccaatcccgggctcagcaagttctcgcgataccgtgagatctccagtcctgacgacaccgccgctgaaatgttagtgagactgtagggtgggcggtgcgagcggcggttagctcccagttcggcctctgaggaaaacgggcgttcgcctgcggttggtccgactgttagcaacatgagcggcctggatggggtcaagaggaccactcccctccaaacccacagcatcattatttctgaccaagtcccgagcgaccaggacgcacaccagtacctgaggctccgcgaccaaagcgaggcgacacaggtgatggcggagccgggtgagggaggctcggagaccgtcgcgctcccgcctccaccgccttcagaggaggggggcgtaccccaggatgccgcgggccgtggcggtactccccagatccgagttgttgggggtcgcggtcatgtggcgatcaaagccgggcaggaagagggccagcctcccgccgaaggcctggcagccgcttctgtggtgatggcagccgaccgcagcctgaaaaagggcgttcagggtggagagaaggccctagaaatctgtggcgcccagagatccgcgtctgagctgacggcgggggcggaggctgaggcggaggaggtgaagacaggaaagtgcgccaccgtctcagcagccgtggctgagagggagagcgctgaggtggtggtgaagggaaggcctggcggagaaggaggtaatggaggagcagatggaggtagaggagcagccgccagaaggtgaagaaatagaagtggcggaggaggatagattggaggaggaggcgagggaggaagaagggccctggcctttgcatgaggctctccgcatggaccctctggaggccatccagctggaactggacactgtgaatgctcaggccgacagggccttccaacagctggagcacaagtttgggcggatgcgtcgacactacctggagcggaggaactacatcattcagaatatcccgggcttctggatgactgcttttcgaaaccacccccagttgtccgccatgattaggggccaagatgcagagatgttaaggtacataaccaatttagaggtgaaggaactcagacaccctagaaccggttgcaagttcaagttcttctttagaagaaacccctacttcagaaacaagctgattgtcaaggaatatgaggtaagatcctccggccgagtggtgtctctttctactccaattatatggcgcagggggcatgaaccccagtccttcattcgcagaaaccaagacctcatctgcagcttcttcacttggttttcagaccacagccttccagagtccgacaaaattgctgagattattaaagaggatctgtggccaaatccactgcaatactacctgttgcgtgaaggagtccgtagagcccgacgtcgcccgctaagggagcctgtagagatccccaggccctttgggttccagtctggttaacatttgcccttgggaatactcctgcacaaggtctcctaccaccttctgctggacctgtgcttgggcatcagcaatgagtatgccttctattgtgctttgtttttgctgacttttctgcaccctgtttcctttggatattcagttctctcaacctcaagattgagacggtggtgggtatgcttctccacttccatatgaccttcatgctgttctggaatatcacatgctacgaggtcatccttcacactacttgtaagccaagcaaatgatactgtagattgtactgcctttatctgcactgcttggaccctgtttattcccagggcctctgaactggttgctgtcacttggatttctagctttgggagcctgttccacctactcagctctgcattgagcagtatgggcacatgccctgtggacagttactggacgttaatgaactcagaggagaaaagcagtgagccacttgttctgtgtgatttatggtacttcattgctcttccttcacctctagtcactttctattgctacctgccctacattggctcctgccaaggtccctctctctccctgttttcctttttttttttttttttttttttttttgagacggaggacggagtcttgctctgtcgcccaggttggagtgcagtggcgcgatctcggctcactgcaacctccacctcccgggttcaagcgattctcctgcctcagcctcccgagtagctgggactacaggcgcgcgccgccacgcccggctaatttttatatttttagtagagacggggtttcaccatgctggccaggctggtctcgaaccccgatctcgtgatccgccctccttagcctcccaatcctctcttaaaaaagtgatagctcagaaacatttgtaaaagcaaggtttttatttcattttggctctgtcattttcagaggcaaagaagttggcctgtaaaatagagtgctagagctcttacgcccctccccttcttcccaacttcctacttcctagcccttttatcaactcctagaatagttaaagagagacacatctagatgggatgaaaggtgccctaagcaggagaaactgaacaaaaggctagaggcatgggccaggtaaaaattgggcctagagtgaagactgtgctgtcgttaagagctttcgaggaaggagtacttactccccaatgatgatgaatggaaaaatacttttcagggagaattgaaggggttaaagtgttaaatatgttgcctagacaagggttctttaaagaaagacagcgcaactttgaatgctttcttacttgttttgtgacctaatttatgtggaagattgttatttcattaggatttagtaaaatttttttttctgattctaaacttattgtgaaaattgagctgtacagatattcttttgatttcaattgggaacatttggaagaacaacagtcttacttgcctgtacaatatagagacatatgaatagtcataacagttttcaacttgttcttgtttctgttaaactatattcctagaaacatagtttgaacaacttggtctttgttaggcttgtcaaattgccttcatggaaaaataatctacaaaagtatggtttaattgattgtcttacatgataattttccctggtaacaacttagtaagtgatatatcttttttcctaaattgcttaaatactgtgaaattgctctgacaaattggaagtgtaccattggcatatttgtcttcctttttatgcatgatggtaaaataaaagcatgttgttctgctagatttcttatttttcaccttacccataaatgtaatgcttgaatgaagttgttcatattaattaaaaattatggaatcattaaagtcctttaatccattaaagttcttaatggattaaaatcattaaagttcttaatggattaaaacaaaaaaaacaactaagacaacacaagcgaaaaaaaacaaaaaaacgagaaaaaataaagggggggcgataacacaggggcacaaacacaattgagagggcaataaaagataaaagcgggaaaaggaggaattgatgaggcatttgggtttaacaaaaaagggatgtagactggagga

SEQ ID NO: 458102 - DNA, 1475 bp, Homo sapiens
tcacagggcatgtgcccatactgctcaatgcagagctgagtaggtggaacaggctcccaaagctagaaatccaagtgacagcaaccagttcagatgccctgtggacagttactggacgttaatgaactcagaggagaaaagcagtgagccacttgttctgtgtgatttatggtacttcattgctcttccttcacctctagtcactttctattgctacctgccctacattggctcctgccaaggtccctctctctccctgttttcctttttttttttttttttttttttttttgagacggaggacggagtcttgctctgtcgcccaggttggagtgcagtggcgcgatctcggctcactgcaacctccacctcccgggttcaagcgattctcctgcctcagcctcccgagtagctgggactacaggcgcgcgccgccacgcccggctaatttttatatttttagtagagacggggtttcaccatgctggccaggctggtctcgaaccccgatctcgtgatccgccctccttagcctcccaatcctctcttaaaaaagtgatagctcagaaacatttgtaaaagcaaggtttttatttcattttggctctgtcattttcagaggcaaagaagttggcctgtaaaatagagtgctagagctcttacgcccctccccttcttcccaacttcctacttcctagcccttttatcaactcctagaatagttaaagagagacacatctagatgggatgaaaggtgccctaagcaggagaaactgaacaaaaggctagaggcatgggccaggtaaaaattgggcctagagtgaagactgtgctgtcgttaagagctttcgaggaaggagtacttactccccaatgatgatgaatggaaaaatacttttcagggagaattgaaggggttaaagtgttaaatatgttgcctagacaagggttctttaaagaaagacagcgcaactttgaatgctttcttacttgttttgtgacctaatttatgtggaagattgttatttcattaggatttagtaaaatttttttttctgattctaaacttattgtgaaaattgagctgtacagatattcttttgatttcaattgggaacatttggaagaacaacagtcttacttgcctgtacaatatagagacatatgaatagtcataacagttttcaacttgttcttgtttctgttaaactatattcctagaaacatagtttgaacaacttggtctttgttaggcttgtcaaattgccttcatggaaaaataatctacaaaagtatggtttaattgattgtcttacatgataattttccctggtaacaacttagtaagtgatatatcttttttcctaaattgcttaaatactgtgaaattgctctgacaaattggaagtgtaccattggcatatttgtcttcctttttatgcatgatggtaaaataaaagcatgttgttctgcta

SEQ ID NO: 458103 - DNA, 1212 bp, Homo sapiens
  misc_feature (115)..(115): n is a, c, g, or t
  misc_feature (121)..(121): n is a, c, g, or t
  misc_feature (123)..(124): n is a, c, g, or t
  misc_feature (126)..(126): n is a, c, g, or t
  misc_feature (134)..(134): n is a, c, g, or t
gggccccatatttgatctgtcaagaaactgttggctgggaactcctgaggtcaggagttcgagaccagcctggccaacatagggaaaccccatctctactaaaaataaaaaaaanttagcngnncntggtggcncagcctcccgagtagctgggactacaggcgcgcgccgccacgcccggctaatttttatatttttagtagagacggggtttcaccatgctggccaggctggtctcgaaccccgatctcgtgatccgccctccttagcctcccaatcctctcttaaaaaagtgatagctcagaaacatttgtaaaagcaaggtttttatttcattttggctctgtcattttcagaggcaaagaagttggcctgtaaaatagagtgctagagctcttacgcccctccccttcttcccaacttcctacttcctagcccttttatcaactcctagaatagttaaagagagacacatctagatgggatgaaaggtgccctaagcaggagaaactgaacaaaaggctagaggcatgggccaggtaaaaattgggcctagagtgaagactgtgctgtcgttaagagctttcgaggaaggagtacttactccccaatgatgatgaatggaaaaatacttttcagggagaattgaaggggttaaagtgttaaatatgttgcctagacaagggttctttaaagaaagacagcgcaactttgaatgctttcttacttgttttgtgacctaatttatgtggaagattgttatttcattaggatttagtaaaatttttttttctgattctaaacttattgtgaaaattgagctgtacagatattcttttgatttcaattgggaacatttggaagaacaacagtcttacttgcctgtacaatatagagacatatgaatagtcataacagttttcaacttgttcttgtttctgttaaactatattcctagaaacatagtttgaacaacttggtctttgttaggcttgtcaaattgccttcatggaaaaataatctacaaaagtatggtttaattgattgtcttacatgataattttccctggtaacaacttagtaagtgatatatcttttttcctaaattgcttaaatactgtgaaattgctctgacaaattggaagtgtaccattggcatatttgtcttcctttttatgcatgatggtaaaataaaagcatgttgttctgcta

SEQ ID NO: 458104 - DNA, 2522 bp, Homo sapiens
catgtttatatctcctttcttttgtttgctctgtttcgctgttgtcactatgccgttttttagttctcgtatgcctcatctttctggtgtctttgtccgtttgtgttgtccagtgggtttgtgtcttgcatgtccacgctgtccgttttcccacgttctgatggtgtattgcgcgtccttttgtgtttttaattgtctctcttttgggcccctttggtcatcgtgacgtgggttcgctggtatcttggtgcccttctgggttatctctccttgtcgtgctccctcttgttttttctttttgttttttttcttcttgtttctcagcacaatcgacatttatttacgtaggtaaaattactgttgctatgggtaaattcacagaaataaagcccagagaatccggttggctggcagggagcggcggaaccaatcccgggctcagcaagttctcgcgataccgtgagatctccagtcctgacgacaccgccgctgaaatgttagtgagactgtagggtgggcggtgcgagcggcggttagctcccagttcggcctctgaggaaaacgggcgttcgcctgcggttggtccgactgttagcaacatgagcggcctggatggggtcaagaggaccactcccctccaaacccacagcatcattatttctgaccaagtcccgagcgaccaggacgcacaccagtacctgaggctccgcgaccaaagcgaggcgacacaggtgatggcggagccgggtgagggaggctcggagaccgtcgcgctcccgcctccaccgccttcagaggaggggggcgtaccccaggatgccgcgggccgtggcggtactccccagatccgagttgttgggggtcgcggtcatgtggcgatcaaagccgggcaggaagagggccagcctcccgccgaaggcctggcagccgcttctgtggtgatggcagccgaccgcagcctgaaaaagggcgttcagggtggagagaaggccctagaaatctgtggcgcccagagatccgcgtctgagctgacggcgggggcggaggctgaggcggaggaggtgaagacaggaaagtgcgccaccgtctcagcagccgtggctgagagggagagcgctgaggtggtggtgaagggaaggcctggcggagaaggaggtaatggaggagcagatggaggtagaggagcagccgccagaaggtgaagaaatagaagtggcggaggaggatagattggaggaggaggcgagggaggaagaagggccctggcctttgcatgaggctctccgcatggaccctctggaggccatccagctggaactggacactgtgaatgctcaggccgacagggccttccaacagctggagcacaagtttgggcggatgcgtcgacactacctggagcggaggaactacatcattcagaatatcccgggcttctggatgactgcttttcgaaaccacccccagttgtccgccatgattaggggccaagatgcagagatgttaaggtacataaccaatttagaggtgaaggaactcagacaccctagaaccggttgcaagttcaagttcttctttagaagaaacccctacttcagaaacaagctgattgtcaaggaatatgaggtaagatcctccggccgagtggtgtctctttctactccaattatatggcgcagggggcatgaaccccagtccttcattcgcagaaaccaagacctcatctgcagcttcttcacttggttttcagaccacagccttccagagtccgacaaaattgctgagattattaaagaggatctgtggccaaatccactgcaatactacctgttgcgtgaaggagtccgtagagcccgacgtcgcccgctaagggagcctgtagagatccccaggccctttgggttccagtctggttaacatttgcccttgggaatactcctgcacaaggtctcctaccaccttctgctggacctgtgcttgggcatcagcaatgagtatgccttctattgtgctttgtttttgctgacttttctgcaccctgtttcctttggatattcagttctctcaacctcaagattgagacggtggtgggtatgcttctccacttccatatgaccttcatgctgttctggaatatcacatgctacgaggtcatccttcacactacttgtaagccaagcaaatgatactgtagattgtactgcctttatctgcactgcttggaccctgtttattcccagggcctctgaactggttgctgtcacttggatttctagctttgggagcctgttccacctactcagctctgcattgagcagtatgggcacatgccctgtggacagttactggacgttaatgaactcagaggagaaaagcagtgaaggatgacctcgtagcatgtgatattccagaacagcatgaaggtcatatggaagtggagaagcatacccaccaccgtctcaatcttgaggttgagagaactgaatatccaaagggaacagggtgcagaaaagtcgtcgacg

SEQ ID NO: 458105 - DNA, 3709 bp, Homo sapiens
catgtttatatctcctttcttttgtttgctctgtttcgctgttgtcactatgccgttttttagttctcgtatgcctcatctttctggtgtctttgtccgtttgtgttgtccagtgggtttgtgtcttgcatgtccacgctgtccgttttcccacgttctgatggtgtattgcgcgtccttttgtgtttttaattgtctctcttttgggcccctttggtcatcgtgacgtgggttcgctggtatcttggtgcccttctgggttatctctccttgtcgtgctccctcttgttttttctttttgttttttttcttcttgtttctcagcacaatcgacatttatttacgtaggtaaaattactgttgctatgggtaaattcacagaaataaagcccagagaatccggttggctggcagggagcggcggaaccaatcccgggctcagcaagttctcgcgataccgtgagatctccagtcctgacgacaccgccgctgaaatgttagtgagactgtagggtgggcggtgcgagcggcggttagctcccagttcggcctctgaggaaaacgggcgttcgcctgcggttggtccgactgttagcaacatgagcggcctggatggggtcaagaggaccactcccctccaaacccacagcatcattatttctgaccaagtcccgagcgaccaggacgcacaccagtacctgaggctccgcgaccaaagcgaggcgacacaggtgatggcggagccgggtgagggaggctcggagaccgtcgcgctcccgcctccaccgccttcagaggaggggggcgtaccccaggatgccgcgggccgtggcggtactccccagatccgagttgttgggggtcgcggtcatgtggcgatcaaagccgggcaggaagagggccagcctcccgccgaaggcctggcagccgcttctgtggtgatggcagccgaccgcagcctgaaaaagggcgttcagggtggagagaaggccctagaaatctgtggcgcccagagatccgcgtctgagctgacggcgggggcggaggctgaggcggaggaggtgaagacaggaaagtgcgccaccgtctcagcagccgtggctgagagggagagcgctgaggtggtggtgaagggaaggcctggcggagaaggaggtaatggaggagcagatggaggtagaggagcagccgccagaaggtgaagaaatagaagtggcggaggaggatagattggaggaggaggcgagggaggaagaagggccctggcctttgcatgaggctctccgcatggaccctctggaggccatccagctggaactggacactgtgaatgctcaggccgacagggccttccaacagctggagcacaagtttgggcggatgcgtcgacactacctggagcggaggaactacatcattcagaatatcccgggcttctggatgactgcttttcgaaaccacccccagttgtccgccatgattaggggccaagatgcagagatgttaaggtacataaccaatttagaggtgaaggaactcagacaccctagaaccggttgcaagttcaagttcttctttagaagaaacccctacttcagaaacaagctgattgtcaaggaatatgaggtaagatcctccggccgagtggtgtctctttctactccaattatatggcgcagggggcatgaaccccagtccttcattcgcagaaaccaagacctcatctgcagcttcttcacttggttttcagaccacagccttccagagtccgacaaaattgctgagattattaaagaggatctgtggccaaatccactgcaatactacctgttgcgtgaaggagtccgtagagcccgacgtcgcccgctaagggagcctgtagagatccccaggccctttgggttccagtctggttaacatttgcccttgggaatactcctgcacaaggtctcctaccaccttctgctggacctgtgcttgggcatcagcaatgagtatgccttctattgtgctttgtttttgctgacttttctgcaccctgtttcctttggatattcagttctctcaacctcaagattgagacggtggtgggtatgcttctccacttccatatgaccttcatgctgttctggaatatcacatgctacgaggtcatccttcacactacttgtaagccaagcaaatgatactgtagattgtactgcctttatctgcactgcttggaccctgtttattcccagggcctctgaactggttgctgtcacttggatttctagctttgggagcctgttccacctactcagctctgcattgagcagtatgggcacatgccctgtggacagttactggacgttaatgaactcagaggagaaaagcagtgagccacttgttctgtgtgatttatggtacttcattgctcttccttcacctctagtcactttctattgctacctgccctacattggctcctgccaaggtccctctctctccctgttttcctttttttttttttttttttttttttttgagacggaggacggagtcttgctctgtcgcccaggttggagtgcagtggcgcgatctcggctcactgcaacctccacctcccgggttcaagcgattctcctgcctcagcctcccgagtagctgggactacaggcgcgcgccgccacgcccggctaatttttatatttttagtagagacggggtttcaccatgctggccaggctggtctcgaaccccgatctcgtgatccgccctccttagcctcccaatcctctcttaaaaaagtgatagctcagaaacatttgtaaaagcaaggtttttatttcattttggctctgtcattttcagaggcaaagaagttggcctgtaaaatagagtgctagagctcttacgcccctccccttcttcccaacttcctacttcctagcccttttatcaactcctagaatagttaaagagagacacatctagatgggatgaaaggtgccctaagcaggagaaactgaacaaaaggctagaggcatgggccaggtaaaaattgggcctagagtgaagactgtgctgtcgttaagagctttcgaggaaggagtacttactccccaatgatgatgaatggaaaaatacttttcagggagaattgaaggggttaaagtgttaaatatgttgcctagacaagggttctttaaagaaagacagcgcaactttgaatgctttcttacttgttttgtgacctaatttatgtggaagattgttatttcattaggatttagtaaaatttttttttctgattctaaacttattgtgaaaattgagctgtacagatattcttttgatttcaattgggaacatttggaagaacaacagtcttacttgcctgtacaatatagagacatatgaatagtcataacagttttcaacttgttcttgtttctgttaaactatattcctagaaacatagtttgaacaacttggtctttgttaggcttgtcaaattgccttcatggaaaaataatctacaaaagtatggtttaattgattgtcttacatgataattttccctggtaacaacttagtaagtgatatatcttttttcctaaattgcttaaatactgtgaaattgctctgacaaattggaagtgtaccattggcatatttgtcttcctttttatgcatgatggtaaaataaaagcatgttgttctgcta

SEQ ID NO: 458106 - DNA, 3932 bp, Homo sapiens
catgtttatatctcctttcttttgtttgctctgtttcgctgttgtcactatgccgttttttagttctcgtatgcctcatctttctggtgtctttgtccgtttgtgttgtccagtgggtttgtgtcttgcatgtccacgctgtccgttttcccacgttctgatggtgtattgcgcgtccttttgtgtttttaattgtctctcttttgggcccctttggtcatcgtgacgtgggttcgctggtatcttggtgcccttctgggttatctctccttgtcgtgctccctcttgttttttctttttgttttttttcttcttgtttctcagcacaatcgacatttatttacgtaggtaaaattactgttgctatgggtaaattcacagaaataaagcccagagaatccggttggctggcagggagcggcggaaccaatcccgggctcagcaagttctcgcgataccgtgagatctccagtcctgacgacaccgccgctgaaatgttagtgagactgtagggtgggcggtgcgagcggcggttagctcccagttcggcctctgaggaaaacgggcgttcgcctgcggttggtccgactgttagcaacatgagcggcctggatggggtcaagaggaccactcccctccaaacccacagcatcattatttctgaccaagtcccgagcgaccaggacgcacaccagtacctgaggctccgcgaccaaagcgaggcgacacaggtgatggcggagccgggtgagggaggctcggagaccgtcgcgctcccgcctccaccgccttcagaggaggggggcgtaccccaggatgccgcgggccgtggcggtactccccagatccgagttgttgggggtcgcggtcatgtggcgatcaaagccgggcaggaagagggccagcctcccgccgaaggcctggcagccgcttctgtggtgatggcagccgaccgcagcctgaaaaagggcgttcagggtggagagaaggccctagaaatctgtggcgcccagagatccgcgtctgagctgacggcgggggcggaggctgaggcggaggaggtgaagacaggaaagtgcgccaccgtctcagcagccgtggctgagagggagagcgctgaggtggtggtgaagggaaggcctggcggagaaggaggtaatggaggagcagatggaggtagaggagcagccgccagaaggtgaagaaatagaagtggcggaggaggatagattggaggaggaggcgagggaggaagaagggccctggcctttgcatgaggctctccgcatggaccctctggaggccatccagctggaactggacactgtgaatgctcaggccgacagggccttccaacagctggagcacaagtttgggcggatgcgtcgacactacctggagcggaggaactacatcattcagaatatcccgggcttctggatgactgcttttcgaaaccacccccagttgtccgccatgattaggggccaagatgcagagatgttaaggtacataaccaatttagaggtgaaggaactcagacaccctagaaccggttgcaagttcaagttcttctttagaagaaacccctacttcagaaacaagctgattgtcaaggaatatgaggtaagatcctccggccgagtggtgtctctttctactccaattatatggcgcagggggcatgaaccccagtccttcattcgcagaaaccaagacctcatctgcagcttcttcacttggttttcagaccacagccttccagagtccgacaaaattgctgagattattaaagaggatctgtggccaaatccactgcaatactacctgttgcgtgaaggagtccgtagagcccgacgtcgcccgctaagggagcctgtagagatccccaggccctttgggttccagtctggttaacatttgcccttgggaatactcctgcacaaggtctcctaccaccttctgctggacctgtgcttgggcatcagcaatgagtatgccttctattgtgctttgtttttgctgacttttctgcaccctgtttcctttggatattcagttctctcaacctcaagattgagacggtggtgggtatgcttctccacttccatatgaccttcatgctgttctggaatatcacatgctacgaggtcatccttcacactacttgtaagccaagcaaatgatactgtagattgtactgcctttatctgcactgcttggaccctgtttattcccagggcctctgaactggttgctgtcacttggatttctagctttgggagcctgttccacctactcagctctgcattgagcagtatgggcacatgccctgtggacagttactggacgttaatgaactcagaggagaaaagcagtgagccacttgttctgtgtgatttatggtacttcattgctcttccttcacctctagtcactttctattgctacctgccctacattggctcctgccaaggtccctctctctccctgttttcctttttttttttttttttttttttttttgagacggaggacggagtcttgctctgtcgcccaggttggagtgcagtggcgcgatctcggctcactgcaacctccacctcccgggttcaagcgattctcctgcctcagcctcccgagtagctgggactacaggcgcgcgccgccacgcccggctaatttttatatttttagtagagacggggtttcaccatgctggccaggctggtctcgaaccccgatctcgtgatccgccctccttagcctcccaatcctctcttaaaaaagtgatagctcagaaacatttgtaaaagcaaggtttttatttcattttggctctgtcattttcagaggcaaagaagttggcctgtaaaatagagtgctagagctcttacgcccctccccttcttcccaacttcctacttcctagcccttttatcaactcctagaatagttaaagagagacacatctagatgggatgaaaggtgccctaagcaggagaaactgaacaaaaggctagaggcatgggccaggtaaaaattgggcctagagtgaagactgtgctgtcgttaagagctttcgaggaaggagtacttactccccaatgatgatgaatggaaaaatacttttcagggagaattgaaggggttaaagtgttaaatatgttgcctagacaagggttctttaaagaaagacagcgcaactttgaatgctttcttacttgttttgtgacctaatttatgtggaagattgttatttcattaggatttagtaaaatttttttttctgattctaaacttattgtgaaaattgagctgtacagatattcttttgatttcaattgggaacatttggaagaacaacagtcttacttgcctgtacaatatagagacatatgaatagtcataacagttttcaacttgttcttgtttctgttaaactatattcctagaaacatagtttgaacaacttggtctttgttaggcttgtcaaattgccttcatggaaaaataatctacaaaagtatggtttaattgattgtcttacatgataattttccctggtaacaacttagtaagtgatatatcttttttcctaaattgcttaaatactgtgaaattgctctgacaaattggaagtgtaccattggcatatttgtcttcctttttatgcatgatggtaaaataaaagcatgttgttctgctagatttcttatttttcaccttacccataaatgtaatgcttgaatgaagttgttcatattaattaaaaattatggaatcattaaagtcctttaatccattaaagttcttaatggattaaaatcattaaagttcttaatggattaaaacattacaacacactcacacaaaattttcggcgcttggccctaaaattttaaacaaccgtgggccgggcccagtatgac

SEQ ID NO: 458107 - DNA, 474 bp, Homo sapiens
agcgggcgggaggccgcgcaggcgcagtgagtcagtgccggtcggtcttgtgggctgaggggcagcggcttaggctccggcgtctgcaggggtcgccgagctaacccgtggctaggcgagtggggcggggcggccggcaccatgtcgaggcaggcgaaccgtggcaccgagagcaagaaaatggtccagatggctgtggaggccaagtttgtccaggacaccctgaaaggagacggtgtgacagaaatccggatgagattcatcaggcggattgaggacaatcttccagctggagaggaataaccatccctacaactcgaggatagccatcaggagcactgttggaatcagcaggcctctgtgctccctctgccctccagaactcagtgactcttgaacatggatgttatatattcttataacctgtttccattctccattcaaataaagagcagactgcgatatagtccattt

SEQ ID NO: 458108 - DNA, 1315 bp, Homo sapiens
agcgggcgggaggccgcgcaggcgcagtgagtcagtgccggtcggtcttgtgggctgaggggcagcggcttaggctccggcgtctgcaggggtcgccgagctaacccgtggctaggcgagtggggcggggcggccggcaccatgtcgaggcaggcgaaccgtggcaccgagagcaagaaaatgagctctgagctcttcaccctgacctatggtgccctggtcacccagctatgtaaggactatgaaaatgatgaagatgtgaataaacagctggacaaaatgggctttaacattggagtccggctgattgaagatttcttggctcggtcaaatgttgggaggtgccatgactttcgggaaactgcggatgtcattgccaaggtggcgttcaagatgtacttgggcatcactccaagcattactaattggagcccagctggtgatgaattctccctcattttggaaaataaccccttggtggactttgtggaacttcctgataaccactcatcccttatttattccaatctcttgtgtggggtgttgcggggagctttggagatggtccagatggctgtggaggccaagtttgtccaggacaccctgaaaggagacggtgtgacagaaatccggatgagattcatcaggcggattgaggacaatcttccagctggagaggaataaccatccctacaactcgaggatagccatcaggagcactgttggaatcagcaggcctctgtgctccctctgccctccagaactcagtgactcttgaacatggatgttatatattcttataacctgtttccattctccattcaaataaagagcagactgcgatatagtccatttaccccatgtgtgcacattcaggagcgacagtctctgcccccattcccttgagaggggctggatgtaatcacctttggttggactagaaagagctcaaaccattttacattcctgtttgaatttttccaaagcaaaactcactttgaccccattaagaggcaagcctggcacatctatccctgggcctttagaaagccatttgcctcaaatggctatagggttgtggggtggagggaggaagggctgggagggagtggggaggaattgctagctgtagtgtgacacattgtagtgtttgccaggaaaggagccagtcatgccggaaacactgacttctgggaagccacccaggtctcattcctccctgctgttggaggcaacatctcctctttttacagagggtacatccttttttcttacaaattcttcaataaagacacattcttgagtgaaatcccaa

SEQ ID NO: 458109 - DNA, 453 bp, Homo sapiens
gctatcctagaggttcccgagctttaccgcctaggtagaagagtgagactctgtctcagaaaatacacataatataatataacaaatagataggaatgggctttaacattggagtccggctgattgaagatttcttggctcggtcaaatgttgggaggtgccatgactttcgggaaactgcggatgtcattgccaaggtcattattctgggccacctgtccatgctgaagaattgctgctgagaggcactgcttaccactctttctatctcccttagagaggcctttaatctcccaaaagactggctaggcagctctttgggtcaaaaaaacattccaggtcgttagggaatagcatagattatttaatccctgtggattaaagccccactgaaatcaaagcctgagcttttccactgtgaaggtgtagcagagtagcatgggggtaaagaat

SEQ ID NO: 458110 - DNA, 1339 bp, Homo sapiens
agcgggcgggaggccgcgcaggcgcagtgagtcagtgccggtcggtcttgtgggctgaggggcagcggcttaggctccggcgtctgcaggggtcgccgagctaacccgtggctaggcgagtggggcggggcggccggcaccatgtcgaggcaggcgaaccgtggcaccgagagcaagaaaatgagctctgagctcttcaccctgacctatggtgccctggtcacccagctatgtaaggactatgaaaatgatgaagatgtgaataaacagctggacaaaatgggctttaacattggagtccggctgattgaagatttcttggctcggtcaaatgttgggaggtgccatgactttcgggaaactgcggatgtcattgccaaggtggcgttcaagatgtacttgggcatcactccaagcattactaattggagcccagctggtgatgaattctccctcattttggaaaataaccccttggtggactttgtggaacttcctgataaccactcatcccttatttattccaatctcttgtgtggggtgttgcggggagctttggagatggtccagatggctgtggaggccaagtttgtccaggacaccctgaaaggagacggtgtgacagaaatccggatgagattcatcaggcggattgaggacaatcttccagctggagaggaataaccatccctacaactcgaggatagccatcaggagcactgttggaatcagcaggcctctgtgctccctctgccctccagaactcagtgactcttgaacatggatgttatatattcttataacctgtttccattctccattcaaataaagagcagactgcgatatagtccatttaccccatgtgtgcacattcaggagcgacagtctctgcccccattcccttgagaggggctggatgtaatcacctttggttggactagaaagagctcaaaccattttacattcctgtttgaatttttccaaagcaaaactcactttgaccccattaagaggcaagcctggcacatctatccctgggcctttagaaagccatttgcctcaaatggctatagggttgtggggtggagggaggaagggctgggagggagtggggaggaattgctagctgtagtgtgacacattgtagtgtttgccaggaaaggagccagtcatgccggaaacactgacttctgggaagccacccaggtctcattcctccctgctgttggaggcaacatctcctctttttacagagggtacatccttttttcttacaaattcttcaataaagacacattcttgagtgaaatcccaagtgaaatcccaatcatgtcctgtt

SEQ ID NO: 458111 - DNA, 1338 bp, Homo sapiens
agcgggcgggaggccgcgcaggcgcagtgagtcagtgccggtcggtcttgtgggctgaggggcagcggcttaggctccggcgtctgcaggggtcgccgagctaacccgtggctaggcgagtggggcggggcggccggcaccatgtcgaggcaggcgaaccgtggcaccgagagcaagaaaatgagctctgagctcttcaccctgacctatggtgccctggtcacccagctatgtaaggactatgaaaatgatgaagatgtgaataaacagctggacaaaatgggctttaacattggagtccggctgattgaagatttcttggctcggtcaaatgttgggaggtgccatgactttcgggaaactgcggatgtcattgccaaggtggcgttcaagatgtacttgggcatcactccaagcattactaattggagcccagctggtgatgaattctccctcattttggaaaataaccccttggtggactttgtggaacttcctgataaccactcatcccttatttattccaatctcttgtgtggggtgttgcggggagctttggagatggtccagatggctgtggaggccaagtttgtccaggacaccctgaaaggagacggtgtgacagaaatccggatgagattcatcaggcggattgaggacaatcttccagctggagaggaataaccatccctacaactcgaggatagccatcaggagcactgttggaatcagcaggcctctgtgctccctctgccctccagaactcagtgactcttgaacatggatgttatatattcttataacctgtttccattctccattcaaataaagagcagactgcgatatagtccatttaccccatgtgtgcacattcaggagcgacagtctctgcccccattcccttgagaggggctggatgtaatcacctttggttggactagaaagagctcaaaccattttacattcctgtttgaatttttccaaagcaaaactcactttgaccccattaagaggcaagcctggcacatctatccctgggcctttagaaagccatttgcctcaaatggctatagggttgtggggtggagggaggaagggctgggagggagtggggaggaattgctagctgtagtgtgacacattgtagtgtttgccaggaaaggagccagtcatgccggaaacactgacttctgggaagccacccaggtctcattcctccctgctgttggaggcaacatctcctctttttacagagggtacatccttttttcttacaaattcttcaataaagacacattcttgagtgaaatcccaaaacaaaaacaataaaacaacggg

SEQ ID NO: 458112 - DNA, 1560 bp, Homo sapiens
agcgggcgggaggccgcgcaggcgcagtgagtcagtgccggtcggtcttgtgggctgaggggcagcggcttaggctccggcgtctgcaggggtcgccgagctaacccgtggctaggcgagtggggcggggcggccggcaccatgtcgaggcaggcgaaccgtggcaccgagagcaagaaaatggtaacttggagcgcgtgacctcggcgggcggggcgaaattgaggcgtacagggaaggggcccggcgccgagcgcgaggtgcgtttggaaaagggccttcctgtgagctctggcaaggggaagcctcttgctgggtcactccgggggcgttccaggcaggtgaggggaccgtcggagaagttccccggaggagaccccgcccccaaggcctgagtgcagctctgtgctaagccaacaacaacgacgagctctgagctcttcaccctgacctatggtgccctggtcacccagctatgtaaggactatgaaaatgatgaagatgtgaataaacagctggacaaaatgggctttaacattggagtccggctgattgaagatttcttggctcggtcaaatgttgggaggtgccatgactttcgggaaactgcggatgtcattgccaaggtggcgttcaagatgtacttgggcatcactccaagcattactaattggagcccagctggtgatgaattctccctcattttggaaaataaccccttggtggactttgtggaacttcctgataaccactcatcccttatttattccaatctcttgtgtggggtgttgcggggagctttggagatggtccagatggctgtggaggccaagtttgtccaggacaccctgaaaggagacggtgtgacagaaatccggatgagattcatcaggcggattgaggacaatcttccagctggagaggaataaccatccctacaactcgaggatagccatcaggagcactgttggaatcagcaggcctctgtgctccctctgccctccagaactcagtgactcttgaacatggatgttatatattcttataacctgtttccattctccattcaaataaagagcagactgcgatatagtccatttaccccatgtgtgcacattcaggagcgacagtctctgcccccattcccttgagaggggctggatgtaatcacctttggttggactagaaagagctcaaaccattttacattcctgtttgaatttttccaaagcaaaactcactttgaccccattaagaggcaagcctggcacatctatccctgggcctttagaaagccatttgcctcaaatggctatagggttgtggggtggagggaggaagggctgggagggagtggggaggaattgctagctgtagtgtgacacattgtagtgtttgccaggaaaggagccagtcatgccggaaacactgacttctgggaagccacccaggtctcattcctccctgctgttggaggcaacatctcctctttttacagagggtacatccttttttcttacaaattcttcaataaagacacattcttgagtgaaatcccaa

SEQ ID NO: 458113 - DNA, 1370 bp, Homo sapiens
  misc_feature (1255)..(1255): n is a, c, g, or t
  misc_feature (1308)..(1308): n is a, c, g, or t
agcgggcgggaggccgcgcaggcgcagtgagtcagtgccggtcggtcttgtgggctgaggggcagcggcttaggctccggcgtctgcaggggtcgccgagctaacccgtggctaggcgagtggggcggggcggccggcaccatgtcgaggcaggcgaaccgtggcaccgagagcaagaaaatgagctctgagctcttcaccctgacctatggtgccctggtcacccagctatgtaaggactatgaaaatgatgaagatgtgaataaacagctggacaaaatgggctttaacattggagtccggctgattgaagatttcttggctcggtcaaatgttgggaggtgccatgactttcgggaaactgcggatgtcattgccaaggtggcgttcaagatgtacttgggcatcactccaagcattactaattggagcccagctggtgatgaattctccctcattttggaaaataaccccttggtggactttgtggaacttcctgataaccactcatcccttatttattccaatctcttgtgtggggtgttgcggggagctttggagatggtccagatggctgtggaggccaagtttgtccaggacaccctgaaaggagacggtgtgacagaaatccggatgagattcatcaggcggattgaggacaatcttccagctggagaggaataaccatccctacaactcgaggatagccatcaggagcactgttggaatcagcaggcctctgtgctccctctgccctccagaactcagtgactcttgaacatggatgttatatattcttataacctgtttccattctccattcaaataaagagcagactgcgatatagtccatttaccccatgtgtgcacattcaggagcgacagtctctgcccccattcccttgagaggggctggatgtaatcacctttggttggactagaaagagctcaaaccattttacattcctgtttgaatttttccaaagcaaaactcactttgaccccattaagaggcaagcctggcacatctatccctgggcctttagaaagccatttgcctcaaatggctatagggttgtggggtggagggaggaagggctgggagggagtggggaggaattgctagctgtagtgtgacacattgtagtgtttgccaggaaaggagccagtcatggtggtgtatgcctgtagtcccagccacccagaaggctgaggcaggaggatcgcttgagaccaagagtttgagcctgcggtnagctgttaatgaccacggcactcaagcctgggcaatgtagcaagatcctgttntctacaagaaattttttaaaaattgagccaagtttgggtggtgcatgcctgtagttccacta

SEQ ID NO: 458114 - DNA, 1392 bp, Homo sapiens
agcgggcgggaggccgcgcaggcgcagtgagtcagtgccggtcggtcttgtgggctgaggggcagcggcttaggctccggcgtctgcaggggtcgccgagctaacccgtggctaggcgagtggggcggggcggccggcaccatgtcgaggcaggcgaaccgtggcaccgagagcaagaaaatggtaacttggagcgcgtgacctcggcgggcggggcgaaattgaggcgtacagggaaggggcccggcgccgagcgcgagagctctgagctcttcaccctgacctatggtgccctggtcacccagctatgtaaggactatgaaaatgatgaagatgtgaataaacagctggacaaaatgggctttaacattggagtccggctgattgaagatttcttggctcggtcaaatgttgggaggtgccatgactttcgggaaactgcggatgtcattgccaaggtggcgttcaagatgtacttgggcatcactccaagcattactaattggagcccagctggtgatgaattctccctcattttggaaaataaccccttggtggactttgtggaacttcctgataaccactcatcccttatttattccaatctcttgtgtggggtgttgcggggagctttggagatggtccagatggctgtggaggccaagtttgtccaggacaccctgaaaggagacggtgtgacagaaatccggatgagattcatcaggcggattgaggacaatcttccagctggagaggaataaccatccctacaactcgaggatagccatcaggagcactgttggaatcagcaggcctctgtgctccctctgccctccagaactcagtgactcttgaacatggatgttatatattcttataacctgtttccattctccattcaaataaagagcagactgcgatatagtccatttaccccatgtgtgcacattcaggagcgacagtctctgcccccattcccttgagaggggctggatgtaatcacctttggttggactagaaagagctcaaaccattttacattcctgtttgaatttttccaaagcaaaactcactttgaccccattaagaggcaagcctggcacatctatccctgggcctttagaaagccatttgcctcaaatggctatagggttgtggggtggagggaggaagggctgggagggagtggggaggaattgctagctgtagtgtgacacattgtagtgtttgccaggaaaggagccagtcatgccggaaacactgacttctgggaagccacccaggtctcattcctccctgctgttggaggcaacatctcctctttttacagagggtacatccttttttcttacaaattcttcaataaagacacattcttgagtgaaatcccaa

SEQ ID NO: 458115 - DNA, 1551 bp, Homo sapiens
tgttatttcgatgcaagaggcgggcgctgtcattgtgtatctggctgttcgctgggtgttgccttttctaacccgtggctaggcgagtggggcggggcggccggcaccatgtcgaggcaggcgaaccgtggcaccgagagcaagaaaatggtaacttggagcgcgtgacctcggcgggcggggcgaaattgaggcgtacagggaaggggcccggcgccgagcgcgaggtgcgtttggaaaagggccttcctgtgagctctggcaaggggaagcctcttgctgggtcactccgggggcgttccaggcaggtgaggggaccgtcggagaagttccccggaggagaccccgcccccaaggcctgagtgcagctctgtgctaagccaacaacaacgacgagctctgagctcttcaccctgacctatggtgccctggtcacccagctatgtaaggactatgaaaatgatgaagatgtgaataaacagctggacaaaattctcttctctaacttccttcccaggggctttaacattggagtccggctgattgaagatttcttggctcggtcaaatgttgggaggtgccatgactttcgggaaactgcggatgtcattgccaaggtggcgttcaagatgtacttgggcatcactccaagcattactaattggagcccagctggtgatgaattctccctcattttggaaaataaccccttggtggactttgtggaacttcctgataaccactcatcccttatttattccaatctcttgtgtggggtgttgcggggagctttggagatggtccagatggctgtggaggccaagtttgtccaggacaccctgaaaggagacggtgtgacagaaatccggatgagattcatcaggcggattgaggacaatcttccagctggagaggaataaccatccctacaactcgaggatagccatcaggagcactgttggaatcagcaggcctctgtgctccctctgccctccagaactcagtgactcttgaacatggatgttatatattcttataacctgtttccattctccattcaaataaagagcagactgcgatatagtccatttaccccatgtgtgcacattcaggagcgacagtctctgcccccattcccttgagaggggctggatgtaatcacctttggttggactagaaagagctcaaaccattttacattcctgtttgaatttttccaaagcaaaactcactttgaccccattaagaggcaagcctggcacatctatccctgggcctttagaaagccatttgcctcaaatggctatagggttgtggggtggagggaggaagggctgggagggagtggggaggaattgctagctgtagtgtgacacattgtagtgtttgccaggaaaggagccagtcatgccggaaacactgacttctgggaagccacccaggtctcattcctccctgctgttggaggcaacatctcctctttttacagagggtacatccttttttcttacaaattcttcaataaagacacattcttgagtgaaatcccaa

SEQ ID NO: 458116 - DNA, 1788 bp, Homo sapiens
agcgggcgggaggccgcgcaggcgcagtgagtcagtgccggtcggtcttgtgggctgaggggcagcggcttaggctccggcgtctgcaggggtcgccgagctaacccgtggctaggcgagtggggcggggcggccggcaccatgtcgaggcaggcgaaccgtggcaccgagagcaagaaaatgagctctgagctcttcaccctgacctatggtgccctggtcacccagctatgtaaggactatgaaaatgatgaagatgtgaataaacagctggacaaaatgggctttaacattggagtccggctgattgaagatttcttggctcggtcaaatgttgggaggtgccatgactttcgggaaactgcggatgtcattgccaaggtggcgttcaagatgtacttgggcatcactccaagcattactaattggagcccagctggtgatgaattctccctcattttggaaaataaccccttggtggactttgtggaacttcctgataaccactcatcccttatttattccaatctcttgtgtggggtgttgcggggagctttggagatggtgagtgcaactctttatcttctgggacacccgaaatgcaatagggacttgataagtgtttaaatgaatgaaagagagaaaagaaagggctttggctcaccccagcgctttactgcctgagatggtgatgctgctgaggtaggatccaagtcggacatctttacatggtgatactcctccataccaggctggtggaaggtggtgctgtcagtccccaaagcccaggaacatccattctcagataggcttatttggtgacagtctcattcttgggtattctttgctaagtttctccttaagggttggagccattgtcttatgcaacagaatgttggcgctgtcaatcttgtccttgtgggaaaccagccccccttttttggatgctgtggatgagtcagttatgccccatccccactggttccctagaggctgtggccaggcagctaccccttcattttcccactgtcccccaggtccagatggctgtggaggccaagtttgtccaggacaccctgaaaggagacggtgtgacagaaatccggatgagattcatcaggcggattgaggacaatcttccagctggagaggaataaccatccctacaactcgaggatagccatcaggagcactgttggaatcagcaggcctctgtgctccctctgccctccagaactcagtgactcttgaacatggatgttatatattcttataacctgtttccattctccattcaaataaagagcagactgcgatatagtccatttaccccatgtgtgcacattcaggagcgacagtctctgcccccattcccttgagaggggctggatgtaatcacctttggttggactagaaagagctcaaaccattttacattcctgtttgaatttttccaaagcaaaactcactttgaccccattaagaggcaagcctggcacatctatccctgggcctttagaaagccatttgcctcaaatggctatagggttgtggggtggagggaggaagggctgggagggagtggggaggaattgctagctgtagtgtgacacattgtagtgtttgccaggaaaggagccagtcatgccggaaacactgacttctgggaagccacccaggtctcattcctccctgctgttggaggcaacatctcctctttttacagagggtacatccttttttcttacaaattcttcaataaagacacattcttgagtgaaatcccaa

SEQ ID NO: 458117 - DNA, 1002 bp, Homo sapiens
tcagtgattagagatactgagctaagtcaatgtggaggtccagactttcggaacgcggagtcatgccagtggcgttcaagatgtacttgggcatcactccaagcattactaattggagcccagctggtgatgaattctccctcattttggaaaataaccccttggtggactttgtggaacttcctgataaccactcatcccttatttattccaatctcttgtgtggggtgttgcggggagctttggagatggtccagatggctgtggaggccaagtttgtccaggacaccctgaaaggagacggtgtgacagaaatccggatgagattcatcaggcggattgaggacaatcttccagctggagaggaataaccatccctacaactcgaggatagccatcaggagcactgttggaatcagcaggcctctgtgctccctctgccctccagaactcagtgactcttgaacatggatgttatatattcttataacctgtttccattctccattcaaataaagagcagactgcgatatagtccatttaccccatgtgtgcacattcaggagcgacagtctctgcccccattcccttgagaggggctggatgtaatcacctttggttggactagaaagagctcaaaccattttacattcctgtttgaatttttccaaagcaaaactcactttgaccccattaagaggcaagcctggcacatctatccctgggcctttagaaagccatttgcctcaaatggctatagggttgtggggtggagggaggaagggctgggagggagtggggaggaattgctagctgtagtgtgacacattgtagtgtttgccaggaaaggagccagtcatgccggaaacactgacttctgggaagccacccaggtctcattcctccctgctgttggaggcaacatctcctctttttacagagggtacatccttttttcttacaaattcttcaataaagacacattcttgagtgaaatcccaa

SEQ ID NO: 458118 - DNA, 934 bp, Homo sapiens
agcgggcgggaggccgcgcaggcgcagtgagtcagtgccggtcggtcttgtgggctgaggggcagcggcttaggctccggcgtctgcaggggtcgccgagctaacccgtggctaggcgagtggggcggggcggccggcaccatgtcgaggcaggcgaaccgtggcaccgagagcaagaaaatggtccagatggctgtggaggccaagtttgtccaggacaccctgaaaggagacggtgtgacagaaatccggatgagattcatcaggcggattgaggacaatcttccagctggagaggaataaccatccctacaactcgaggatagccatcaggagcactgttggaatcagcaggcctctgtgctccctctgccctccagaactcagtgactcttgaacatggatgttatatattcttataacctgtttccattctccattcaaataaagagcagactgcgatatagtccatttaccccatgtgtgcacattcaggagcgacagtctctgcccccattcccttgagaggggctggatgtaatcacctttggttggactagaaagagctcaaaccattttacattcctgtttgaatttttccaaagcaaaactcactttgaccccattaagaggcaagcctggcacatctatccctgggcctttagaaagccatttgcctcaaatggctatagggttgtggggtggagggaggaagggctgggagggagtggggaggaattgctagctgtagtgtgacacattgtagtgtttgccaggaaaggagccagtcatgccggaaacactgacttctgggaagccacccaggtctcattcctccctgctgttggaggcaacatctcctctttttacagagggtacatccttttttcttacaaattcttcaataaagacacattcttgagtgaaatcccaa

SEQ ID NO: 458119 - DNA, 1100 bp, Homo sapiens
agcgggcgggaggccgcgcaggcgcagtgagtcagtgccggtcggtcttgtgggctgaggggcagcggcttaggctccggcgtctgcaggggtcgccgagctaacccgtggctaggcgagtggggcggggcggccggcaccatgtcgaggcaggcgaaccgtggcaccgagagcaagaaaatggtaacttggagcgcgtgacctcggcgggcggggcgaaattgaggcgtacagggaaggggcccggcgccgagcgcgaggtgcgtttggaaaagggccttcctgtgagctctggcaaggggaagcctcttgctgggtcactccgggggcgttccaggcaggtgaggggaccgtcggagaagttccccggaggagaccccgcccccaaggcctgagtgcagctctgtgctaagccaacaacaacgacgagctctgagctcttcaccctgacctatggtgccctggtcacccagctatgtaaggactatgaaaatgatgaagatgtgaataaacagctggacaaaatgggctttaacattggagtccggctgattgaagatttcttggctcggtcaaatgttgggaggtgccatgactttcgggaaactgcggatgtcattgccaaggtggcgttcaagatgtacttgggcatcactccaagcattactaattggagcccagctggtgatgaattctccctcattttggaaaataaccccttggtggactttgtggaacttcctgataaccactcatcccttatttattccaatctcttgtgtggggtgttgcggggagctttggagatggtccagatggctgtggaggccaagtttgtccaggacaccctgaaaggagacggtgtgacagaaatccggatgagattcatcaggcggattgaggacaatcttccagctggagaggaataaccatccctacaactcgaggatagccatcaggagcactgttggaatcagcaggcctctgtgctccctctgccctccagaactcagtgactcttgaacatggatgttatatattcttataacctgtttccattctccattcaaataaagagcagactgcgatatagtccattt

SEQ ID NO: 458120 - DNA, 991 bp, Homo sapiens
tgttatttcgatgcaagaggcgggcgctgtcattgtgtatctggctgttcgctgggtgttgccttttctaacccgtggctaggcgagtggggcggggcggccggcaccatgtcgaggcaggcgaaccgtggcaccgagagcaagaaaatggtaacttggagcgcgtgacctcggcgggcggggcgaaattgaggcgtacagggaaggggcccggcgccgagcgcgaggtgcgtttggaaaagggccttcctgtgagctctggcaaggggaagcctcttgctgggtcactccgggggcgttccaggcaggtgaggggaccgtcggagaagttccccggaggagaccccgcccccaaggcctgagtgcagctctgtgctaagccaacaacaacgacggtaataaataccagtaactgccacttacttctctcttactatgtgttgggcaccgggccacgcacgttacagcatctcagttaatctgcagagtagcccctatcagatggataacattgccgttttacagcttggagagcttacgtaatttgcccatatttacacctgggaagttaggatttggacccgtgtttaactccaaagctaatgctaggagctgactgttaggctttactcttaggctacagtgtctcgtactgtggcgtgggtattgtgagagatgttcagatactggtcgtgccagaaaggaacgttttattcaatggaataagagatgggccagaagtaagcagtgagtggtgcccctctaatggagtgggtggctcccttctttcccagggaatagtttggacaccatatggtcctataaagttggactaggggctggggctgcagacttaggtcatttttctttcgttcttccctccctccccccgcccccagacgaaatctctgtcacccggggtggagtgcagtgagccgagatcacatcactgcattccatcctgggtaacagagcaagactccatctaaaa

SEQ ID NO: 458121 - DNA, 829 bp, Homo sapiens
tgttatttcgatgcaagaggcgggcgctgtcattgtgtatctggctgttcgctgggtgttgccttttctaacccgtggctaggcgagtggggcggggcggccggcaccatgtcgaggcaggcgaaccgtggcaccgagagcaagaaaatggtaacttggagcgcgtgacctcggcgggcggggcgaaattgaggcgtacagggaaggggcccggcgccgagcgcgaggtgcgtttggaaaagggccttcctgtgagctctggcaaggggaagcctcttgctgggtcactccgggggcgttccaggcaggtgaggggaccgtcggagaagttccccggaggagaccccgcccccaaggcctgagtgcagctctgtgctaagccaacaacaacgacgagctctgagctcttcaccctgacctatggtgccctggtcacccagctatgtaaggactatgaaaatgatgaagatgtgaataaacagctggacaaaatgggctttaacattggagtccggctgattgaagatttcttggctcggtcaaatgttgggaggtgccatgactttcgggaaactgcggatgtcattgccaagtgctgggattacaagcgtgagccactgtgcccggcaccagttacctcatctttaacatgaagaaaataagagctacccccagggctgttttaaggagtaaatgaataatggacatgaacatttaggtaaaatgctagtgtttagcatagtgttgtgcatatagtaaatgtttactattactagtattagtgctatctgttatagtattaataaatgacatagcacccataactttg

SEQ ID NO: 458122 - DNA, 1915 bp, Homo sapiens
  misc_feature (1332)..(1333): n is a, c, g, or t
agcgggcgggaggccgcgcaggcgcagtgagtcagtgccggtcggtcttgtgggctgaggggcagcggcttaggctccggcgtctgcaggggtcgccgagctaacccgtggctaggcgagtggggcggggcggccggcaccatgtcgaggcaggcgaaccgtggcaccgagagcaagaaaatgagctctgagctcttcaccctgacctatggtgccctggtcacccagctatgtaaggactatgaaaatgatgaagatgtgaataaacagctggacaaaatgggctttaacattggagtccggctgattgaagatttcttggctcggtcaaatgttgggaggtgccatgactttcgggaaactgcggatgtcattgccaaggtggcgttcaagatgtacttgggcatcactccaagcattactaattggagcccagctggtgatgaattctccctcattttggaaaataaccccttggtggactttgtggaacttcctgataaccactcatcccttatttattccaatctcttgtgtggggtgttgcggggagctttggagatggtccagatggctgtggaggccaagtttgtccaggacaccctgaaaggagacggtgtgacagaaatccggatgagattcatcaggcggattgaggacaatcttccagctggagaggaataaccatccctacaactcgaggatagccatcaggagcactgttggaatcagcaggcctctgtgctccctctgccctccagaactcagtgactcttgaacatggatgttatatattcttataacctgtttccattctccattcaaataaagagcagactgcgatatagtccatttaccccatgtgtgcacattcaggagcgacagtctctgcccccattcccttgagaggggctggatgtaatcacctttggttggactagaaagagctcaaaccattttacattcctgtttgaatttttccaaagcaaaactcactttgaccccattaagaggcaagcctggcacatctatccctgggcctttagaaagccatttgcctcaaatggctatagggttgtggggtggagggaggaagggctgggagggagtggggaggaattgctagctgtagtgtgacacattgtagtgtttgccaggaaaggagccagtcatgccggaaacactgacttctgggaagccacccaggtctcattcctccctgctgttggaggcaacatctcctctttttacagagggtacatccttttttcttacaaattcttcaataaagacacattcttgagtgaaatcccaaaaaaaaacaaaacaaannaacaaagacaagaaaaagaagaaaacacagagcgggcgtgcgcgcggcacaaagaaatctcgcgcgaaaggtgggcaacgaaggaaaaaggggacaacccaggagtcaatggtgcacaagaggaggcggcaccacactaagcaggcgggacatacatacgcgcagggagcggccgagagcgacgagcagctaaaaaaaaaggggagaagaccggggaaaccaaccggcgacgacacccgaggaaaaacccagggaaccggcggagagcaccacacaacaccacgcgcaagcaatagaacagacactccaggcggggcagcacaccccacccaccaccacacgcaagaaacaagacgacagccgccccgaagagggagaagaacaaagacgaaaacgccagcgacccagcggggacccaacacaaccgggtgcgagaagacagcaggcgacgaaggagatgaatagggaaagacaggccacccacagacacaaggcggctgacgcctacacgcaaggcacactcgaaacgcgcgggaggcaacacaccataaccacccccagcgcgcacagcgcgacgcagca

SEQ ID NO: 458123 - DNA, 855 bp, Homo sapiens
agcgggcgggaggccgcgcaggcgcagtgagtcagtgccggtcggtcttgtgggctgaggggcagcggcttaggctccggcgtctgcaggggtcgccgagctaacccgtggctaggcgagtggggcggggcggccggcaccatgtcgaggcaggcgaaccgtggcaccgagagcaagaaaatgagctctgagctcttcaccctgacctatggtgccctggtcacccagctatgtaaggactatgaaaatgatgaagatgtgaataaacagctggacaaaatgggctttaacattggagtccggctgattgaagatttcttggctcggtcaaatgttgggaggtgccatgactttcgggaaactgcggatgtcattgccaaggtggcgttcaagatgtacttgggcatcactccaagcattactaattggagcccagctggtgatgaattctccctcattttggaaaataaccccttggtggactttgtggaacttcctgataaccactcatcccttatttattccaatctcttgtgtggggtgttgcggggagctttggagatggtccagatggctgtggaggccaagtttgtccaggacaccctgaaaggagacggtgtgacagaaatccggatgagattcatcaggcggattgaggacaatcttccagctggagaggaataaccatccctacaactcgaggatagccatcaggagcactgttggaatcagcaggcctctgtgctccctctgccctccagaactcagtgactcttgaacatggatgttatatattcttataacctgtttccattctccattcaaataaagagcagactgcgatatagtccattt

SEQ ID NO: 458124 - DNA, 1370 bp, Homo sapiens
agcgggcgggaggccgcgcaggcgcagtgagtcagtgccggtcggtcttgtgggctgaggggcagcggcttaggctccggcgtctgcaggggtcgccgagctaacccgtggctaggcgagtggggcggggcggccggcaccatgtcgaggcaggcgaaccgtggcaccgagagcaagaaaatgagctctgagctcttcaccctgacctatggtgccctggtcacccagctatgtaaggactatgaaaatgatgaagatgtgaataaacagctggacaaaatgggctttaacattggagtccggctgattgaagatttcttggctcggtcaaatgttgggaggtgccatgactttcgggaaactgcggatgtcattgccaaggtggcgttcaagatgtacttgggcatcactccaagcattactaattggagcccagctggtgatgaattctccctcattttggaaaataaccccttggtggactttgtggaacttcctgataaccactcatcccttatttattccaatctcttgtgtggggtgttgcggggagctttggagatggtccagatggctgtggaggccaagtttgtccaggacaccctgaaaggagacggtgtgacagaaatccggatgagattcatcaggcggattgaggacaatcttccagctggagaggaataaccatccctacaactcgaggatagccatcaggagcactgttggaatcagcaggcctctgtgctccctctgccctccagaactcagtgactcttgaacatggatgttatatattcttataacctgtttccattctccattcaaataaagagcagactgcgatatagtccatttaccccatgtgtgcacattcaggagcgacagtctctgcccccattcccttgagaggggctggatgtaatcacctttggttggactagaaagagctcaaaccattttacattcctgtttgaatttttccaaagcaaaactcactttgaccccattaagaggcaagcctggcacatctatccctgggcctttagaaagccatttgcctcaaatggctatagggttgtggggtggagggaggaagggctgggagggagtggggaggaattgctagctgtagtgtgacacattgtagtgtttgccaggaaaggagccagtcatgccggaaacactgacttctgggaagccacccaggtctcattcctccctgctgttggaggcaacatctcctctttttacagagggtacatccttttttcttacaaattcttcaataaagacacattcttgagtgaaatcccaaaacacacacaccaaaaaacaaaaaaaaccggggggataatggggggggggaaaag

SEQ ID NO: 458125 - DNA, 1882 bp, Homo sapiens
  misc_feature (1299)..(1300): n is a, c, g, or t
tgttatttcgatgcaagaggcgggcgctgtcattgtgtatctggctgttcgctgggtgttgccttttctaacccgtggctaggcgagtggggcggggcggccggcaccatgtcgaggcaggcgaaccgtggcaccgagagcaagaaaatgagctctgagctcttcaccctgacctatggtgccctggtcacccagctatgtaaggactatgaaaatgatgaagatgtgaataaacagctggacaaaatgggctttaacattggagtccggctgattgaagatttcttggctcggtcaaatgttgggaggtgccatgactttcgggaaactgcggatgtcattgccaaggtggcgttcaagatgtacttgggcatcactccaagcattactaattggagcccagctggtgatgaattctccctcattttggaaaataaccccttggtggactttgtggaacttcctgataaccactcatcccttatttattccaatctcttgtgtggggtgttgcggggagctttggagatggtccagatggctgtggaggccaagtttgtccaggacaccctgaaaggagacggtgtgacagaaatccggatgagattcatcaggcggattgaggacaatcttccagctggagaggaataaccatccctacaactcgaggatagccatcaggagcactgttggaatcagcaggcctctgtgctccctctgccctccagaactcagtgactcttgaacatggatgttatatattcttataacctgtttccattctccattcaaataaagagcagactgcgatatagtccatttaccccatgtgtgcacattcaggagcgacagtctctgcccccattcccttgagaggggctggatgtaatcacctttggttggactagaaagagctcaaaccattttacattcctgtttgaatttttccaaagcaaaactcactttgaccccattaagaggcaagcctggcacatctatccctgggcctttagaaagccatttgcctcaaatggctatagggttgtggggtggagggaggaagggctgggagggagtggggaggaattgctagctgtagtgtgacacattgtagtgtttgccaggaaaggagccagtcatgccggaaacactgacttctgggaagccacccaggtctcattcctccctgctgttggaggcaacatctcctctttttacagagggtacatccttttttcttacaaattcttcaataaagacacattcttgagtgaaatcccaaaaaaaaacaaaacaaannaacaaagacaagaaaaagaagaaaacacagagcgggcgtgcgcgcggcacaaagaaatctcgcgcgaaaggtgggcaacgaaggaaaaaggggacaacccaggagtcaatggtgcacaagaggaggcggcaccacactaagcaggcgggacatacatacgcgcagggagcggccgagagcgacgagcagctaaaaaaaaaggggagaagaccggggaaaccaaccggcgacgacacccgaggaaaaacccagggaaccggcggagagcaccacacaacaccacgcgcaagcaatagaacagacactccaggcggggcagcacaccccacccaccaccacacgcaagaaacaagacgacagccgccccgaagagggagaagaacaaagacgaaaacgccagcgacccagcggggacccaacacaaccgggtgcgagaagacagcaggcgacgaaggagatgaatagggaaagacaggccacccacagacacaaggcggctgacgcctacacgcaaggcacactcgaaacgcgcgggaggcaacacaccataaccacccccagcgcgcacagcgcgacgcagca

SEQ ID NO: 458126 - DNA, 1217 bp, Homo sapiens
agcgggcgggaggccgcgcaggcgcagtgagtcagtgccggtcggtcttgtgggctgaggggcagcggcttaggctccggcgtctgcaggggtcgccgagctaacccgtggctaggcgagtggggcggggcggccggcaccatgtcgaggcaggcgaaccgtggcaccgagagcaagaaaatgagctctgagctcttcaccctgacctatggtgccctggtcacccagctatgtaaggactatgaaaatgatgaagatgtgaataaacagctggacaaaatgggctttaacattggagtccggctgattgaagatttcttggctcggtcaaatgttgggaggtgccatgactttcgggaaactgcggatgtcattgccaaggtggcgttcaagatgtacttgggcatcactccaagcattactaattggagcccagctggtgatgaattctccctcattttggaaaataaccccttggtggactttgtggaacttcctgataaccactcatcccttatttattccaatctcttgtgtggggtgttgcggggagctttggagatggtccagatggctgtggaggccaagtttgtccaggacaccctgaaaggagacggtgtgacagaaatccggatgagattcatcaggcggattgaggacaatcttccagctggagaggaataaccatccctacaactcgaggatagccatcaggagcactgttggaatcagcaggcctctgtgctccctctgccctccagaactcagtgactcttgaacatggatgttatatattcttataacctgtttccattctccattcaaataaagagcagactgcgatatagtccatttaccccatgtgtgcacattcaggagcgacagtctctgcccccattcccttgagaggggctggatgtaatcacctttggttggactagaaagagctcaaaccattttacattcctgtttgaatttttccaaagcaaaactcactttgaccccattaagaggcaagcctggcacatctatccctgggcctttagaaagccatttgcctcaaatggctatagggttgtggggtggagggaggaagggctgggagggagtggggaggaattgctagctgtagtgcaacatctcctctttttacagagggtacatccttttttcttacaaattcttcaataaagacacattcttgagtgaaatcccaa

SEQ ID NO: 458127 - DNA, 1258 bp, Homo sapiens
agcgggcgggaggccgcgcaggcgcagtgagtcagtgccggtcggtcttgtgggctgaggggcagcggcttaggctccggcgtctgcaggggtcgccgagctaacccgtggctaggcgagtggggcggggcggccggcaccatgtcgaggcaggcgaaccgtggcaccgagagcaagaaaatgagctctgagctcttcaccctgacctatggtgccctggtcacccagctatgtaaggactatgaaaatgatgaagatttcttggctcggtcaaatgttgggaggtgccatgactttcgggaaactgcggatgtcattgccaaggtggcgttcaagatgtacttgggcatcactccaagcattactaattggagcccagctggtgatgaattctccctcattttggaaaataaccccttggtggactttgtggaacttcctgataaccactcatcccttatttattccaatctcttgtgtggggtgttgcggggagctttggagatggtccagatggctgtggaggccaagtttgtccaggacaccctgaaaggagacggtgtgacagaaatccggatgagattcatcaggcggattgaggacaatcttccagctggagaggaataaccatccctacaactcgaggatagccatcaggagcactgttggaatcagcaggcctctgtgctccctctgccctccagaactcagtgactcttgaacatggatgttatatattcttataacctgtttccattctccattcaaataaagagcagactgcgatatagtccatttaccccatgtgtgcacattcaggagcgacagtctctgcccccattcccttgagaggggctggatgtaatcacctttggttggactagaaagagctcaaaccattttacattcctgtttgaatttttccaaagcaaaactcactttgaccccattaagaggcaagcctggcacatctatccctgggcctttagaaagccatttgcctcaaatggctatagggttgtggggtggagggaggaagggctgggagggagtggggaggaattgctagctgtagtgtgacacattgtagtgtttgccaggaaaggagccagtcatgccggaaacactgacttctgggaagccacccaggtctcattcctccctgctgttggaggcaacatctcctctttttacagagggtacatccttttttcttacaaattcttcaataaagacacattcttgagtgaaatcccaa

SEQ ID NO: 458128 - DNA, 1261 bp, Homo sapiens
agcgggcgggaggccgcgcaggcgcagtgagtcagtgccggtcggtcttgtgggctgaggggcagcggcttaggctccggcgtctgcaggggtcgccgagctaacccgtggctaggcgagtggggcggggcggccggcaccatgtcgaggcaggcgaaccgtggcaccgagagcaagaaaatgagctctgagctcttcaccctgacctatggtgccctggtcacccagctatgtaaggactatgaaaatgatgaagatgtgaataaacagctggacaaaatgggctttaacattggagtccggctgattgaagatttcttggctcggtcaaatgttgggaggtgccatgactttcgggaaactgcggatgtcattgccaaggtggcgttcaagatgtacttgggcatcactccaagcattactaattggagcccagctggtgatgaattctccctcattttggtttattccaatctcttgtgtggggtgttgcggggagctttggagatggtccagatggctgtggaggccaagtttgtccaggacaccctgaaaggagacggtgtgacagaaatccggatgagattcatcaggcggattgaggacaatcttccagctggagaggaataaccatccctacaactcgaggatagccatcaggagcactgttggaatcagcaggcctctgtgctccctctgccctccagaactcagtgactcttgaacatggatgttatatattcttataacctgtttccattctccattcaaataaagagcagactgcgatatagtccatttaccccatgtgtgcacattcaggagcgacagtctctgcccccattcccttgagaggggctggatgtaatcacctttggttggactagaaagagctcaaaccattttacattcctgtttgaatttttccaaagcaaaactcactttgaccccattaagaggcaagcctggcacatctatccctgggcctttagaaagccatttgcctcaaatggctatagggttgtggggtggagggaggaagggctgggagggagtggggaggaattgctagctgtagtgtgacacattgtagtgtttgccaggaaaggagccagtcatgccggaaacactgacttctgggaagccacccaggtctcattcctccctgctgttggaggcaacatctcctctttttacagagggtacatccttttttcttacaaattcttcaataaagacacattcttgagtgaaatcccaa

SEQ ID NO: 458129 - DNA, 1084 bp, Homo sapiens
tgttatttcgatgcaagaggcgggcgctgtcattgtgtatctggctgttcgctgggtgttgccttttctaacccgtggctaggcgagtggggcggggcggccggcaccatgtcgaggcaggcgaaccgtggcaccgagagcaagaaaatggtggcgttcaagatgtacttgggcatcactccaagcattactaattggagcccagctggtgatgaattctccctcattttggaaaataaccccttggtggactttgtggaacttcctgataaccactcatcccttatttattccaatctcttgtgtggggtgttgcggggagctttggagatggtccagatggctgtggaggccaagtttgtccaggacaccctgaaaggagacggtgtgacagaaatccggatgagattcatcaggcggattgaggacaatcttccagctggagaggaataaccatccctacaactcgaggatagccatcaggagcactgttggaatcagcaggcctctgtgctccctctgccctccagaactcagtgactcttgaacatggatgttatatattcttataacctgtttccattctccattcaaataaagagcagactgcgatatagtccatttaccccatgtgtgcacattcaggagcgacagtctctgcccccattcccttgagaggggctggatgtaatcacctttggttggactagaaagagctcaaaccattttacattcctgtttgaatttttccaaagcaaaactcactttgaccccattaagaggcaagcctggcacatctatccctgggcctttagaaagccatttgcctcaaatggctatagggttgtggggtggagggaggaagggctgggagggagtggggaggaattgctagctgtagtgtgacacattgtagtgtttgccaggaaaggagccagtcatgccggaaacactgacttctgggaagccacccaggtctcattcctccctgctgttggaggcaacatctcctctttttacagagggtacatccttttttcttacaaattcttcaataaagacacattcttgagtgaaatcccaa

SEQ ID NO: 458130 - DNA, 1734 bp, Homo sapiens
agcgggcgggaggccgcgcaggcgcagtgagtcagtgccggtcggtcttgtgggctgaggggcagcggcttaggctccggcgtctgcaggggtcgccgagctaacccgtggctaggcgagtggggcggggcggccggcaccatgtcgaggcaggcgaaccgtggcaccgagagcaagaaaatgagctctgagctcttcaccctgacctatggtgccctggtcacccagctatgtaaggactatgaaaatgatgaagatgtgaataaacagctggacaaaatgggctttaacattggagtccggctgattgaagatttcttggctcggtcaaatgttgggaggtgccatgactttcgggaaactgcggatgtcattgccaaggtggcgttcaagatgtacttgggcatcactccaagcattactaattggagcccagctggtgatgaattctccctcattttggaaaataaccccttggtggactttgtggaacttcctgataaccactcatcccttatttattccaatctcttgtgtggggtgttgcggggagctttggagatggtgagtgcaactctttatcttctgggacacccgaaatgcaatagggacttgataagtgtttaaatgaatgaaagagagaaaagaaagggctttggctcaccccagcgctttactgcctgagatggtgatgctgctgaggtaggatccaagtcggacatctttacatggtgatactcctccataccaggctggtggaaggtggtgctgtcagtccccaaagcccaggaacatccattctcagataggcttatttggtgacagtctcattcttgggtattctttgctaagtttctccttaagggttggagccattgtcttatgcaacagaatgttggcgctgtcaatcttgtccttgtgggaaaccagccccccttttttggatgctgtggatgagtcagttatgccccatccccactggttccctagaggctgtggccaggcagctaccccttcattttcccactgtcccccaggtccagatggctgtggaggccaagtttgtccaggacaccctgaaaggagacggtgtgacagaaatccggatgagattcatcaggcggattgaggacaatcttccagctggagaggaataaccatccctacaactcgaggatagccatcaggagcactgttggaatcagcaggcctctgtgctccctctgccctccagaactcagtgactcttgaacatggatgttatatattcttataacctgtttccattctccattcaaataaagagcagactgcgatatagtccatttaccccatgtgtgcacattcaggagcgacagtctctgcccccattcccttgagaggggctggatgtaatcacctttggttggactagaaagagctcaaaccattttacattcctgtttgaatttttccaaagctttagaaagccatttgcctcaaatggctatagggttgtggggtggagggaggaagggctgggagggagtggggaggaattgctagctgtagtgtgacacattgtagtgtttgccaggaaaggagccagtcatgccggaaacactgacttctgggaagccacccaggtctcattcctccctgctgttggaggcaacatctcctctttttacagagggtacatccttttttcttacaaattcttcaataaagacacattcttgagtgaaatcccaa

SEQ ID NO: 458131 - DNA, 2775 bp, Homo sapiens
ggcacccaccgcagcccagcgcgcgttcgtgctccgcagggcgcgcctctctccgccaatgccaggcgcgcgggggagccattaggaggcgaggagagaggagggcgcagctcccgcccagcccagccctgcccagccctgcccggaggcagacgcgccggaaccgggacgcgataaatatgcagagcggaggcttcgcgcagcagagcccgcgcgccgcccgctccgggtgctgaatccaggcgtggggacacgagccaggcgccgccgccggagccagcggagccggggccagagccggagcgcgtccgcgtccacgcagccgccggccggccagcacccagggccctgcatgccaggtcgttggaggtggcagcgagacatgcacccggcccggaagctcctcagcctcctcttcctcatcctgatgggcactgaactcactcaagtgctgcccaccaaccctgaggagagctggcaggtgtacagctctgcccaggacagcgagggcaggtgtatctgcacagtggtcgccccacagcagaccatgtgttcacgggatgcccgcacaaaacagctgaggcagctactggagaaggtgcagaacatgtctcaatccatagaggtcttggacaggcggacccagagagacttgcagtacgtggagaagatggagaaccaaatgaaaggactggagtccaagttcaaacaggtggaggagagtcataagcaacacctggccaggcagtttaaggcgataaaagcgaaaatggatgaacttaggcctttgatacctgtgttggaagagtacaaggccgatgccaaattggtattgcagtttaaagaggaggtccagaatctgacgtcagtgcttaacgagctgcaagaggaaattggcgcctatgactacgatgaacttcagagcagagtgtccaatcttgaagaaaggctccgtgcatgcatgcaaaaactagcttgcgggaagttgacgggcatcagtgaccccgtgactgtcaagacctccggctcgaggttcggatcctggatgacagaccctctcgcccctgaaggcgataaccgggtgtggtacatggacggctatcacaacaaccgcttcgtacgtgagtacaagtccatggttgacttcatgaacacggacaatttcacctcccaccgtctcccccacccctggtcgggcacggggcaggtggtctacaacggttctatctacttcaacaagttccagagccacatcatcatcaggtttgacctgaagacagagaccatcctcaagacccgcagcctggactatgccggttacaacaacatgtaccactacgcctggggtggccactcggacatcgacctcatggtggacgagagcgggctgtgggccgtgtacgccaccaaccagaacgctggcaacatcgtggtcagtaggctggaccccgtgtccctgcagaccctgcagacctgggaacacgagctaccccaagcgcagcgccggggaggccttcatcatctgcggcacgctgtacgtcaccaacggctactcagggggtaccaaggtccactatgcataccagaccaatgcctccacctatgaatacatcgacatcccattccagaacaaatactcccacatctccatgctggactacaaccccaaggaccgggccctgtatgcctggaacaacggccaccagatcctctacaacgtgaccctcttccacgtcatccgctccgacgagttgtagctccctcctcctggaagccaagggcccacgtcctcaccacaaagggactcctgtgaaactgctgccaaaaagataccaataacactaacaataccgatcttgaaaaatcatcagcagtgcggattctgacatcgagggatggcattacctccgtgtttctccctttcgagccggcgggccacagacgtcggaagaaactcccgtatttgcagctggaactgcagcccacggcgccccggttttcctccccgccctgtccctctctggtcaaacaacatactaaagaggcgaggcaatgactgttggcccagttctcaccggggaaaaaacccactgttaggatggccatgaaacatttcccttagaatcgtggtcaagctcccgaggaatgtggcgtcccaggctctttgaagagccatgggctgcaccccggccgtaggcctagtgtaactcgcatccccattgcagtgcccgtttccttgactgtgttgctgtctcttagattaaccgtgctgaggctcccacatagctccctggacctgtgtctagtacatactgaagcgatggtcagagtgtgtagagtgaagttgctgtgcccacattgtttgaactcgcgtaccccgtagatacattgtgcaacgttcttctgttattcccttgaggtggtaacttcgtatgttcagtttatgcgatgattgttgtaaatgcaatgccgtagtttggattaataagtggatggtttttgtttctaaaaagaaaaaaaaaatcagtgttcacccttatagagacatagtcaagttcatgttgataataatcaaaggaattactctcttcttgttaaattagctaaatcatgtaaccgcagataggaagggctcgcctggggaaactctggtttccgatgggacaggaaagtcatacgggcaacagtatgcggaaagtacgttttttaagtaaaaaacaaaggcaaactttgtactatccagttatctaaggaacaataaaaacattaggagat

SEQ ID NO: 458132 - DNA, 1075 bp, Homo sapiens
ggcacccaccgcagcccagcgcgcgttcgtgctccgcagggcgcgcctctctccgccaatgccaggcgcgcgggggagccattaggaggcgaggagagaggagggcgcagctcccgcccagcccagccctgcccagccctgcccggaggcagacgcgccggaaccgggacgcgataaatatgcagagcggaggcttcgcgcagcagagcccgcgcgccgcccgctccgggtgctgaatccaggcgtggggacacgagccaggcgccgccgccggagccagcggagccggggccagagccggagcgcgtccgcgtccacgcagccgccggccggccagcacccagggccctgcatgccaggtcgttggaggtggcagcgagacatgcacccggcccggaagctcctcagcctcctcttcctcatcctgatgggcactgaactcactcaagtgctgcccaccaaccctgaggagagctggcaggtgtacagctctgcccaggacagcgagggcaggtgtatctgcacagtggtcgccccacagcagaccatgtgttcacgggatgcccgcacaaaacagctgaggcagctactggagaaggtgcagaacatgtctcaatccatagaggtcttggacaggcggacccagagagacttgcagtacgtggagaagatggagaaccaaatgaaaggactggagtccaagttcaaacaggtggaggagagtcataagcaacacctggccaggcagtttaagggctaacttaaaagagttttttcaatgctgcagtgactgaagaagcagtccactcccatgtaaccatgaaagagagccagagagctttttgcaccatgcatttttactattattttccaatacttagcaccatttcactaaggaaccttgaatacaaccaggatcctcctttgcatgcgactgtagctgcatttcatgaatagtttgaacccttgtcaatgcattttttgaaaaagaaagaaaaaaaaaacttcgtgtatgtgactcaaagcatgtaaccttaagatgttgcattctaaactgacaataaagacctttccc

SEQ ID NO: 458133 - DNA, 613 bp, Homo sapiens
ggcacccaccgcagcccagcgcgcgttcgtgctccgcagggcgcgcctctctccgccaatgccaggcgcgcgggggagccattaggaggcgaggagagaggagggcgcagctcccgcccagcccagccctgcccagccctgcccggaggcagacgcgccggaaccgggacgcgataaatatgcagagcggaggcttcgcgcagcagagcccgcgcgccgcccgctccgggtgctgaatccaggcgtggggacacgagccaggcgccgccgccggagccagcggagccggggccagagccggagcgcgtccgcgtccacgcagccgccggccggccagcacccagggccctgcatgccaggtcgttggaggtggcagcgagacatgcacccggcccggaagctcctcagcctcctcttcctcatcctgatgggcactgaactcactcaagactccgctgcccccgactccctgctgagaagttcaaagggcagcacgagggggtctttggctgctattgtcatctggagggggaagagtgagagccggatagccaagaccccaggcattttcagaggtggcgggaccttagtcctacccccaacacacacccct

SEQ ID NO: 458134 - DNA, 1123 bp, Homo sapiens
cgggacatgatacaatcgagctcggtacctagtgtgtagctagtatgcgccagaatcctctacaacgtgaccctcttccacgtcatccgctccgacgagttgtagctccctcctcctggaagccaagggcccacgtcctcaccacaaagggactcctgtgaaactgctgccaaaaagataccaataacactaacaataccgatcttgaaaaatcatcagcagtgcggattctgacatcgagggatggcattacctccgtgtttctccctttcgagccggcgggccacagacgtcggaagaaactcccgtatttgcagctggaactgcagcccacggcgccccggttttcctccccgccctgtccctctctggtcaaacaacatactaaagaggcgaggcaatgactgttggcccagttctcaccggggaaaaaacccactgttaggatggccatgaaacatttcccttagaatcgtggtcaagctcccgaggaatgtggcgtcccaggctctttgaagagccatgggctgcaccccggccgtaggcctagtgtaactcgcatccccattgcagtgcccgtttccttgactgtgttgctgtctcttagattaaccgtgctgaggctcccacatagctccctggacctgtgtctagtacatactgaagcgatggtcagagtgtgtagagtgaagttgctgtgcccacattgtttgaactcgcgtaccccgtagatacattgtgcaacgttcttctgttattcccttgaggtggtaacttcgtatgttcagtttatgcgatgattgttgtaaatgcaatgccgtagtttggattaataagtggatggtttttgtttctaaaaagaaaaaaaaaatcagtgttcacccttatagagacatagtcaagttcatgttgataataatcaaaggaattactctcttcttgttaaattagctaaatcatgtaaccgcagataggaagggctcgcctggggaaactctggtttccgatgggacaggaaagtcatacgggcaacagtatgcggaaagtacgttttttaagtaaaaaacaaaggcaaactttgtactatccagttatctaaggaacaataaaaacattaggagat

SEQ ID NO: 458135 - DNA, 1104 bp, Homo sapiens
gagcggagagccggacggcgcttcccggtggcggcggaggagcccggagggacgcagccgggcaaggcagggcgcagggcgggcggcgcgaggcgcagggcgcggcgggcagaggccacctggccaccttccctggcgcccggggaaggcgcggcgatggccggggcgcgcggggcggcggcggcggcgggcgggcggcggcgggccgagggggcgcggggacacagccaggcgcccctgcccgcccggtgcccgccgcctgaaggccgcctgggcgcgggagccggtgccagctcggagcgggcgctggaggcagctcgaggcgcgatgtcggtgccgctgctcaagatcggggtcgtgctgagcaccatggccatgatcactaactggatgtcccagacgctgccctcgctggtgggcctcaacaccaccaagctctcggcggccggcggcgggacgctggaccgcagcaccggcgtgctgcccaccaaccctgaggagagctggcaggtgtacagctctgcccaggacagcgagggcaggtgtatctgcacagtggtcgccccacagcagaccatgtgttcacgggatgcccgcacaaaacagctgaggcagctactggagaaggtgcagaacatgtctcaatccatagaggtcttggacaggcggacccagagagacttgcagtacgtggagaagatggagaaccaaatgaaaggactggagtccaagttcaaacaggtggaggagagtcataagcaacacctggccaggcagtttaagggctaacttaaaagagttttttcaatgctgcagtgactgaagaagcagtccactcccatgtaaccatgaaagagagccagagagctttttgcaccatgcatttttactattattttccaatacttagcaccatttcactaaggaaccttgaatacaaccaggatcctcctttgcatgcgactgtagctgcatttcatgaatagtttgaacccttgtcaatgcattttttgaaaaagaaagaaaaaaaaaacttcgtgtatgtgactcaaagcatgtaaccttaagatgttgcattctaaactgacaataaagacctttccc

SEQ ID NO: 458136 - DNA, 1027 bp, Homo sapiens
gagcggagagccggacggcgcttcccggtggcggcggaggagcccggagggacgcagccgggcaaggcagggcgcagggcgggcggcgcgaggcgcagggcgcggcgggcagaggccacctggccaccttccctggcgcccggggaaggcgcggcgatggccggggccccggtgcccgccgcctgaaggccgcctgggcgcgggagccggtgccagctcggagcgggcgctggaggcagctcgaggcgcgatgtcggtgccgctgctcaagatcggggtcgtgctgagcaccatggccatgatcactaactggatgtcccagacgctgccctcgctggtgggcctcaacaccaccaagctctcggcggccggcggcgggacgctggaccgcagcaccggcgtgctgcccaccaaccctgaggagagctggcaggtgtacagctctgcccaggacagcgagggcaggtgtatctgcacagtggtcgccccacagcagaccatgtgttcacgggatgcccgcacaaaacagctgaggcagctactggagaaggtgcagaacatgtctcaatccatagaggtcttggacaggcggacccagagagacttgcagtacgtggagaagatggagaaccaaatgaaaggactggagtccaagttcaaacaggtggaggagagtcataagcaacacctggccaggcagtttaagggctaacttaaaagagttttttcaatgctgcagtgactgaagaagcagtccactcccatgtaaccatgaaagagagccagagagctttttgcaccatgcatttttactattattttccaatacttagcaccatttcactaaggaaccttgaatacaaccaggatcctcctttgcatgcgactgtagctgcatttcatgaatagtttgaacccttgtcaatgcattttttgaaaaagaaagaaaaaaaaaacttcgtgtatgtgactcaaagcatgtaaccttaagatgttgcattctaaactgacaataaagacctttccc

SEQ ID NO: 458137 - DNA, 841 bp, Homo sapiens
gcccaatcctgttgaggtgaaatgagccgattgtgctcatcagaggcagttggacatttttgtcctcgcatctggctggtcatcatgaattactctggagggagagatgttgacctgtctaaccaaaaaagcatttatgtctctgagccagcactcccttctctgcggccagcagactcctctaacgaggggggtgtcttcagcaactgggaggtagctcatcttggcaaacgttgttgacacaggcatctctccgagtttccaattttggggtgctgtggctctgggggaagaaaagcaagcgcttgcctatactgtgctaaaccgcattaaaaaaattccaacagaaattgtgacgagggaatctcaataactcttaaagcagtttgttttgactaactcgagcattacagtgggatttttctaactgaccatgcaaatatgtgtttcctgatggctgtctgtttcaggcaggctagtgagctagttcttcaacggtatttcattttcttacttgcagggctaacttaaaagagttttttcaatgctgcagtgactgaagaagcagtccactcccatgtaaccatgaaagagagccagagagctttttgcaccatgcatttttactattattttccaatacttagcaccatttcactaaggaaccttgaatacaaccaggatcctcctttgcatgcgactgtagctgcatttcatgaatagtttgaacccttgtcaatgcattttttgaaaaagaaagaaaaaaaaaacttcgtgtatgtgactcaaagcatgtaaccttaagatgttgcattctaaactgacaataaagacctttccc

SEQ ID NO: 458138 - DNA, 1028 bp, Homo sapiens
ggcacccaccgcagcccagcgcgcgttcgtgctccgcagggcgcgcctctctccgccaatgccaggcgcgcgggggagccattaggaggcgaggagagaggagggcgcagctcccgcccagcccagccctgcccagccctgcccggaggcagacgcgccggaaccgggacgcgataaatatgcagagcggaggcttcgcgcagcagagcccgcgcgccgcccgctccgggtgctgaatccaggcgtggggacacgagccaggcgccgccgccggagccagcggagccggggccagagccggagcgcgtccgcgtccacgcagccgccggccggccagcacccagggccctgcatgccaggtcgttggaggtggcagcgagacatgcacccggcccggaagctcctcagcctcctcttcctcatcctgatgggcactgaactcactcaaaataaaagagaaaacaaagcagagaagatgggagggccagagagcgagaggaagaccacaggagagaagacactgaacgagcttcccttgttttgcctggaagcccacgctggctccctggctctgcccaggatgtgcagtccaaatcccaatccagcagtggggttatgtcgtcccgcttaccctcagagcccttctcctggtgctgcccagacgatcagccagtccctcctggagaggttctgcatggcctctaggagagaagttttcttggccccaggaaggcctggtggagggtggtggttgtgcactgttgctggacagatgcattcattcatgtgcacacacacacacacacatgcacacacaggggagcagatacctgcagagaagagccaaccaggtcctgattagtggcaagctgccccacaaagggctatgcctgtgtcttattgagacaccttggcaaagagatggctgattctgggtggtcctggacatggccgcacccaagggccctccaagccttaatggcaccctgaagcctccatgcccaggccaaaagatgcttttcctccct

SEQ ID NO: 458139 - DNA, 2804 bp, Homo sapiens
gagcggagagccggacggcgcttcccggtggcggcggaggagcccggagggacgcagccgggcaaggcagggcgcagggcgggcggcgcgaggcgcagggcgcggcgggcagaggccacctggccaccttccctggcgcccggggaaggcgcggcgatggccggggcgcgcggggcggcggcggcggcgggcgggcggcggcgggccgagggggcgcggggacacagccaggcgcccctgcccgcccggtgcccgccgcctgaaggccgcctgggcgcgggagccggtgccagctcggagcgggcgctggaggcagctcgaggcgcgatgtcggtgccgctgctcaagatcggggtcgtgctgagcaccatggccatgatcactaactggatgtcccagacgctgccctcgctggtgggcctcaacaccaccaagctctcggcggccggcggcgggacgctggaccgcagcaccggcgtgctgcccaccaaccctgaggagagctggcaggtgtacagctctgcccaggacagcgagggcaggtgtatctgcacagtggtcgccccacagcagaccatgtgttcacgggatgcccgcacaaaacagctgaggcagctactggagaaggtgcagaacatgtctcaatccatagaggtcttggacaggcggacccagagagacttgcagtacgtggagaagatggagaaccaaatgaaaggactggagtccaagttcaaacaggtggaggagagtcataagcaacacctggccaggcagtttaaggcgataaaagcgaaaatggatgaacttaggcctttgatacctgtgttggaagagtacaaggccgatgccaaattggtattgcagtttaaagaggaggtccagaatctgacgtcagtgcttaacgagctgcaagaggaaattggcgcctatgactacgatgaacttcagagcagagtgtccaatcttgaagaaaggctccgtgcatgcatgcaaaaactagcttgcgggaagttgacgggcatcagtgaccccgtgactgtcaagacctccggctcgaggttcggatcctggatgacagaccctctcgcccctgaaggcgataaccgggtgtggtacatggacggctatcacaacaaccgcttcgtacgtgagtacaagtccatggttgacttcatgaacacggacaatttcacctcccaccgtctcccccacccctggtcgggcacggggcaggtggtctacaacggttctatctacttcaacaagttccagagccacatcatcatcaggtttgacctgaagacagagaccatcctcaagacccgcagcctggactatgccggttacaacaacatgtaccactacgcctggggtggccactcggacatcgacctcatggtggacgagagcgggctgtgggccgtgtacgccaccaaccagaacgctggcaacatcgtggtcagtaggctggaccccgtgtccctgcagaccctgcagacctgggaacacgagctaccccaagcgcagcgccggggaggccttcatcatctgcggcacgctgtacgtcaccaacggctactcagggggtaccaaggtccactatgcataccagaccaatgcctccacctatgaatacatcgacatcccattccagaacaaatactcccacatctccatgctggactacaaccccaaggaccgggccctgtatgcctggaacaacggccaccagatcctctacaacgtgaccctcttccacgtcatccgctccgacgagttgtagctccctcctcctggaagccaagggcccacgtcctcaccacaaagggactcctgtgaaactgctgccaaaaagataccaataacactaacaataccgatcttgaaaaatcatcagcagtgcggattctgacatcgagggatggcattacctccgtgtttctccctttcgagccggcgggccacagacgtcggaagaaactcccgtatttgcagctggaactgcagcccacggcgccccggttttcctccccgccctgtccctctctggtcaaacaacatactaaagaggcgaggcaatgactgttggcccagttctcaccggggaaaaaacccactgttaggatggccatgaaacatttcccttagaatcgtggtcaagctcccgaggaatgtggcgtcccaggctctttgaagagccatgggctgcaccccggccgtaggcctagtgtaactcgcatccccattgcagtgcccgtttccttgactgtgttgctgtctcttagattaaccgtgctgaggctcccacatagctccctggacctgtgtctagtacatactgaagcgatggtcagagtgtgtagagtgaagttgctgtgcccacattgtttgaactcgcgtaccccgtagatacattgtgcaacgttcttctgttattcccttgaggtggtaacttcgtatgttcagtttatgcgatgattgttgtaaatgcaatgccgtagtttggattaataagtggatggtttttgtttctaaaaagaaaaaaaaaatcagtgttcacccttatagagacatagtcaagttcatgttgataataatcaaaggaattactctcttcttgttaaattagctaaatcatgtaaccgcagataggaagggctcgcctggggaaactctggtttccgatgggacaggaaagtcatacgggcaacagtatgcggaaagtacgttttttaagtaaaaaacaaaggcaaactttgtactatccagttatctaaggaacaataaaaacattaggagat

SEQ ID NO: 458140 - DNA, 1700 bp, Homo sapiens
ggcacccaccgcagcccagcgcgcgttcgtgctccgcagggcgcgcctctctccgccaatgccaggcgcgcgggggagccattaggaggcgaggagagaggagggcgcagctcccgcccagcccagccctgcccagccctgcccggaggcagacgcgccggaaccgggacgcgataaatatgcagagcggaggcttcgcgcagcagagcccgcgcgccgcccgctccgggtgctgaatccaggcgtggggacacgagccaggcgccgccgccggagccagcggagccggggccagagccggagcgcgtccgcgtccacgcagccgccggccggccagcacccagggccctgcatgccaggtcgttggaggtggcagcgagacatgcacccggcccggaagctcctcagcctcctcttcctcatcctgatgggcactgaactcactcaagtgctgcccaccaaccctgaggagagctggcaggtgtacagctctgcccaggacagcgagggcaggtgtatctgcacagtggtcgccccacagcagaccatgtgttcacgggatgcccgcacaaaacagctgaggcagctactggagaaggtgcagaacatgtctcaatccatagaggtcttggacaggcggacccagagagacttgcagtacgtggagaagatggagaaccaaatgaaaggactggagtccaagttcaaacaggtggaggagagtcataagcaacacctggccaggcagtttaaggcgataaaagcgaaaatggatgaacttaggcctttgatacctgtgttggaagagtacaaggccgatgccaaattggtattgcagtttaaagaggaggtccagaatctgacgtcagtgcttaacgagctgcaagaggaaattggcgcctatgactacgatgaacttcagagcagagtgtccaatcttgaagaaaggctccgtgcatgcatgcaaaaactagcttgcgggaagttgacgggcatcagtgaccccgtgactgtcaagacctccggctcgaggttcggatcctggatgacagaccctctcgcccctgaaggcgataaccgggtgtggtacatggacggctatcacaacaaccgcttcgtacgtgagtacaagtccatggttgacttcatgaacacggacaatttcacctcccaccgtctcccccacccctggtcgggcacggggcaggtggtctacaacggttctatctacttcaacaagttccagagccacatcatcatcaggtttgacctgaagacagagaccatcctcaagacccgcagcctggactatgccggttacaacaacatgtaccactacgcctggggtggccactcggacatcgacctcatggtggacgagagcgggctgtgggccgtagtttggattaataagtggatggtttttgtttctaaaaagaaaaaaaaaatcagtgttcacccttatagagacatagtcaagttcatgttgataataatcaaaggaattactctcttcttgttaaattagctaaatcatgtaaccgcagataggaagggctcgcctggggaaactctggtttccgatgggacaggaaagtcatacgggcaacagtatgcggaaagtacgttttttaagtaaaaaacaaaggcaaactttgtactatccagttatctaaggaacaataaaaacattaggagat

SEQ ID NO: 458141 - DNA, 575 bp, Homo sapiens
  misc_feature (18)..(18): n is a, c, g, or t
  misc_feature (49)..(50): n is a, c, g, or t
  misc_feature (71)..(71): n is a, c, g, or t
  misc_feature (98)..(98): n is a, c, g, or t
tgcccctggtggagctgngcagacacccatgtatacccacagcatcgcnncctgatgaaggaggcaaaggnttgatcttctatgacacgaaggtaccntgatgaatcgagtgctgaatgccactgtgcagaggacagcggacccagagagacttgcagtacgtggagaagatggagaaccaaatgaaaggactggagtccaagttcaaacaggtggaggagagtcataagcaacacctggccaggcagtttaagggctaacttaaaagagttttttcaatgctgcagtgactgaagaagcagtccactcccatgtaaccatgaaagagagccagagagctttttgcaccatgcatttttactattattttccaatacttagcaccatttcactaaggaaccttgaatacaaccaggatcctcctttgcatgcgactgtagctgcatttcatgaatagtttgaacccttgtcaatgcattttttgaaaaagaaagaaaaaaaaaacttcgtgtatgtgactcaaagcatgtaaccttaagatgttgcattctaaactgacaataaagacctttccc

SEQ ID NO: 458142 - DNA, 2531 bp, Homo sapiens
tcccttggccccaggagacaggggttgcagaaagccgagatcgtgccactgcactccatcctgggtgagagagcaagaccctgtctcaacaaaaaatttttaaaaaataaaataaataataatacagcaaaaagatttgctttctcggcttcagtgtgggcggtaactccatcgtgcaatgagaaaggcgaatttcttccagacaccaatcccggaggtcgcttctgttgctaggctcccagaaagcagggttcggacgtcattgggaggcgaggctagagcggggttgtgtgtggcggagggaggcggggctggaggaaacgctcgttgctaaggaacgcagcgctcttcccgctctggagaggcgcgactgggcttgcgcagtgtcgacgccggcgccggcgcgccggggtttgaaaggcccgagcctcgcgcgcttgcgcactttagccagcgcagggcgcaccccgctccctcccactctccctgcccctcggaccccatactctacctcatccttctggccaggcgaagcccacgacgttgacatgccggagatccgcctccgccatgtcgtgtcctgcagcagccaggactcgactcactgtgcagaaaatcttctcaaggcagacacttaccgaaaatggcgggcagccaaggcaggcgagaagaccatctctgtggtcctacagttggagaaggaggagcagatacacagtgtggacattgggaatgatggctcagctttcgtggaggtgctggtgggcagttcagctggaggcgctggggagcaagactatgaggtccttctggtcacctcatctttcatgtccccttccgagagccgcagtggctcaaaccccaaccgcgttcgcatgtttgggcctgacaagctggtccgggcagccgccgagaagcgctgggaccgggtcaaaattgtttgcagccagccctacagcaaggactccccctttggcttgagttttgtacggtttcatagccccccagacaaagatgaggcagaggccccgtcccagaaggtgacagtgaccaagcttggccagttccgtgtgaaggaggaggatgagagcgccaactctctgaggccgggggctctcttcttcagccggatcaacaagacatccccagtcacagccagcgacccagcaggacctagctatgcagctgctaccctccaggcttctagtgctgcctcctcagcctctccagtctccagggccataggcagcacctccaagccccaggagtctcccaaagggaagaggaagttggatttgaaccaagaagaaaagaagacccccagcaaaccaccagcccagctgtcgccatctgttcccaagagacctaaattgccagctccaactcgtaccccagccacagccccagtccctgcccgagcacagggggcagtgacaggcaaaccccgaggagaaggcaccgagcccagacgaccccgagctggcccagaggagctggggaagatccttcagggtgtggtagtggtgctgagtggcttccagaaccccttccgctccgagctgcgagataaggccctagagcttggggccaagtatcggccagactggacccgggacagcacgcacctcatctgtgcctttgccaacacccccaagtacagccaggtcctaggcctgggaggccgcatcgtgcgtaaggagtgggtgctggactgtcaccgcatgcgtcggcggctgccctcccggaggtacctcatggcagggccaggttccagcagtgaggaggatgaggcctctcacagcggtggcagcggagatgaagcccccaagcttcctcagaagcaaccccagaccaaaaccaagcccactcaggcagctggacccagctcaccccagaagcccccaacccctgaagagaccaaagcagcctcaccagtgctccaggaagatatagacattgagggggtacagtcagaaggacaggacaatggggcggaagattctggggacacagaggatgagctgaggagggtggcagagcagaaggaacacagactgccccctggccaggaggagaatggggaagacccgtatgcaggctccacggatgagaacacggacagtgaggaacaccaggagcctcctgatctgccagtccctgagctcccagatttcttccagggcaagcacttctttctttacggggagttccctggggacgagcggcggaaactcatccgatacgtcacagccttcaatggggagctcgaggactatatgagtgaccgggttcagtttgtgatcacagcacaggaatgggatcccagctttgaggaggccctgatggacaacccctccctggcattcgttcgtccccgatggatctacagttgcaatgagaagcagaagttacttcctcaccagctctatggggtggtgccgcaagcctgaagtatgtgctatacacacacacacacacacacacacacacacacacacacgatgcatttaataaagatgagttggttctca

SEQ ID NO: 458143 - DNA, 2278 bp, Homo sapiens
gtgatccaccggcctcagcctcccaaagtgctgggattataggcgtgagccactgcacccgtcctaatttttgtatttttagtagagatggggtttcaccatgttggctaagctggtctggaactcatggcctcaagttatctgcccacctcagcctcccaaagtgctgagtaagccaagttttctaatagccacattagacaagtaaaaggaaacaggttaaattcattttaacatgttttacttaacccaatgtatccaaaatagcatttcaacatgtcatcggttttttagttttttttttttttgagatagtgcttcgctttgttgcccaggctggagtgcagtggcacaatctcggctcactgcaacctccaccttccaggttcaagtgattctcctgcctcagcctcccgagtagctgggattacaggcacccgccaccatgcccactaatttttgtatttttggttagagatggggtttcgccatgttggccaggctagtctcaaactcctgacctcaggtgatccacccacctcggcctcccaaagtgctaggattacaggcgtgaggcaccgtgcctggcgtcatcggtattatttaaatgaattatgttacgttcttttgtgctgtcttcaaaatctgttatatattttacacttacaccaaatctcaattaccatggtacatttttatctgaaatgcttgacctttattttgatttcataaaattcatagttggagaagtagattcacatatccaagttgttccaattatataatagttttccaaaaactgagatgggtgtccattttttttttaagtaaagatgcaggtctggttatgttgaccaagttgctgggttgttttgttttgttttgagacagagtctcactttgtcacccaggctggagtgcagtggcatgacctcagctcactgcaacctctgcctcccaggttcaactgattctcttgcatcatcctcctgagtagctgggactacaggtgtatgccaccatgcctggctaattttggtatttttctcagagacggggtttcaccatgttgggcatgctggtcttgaactgctgacctcaggtgatccgcccacctcggcctcccaaagtgctggtattacaggcatgggccaccacacctggcctcagctgttcaattaaaagtaaatacaacttaaaattctatgtttcattggcagtagtgcaacattaatactgagtagccacatgtgattagtggctatggtattggacagggaaggtacagaatacttccatcaacatagaaaattctatcagtctagctctaggggcagatagtccttccactgacttgggcaagtcactctacaaatggcatctacctcacatggttatggtgagaattcagcgtatgtatgtacatgcaggcacacaatatgcacacagacacataacatagtacaccctttcctgaaaagcctgacacatggagctcaaacatgagtgccacccacccctgggcagcaccaagatggctctagtctgggtgcctttgtctcacccccatgcctttgctcggagtgtgctcctcatttttctgccactttgaccctgtctctgatttggtcctgtctgacatcactgctatatgctttgctcctctcaatttcctctgccctcatgccagcaggagtcatgccagagatcatatctgagaaagcaagacaattttgtgtgtgtgtctgtgcccatagaggagtgctggttgtgttgatatagttgtagattggttgtgtttacacagttgtatatattgacacccttgagtgttatgacttcttttgggggtggtcgccttttaaatcataacttttaatgggattccattttagtctttgtgaagacataaggttgttggcaggcatctgtccctgggagcatccaagcagaaaagactaagactcccttgtagacagatcactggccgccactgaagtgtgtctgcatggcaccacagggctggaagacccttgaaggcaggaattcaaggaaatgtatgatgaattttggcattgccatcaaaagcagaacaggcatggaaaacttgggtgagtgggcgagacaacctcctcaccacagcagagttccatccatgcctggataatgatggagggatttgtgtccactgcagtggggaaccatgaaggacacatcaagggtgtggttggcctgtggtgctctttggaggaatgaataaaaatgaatagaaatccta

SEQ ID NO: 458144 - DNA, 2515 bp, Homo sapiens
tcccttggccccaggagacaggggttgcagaaagccgagatcgtgccactgcactccatcctgggtgagagagcaagaccctgtctcaacaaaaaatttttaaaaaataaaataaataataatacagcaaaaagatttgctttctcggcttcagtgtgggcggtaactccatcgtgcaatgagaaaggcgaatttcttccagacaccaatcccggaggtcgcttctgttgctaggctcccagaaagcagggttcggacgtcattgggaggcgaggctagagcggggttgtgtgtggcggagggaggcggggctggaggaaacgctcgttgctaaggaacgcagcgctcttcccgctctggagaggcgcgactgggcttgcgcagtgtcgacgccggcgccggcgcgccggggtttgaaaggcccgagcctcgcgcgcttgcgcactttagccagcgcagggcgcaccccgctccctcccactctccctgcccctcggaccccatactctacctcatccttctggccaggcgaagcccacgacgttgacatgccggagatccgcctccgccatgtcgtgtcctgcagcagccaggactcgactcactgtgcagaaaatcttctcaaggcagacacttaccgaaaatggcgggcagccaaggcaggcgagaagaccatctctgtggtcctacagttggagaaggaggagcagatacacagtgtggacattgggaatgatggctcagctttcgtggaggtgctggtgggcagttcagctggaggcgctggggagcaagactatgaggtccttctggtcacctcatctttcatgtccccttccgagagccgcagtggctcaaaccccaaccgcgttcgcatgtttgggcctgacaagctggtccgggcagccgccgagaagcgctgggaccgggtcaaaattgtttgcagccagccctacagcaaggactccccctttggcttgagttttgtacggtttcatagccccccagacaaagatgaggcagaggccccgtcccagaaggtgacagtgaccaagcttggccagttccgtgtgaaggaggaggatgagagcgccaactctctgaggccgggggctctcttcttcagccggatcaacaagacatccccagtcacagccagcgacccagcaggacctagctatgcagctgctaccctccaggcttctagtgctgcctcctcagcctctccagtctccagggccataggcagcacctccaagccccaggagtctcccaaagggaagaggaagttggatttgaaccaagaagaaaagaagacccccagcaaaccaccagcccagctgtcgccatctgttcccaagagacctaaattgccagctccaactcgtaccccagccacagccccagtccctgcccgagcacagggggcagtgacaggcaaaccccgaggagaaggcaccgagcccagacgaccccgagctggcccagaggagctggggaagatccttcagggtgtggtagtggtgctgagtggcttccagaaccccttccgctccgagctgcgagataaggccctagagcttggggccaagtatcggccagactggacccgggacagcacgcacctcatctgtgcctttgccaacacccccaagtacagccaggtcctaggcctgggaggccgcatcgtgcgtaaggagtgggtgctggactgtcaccgcatgcgtcggcggctgccctcccggaggtacctcatggcagggccaggttccagcagtgaggaggatgaggcctctcacagcggtggcagcggagatgaagcccccaagcttcctcagaagcaaccccagaccaaaaccaagcccactcaggcagctggacccagctcaccccagaagcccccaacccctgaagagaccaaagcagcctcaccagtgctccaggaagatatagacattgagggggtacagtcagaaggacaggacaatggggcggaagattctggggacacagaggatgagctgaggagggtggcagagcagaaggaacacagactgccccctggccaggaggagaatggggaagacccgtatgcaggctccacggatgagaacacggacagtgaggaacaccaggagcctcctgatctgccagtccctgagctcccagatttcttccagggcaagcacttctttctttacggggagttccctggggacgagcggcggaaactcatccgatacgtcacagccttcaatggggagctcgaggactatatgagtgaccgggttcagtttgtgatcacagcacaggaatgggatcccagctttgaggaggccctgatggacaacccctccctggcattcgttcgtccccgatggatctacagttgcaatgagaagcagaagttacttcctcaccagctctatggggtggtgccgcaagcctgaagtatgtgctacacacacacacacacacacacacgatgcatttaataaagatgagttggttctca

SEQ ID NO: 458145 - DNA, 3108 bp, Homo sapiens
  misc_feature (2535)..(2535): n is a, c, g, or t
  misc_feature (2537)..(2537): n is a, c, g, or t
tcccttggccccaggagacaggggttgcagaaagccgagatcgtgccactgcactccatcctgggtgagagagcaagaccctgtctcaacaaaaaatttttaaaaaataaaataaataataatacagcaaaaagatttgctttctcggcttcagtgtgggcggtaactccatcgtgcaatgagaaaggcgaatttcttccagacaccaatcccggaggtcgcttctgttgctaggctcccagaaagcagggttcggacgtcattgggaggcgaggctagagcggggttgtgtgtggcggagggaggcggggctggaggaaacgctcgttgctaaggaacgcagcgctcttcccgctctggagaggcgcgactgggcttgcgcagtgtcgacgccggcgccggcgcgccggggtttgaaaggcccgagcctcgcgcgcttgcgcactttagccagcgcagggcgcaccccgctccctcccactctccctgcccctcggaccccatactctacctcatccttctggccaggcgaagcccacgacgttgacatgccggagatccgcctccgccatgtcgtgtcctgcagcagccaggactcgactcactgtgcagaaaatcttctcaaggcagacacttaccgaaaatggcgggcagccaaggcaggcgagaagaccatctctgtggtcctacagttggagaaggaggagcagatacacagtgtggacattgggaatgatggctcagctttcgtggaggtgctggtgggcagttcagctggaggcgctggggagcaagactatgaggtccttctggtcacctcatctttcatgtccccttccgagagccgcagtggctcaaaccccaaccgcgttcgcatgtttgggcctgacaagctggtccgggcagccgccgagaagcgctgggaccgggtcaaaattgtttgcagccagccctacagcaaggactccccctttggcttgagttttgtacggtttcatagccccccagacaaagatgaggcagaggccccgtcccagaaggtgacagtgaccaagcttggccagttccgtgtgaaggaggaggatgagagcgccaactctctgaggccgggggctctcttcttcagccggatcaacaagacatccccagtcacagccagcgacccagcaggacctagctatgcagctgctaccctccaggcttctagtgctgcctcctcagcctctccagtctccagggccataggcagcacctccaagccccaggagtctcccaaagggaagaggaagttggatttgaaccaagaagaaaagaagacccccagcaaaccaccagcccagctgtcgccatctgttcccaagagacctaaattgccagctccaactcgtaccccagccacagccccagtccctgcccgagcacagggggcagtgacaggcaaaccccgaggagaaggcaccgagcccagacgaccccgagctggcccagaggagctggggaagatccttcagggtgtggtagtggtgctgagtggcttccagaaccccttccgctccgagctgcgagataaggccctagagcttggggccaagtatcggccagactggacccgggacagcacgcacctcatctgtgcctttgccaacacccccaagtacagccaggtcctaggcctgggaggccgcatcgtgcgtaaggagtgggtgctggactgtcaccgcatgcgtcggcggctgccctcccggaggtacctcatggcagggccaggttccagcagtgaggaggatgaggcctctcacagcggtggcagcggagatgaagcccccaagcttcctcagaagcaaccccagaccaaaaccaagcccactcaggcagctggacccagctcaccccagaagcccccaacccctgaagagaccaaagcagcctcaccagtgctccaggaagatatagacattgagggggtacagtcagaaggacaggacaatggggcggaagattctggggacacagaggatgagctgaggagggtggcagagcagaaggaacacagactgccccctggccaggaggagaatggggaagacccgtatgcaggctccacggatgagaacacggacagtgaggaacaccaggagcctcctgatctgccagtccctgagctcccagatttcttccagggcaagcacttctttctttacggggagttccctggggacgagcggcggaaactcatccgatacgtcacagccttcaatgggccctgatggacaacccctccctggcattcgttcgtccccgatggatctacagttgcaatgagaagcagaagttacttcctcaccagctctatggggtggtgccgcaagcctgaagtatgtgctatacacacacacacacacacacacacacacacacacacacgatgcatttaataaagatgagttggttctcatccaagagtctcccaaaactctaagaggctccctgggacctggggaagaatgctgggcacctccgtcagagatctggtananaaggaactctttgtctcttctgcttggccccttatccctgtgttggcaagaggcagggaactgggaatctgaccctcagcactgcccctcaactttttctggccctctgagccacacctgtatcttggctgtccctttgtggctggaggcctgggtacccatgaggcttgtctctctcctgaagcctcagcgtccccaggccagggatagtgcctttcctccagggttttcagaagtagctgtataatgaatgtcaccactgtggttttacatcacctaatttaggaggtagaatgggaggaagggacattttaagcaacctacccaaaccctgcacccccttcaaggctccaccacatttaagtgggaattgaggtgattgtgagggaatcagggcagaggatgggatggtgctctaggcagaggccatagcatgggccaggaggtgggaagcagcctgaggcaggcagaagagcattgctgcctttggcaaagaggctttgggggcagatttagaaagccaggcacagtccttgcagctctgctgtccagtgtgatcaccactgggtac

SEQ ID NO: 458146 - DNA, 2150 bp, Homo sapiens
tcccttggccccaggagacaggggttgcagaaagccgagatcgtgccactgcactccatcctgggtgagagagcaagaccctgtctcaacaaaaaatttttaaaaaataaaataaataataatacagcaaaaagatttgctttctcggcttcagtgtgggcggtaactccatcgtgcaatgagaaaggcgaatttcttccagacaccaatcccggaggtcgcttctgttgctaggctcccagaaagcagggttcggacgtcattgggaggcgaggctagagcggggttgtgtgtggcggagggaggcggggctggaggaaacgctcgttgctaaggaacgcagcgctcttcccgctctggagaggcgcgactgggcttgcgcagtgtcgacgccggcgccggcgcgccggggtttgaaaggcccgagcctcgcgcgcttgcgcactttagccagcgcagggcgcaccccgctccctcccactctccctgcccctcggaccccatactctacctcatccttctggccaggcgaagcccacgacgttgacatgccggagatccgcctccgccatgtcgtgtcctgcagcagccaggactcgactcactgtgcagaaaatcttctcaaggcagacacttaccgaaaatggcgggcagccaaggcaggcgagaagaccatctctgtggtcctacagttggagaaggaggagcagatacacagtgtggacattgggaatgatggctcagctttcgtggaggtgctggtgggcagttcagctggaggcgctggggagcaagactatgaggtccttctggtcacctcatctttcatgtccccttccgagagccgcagtggctcaaaccccaaccgcgttcgcatgtttgggcctgacaagctggtccgggcagccgccgagaagcgctgggaccgggtcaaaattgtttgcagccagccctacagcaaggactccccctttggcttgagttttgtacggtttcatagccccccagacaaagatgaggcagaggccccgtcccagaaggtgacagtgaccaagcttggccagttccgtgtgaaggaggaggatgagagcgccaactctctgaggccgggggctctcttcttcagccggatcaacaagacatccccagtcacagccagcgacccagcaggacctagctatgcagctgctaccctccaggcttctagtgctgcctcctcagcctctccagtctccagggccataggcagcacctccaagccccaggagtctcccaaagggaagaggaagttggatttgaaccaagaagaaaagaagacccccagcaaaccaccagcccagctgtcgccatctgttcccaagagacctaaattgccagctccaactcgtaccccagccacagccccagtccctgcccgagcacagggggcagtgacaggcaaaccccgaggagaaggcaccgagcccagacgaccccgagctggcccagaggagctggggaagatccttcagggtgtggtagtggtgctgagtggcttccagaaccccttccgctccgagctgcgagataaggccctagagcttggggccaagtatcggccagactggacccgggacagcacgcacctcatagaggatgagctgaggagggtggcagagcagaaggaacacagactgccccctggccaggaggagaatggggaagacccgtatgcaggctccacggatgagaacacggacagtgaggaacaccaggagcctcctgatctgccagtccctgagctcccagatttcttccagggcaagcacttctttctttacggggagttccctggggacgagcggcggaaactcatccgatacgtcacagccttcaatggggagctcgaggactatatgagtgaccgggttcagtttgtgatcacagcacaggaatgggatcccagctttgaggaggccctgatggacaacccctccctggcattcgttcgtccccgatggatctacagttgcaatgagaagcagaagttacttcctcaccagctctatggggtggtgccgcaagcctgaagtatgtgctatacacacacacacacacacacacacacacacacacacacgatgcatttaataaagatgagttggttctca

SEQ ID NO: 458147 - DNA, 2075 bp, Homo sapiens
attccaatgcacgggaccgggctttcagttgataaactacatggccctcggcctgtccacatttcacaccaggcgaagcccacgacgttgacatgccggagatccgcctccgccatgtcgtgtcctgcagcagccaggactcgactcactgtgcagaaaatcttctcaaggcagacacttaccgaaaatggcgggcagccaaggcaggcgagaagaccatctctgtggtcctacagttggagaaggaggagcagatacacagtgtggacattgggaatgatggctcagctttcgtggaggtgctggtgggcagttcagctggaggcgctggggagcaagactatgaggtccttctggtcacctcatctttcatgtccccttccgagagccgcagtggctcaaaccccaaccgcgttcgcatgtttgggcctgacaagctggtccgggcagccgccgagaagcgctgggaccgggtcaaaattgtttgcagccagccctacagcaaggactccccctttggcttgagttttgtacggtttcatagccccccagacaaagatgaggcagaggccccgtcccagaaggtgacagtgaccaagcttggccagttccgtgtgaaggaggaggatgagagcgccaactctctgaggccgggggctctcttcttcagccggatcaacaagacatccccagtcacagccagcgacccagcaggacctagctatgcagctgctaccctccaggcttctagtgctgcctcctcagcctctccagtctccagggccataggcagcacctccaagccccaggagtctcccaaagggaagaggaagttggatttgaaccaagaagaaaagaagacccccagcaaaccaccagcccagctgtcgccatctgttcccaagagacctaaattgccagctccaactcgtaccccagccacagccccagtccctgcccgagcacagggggcagtgacaggcaaaccccgaggagaaggcaccgagcccagacgaccccgagctggcccagaggagctggggaagatccttcagggtgtggtagtggtgctgagtggcttccagaaccccttccgctccgagctgcgagataaggccctagagcttggggccaagtatcggccagactggacccgggacagcacgcacctcatctgtgcctttgccaacacccccaagtacagccaggtcctaggcctgggaggccgcatcgtgcgtaaggagtgggtgctggactgtcaccgcatgcgtcggcggctgccctcccggaggtacctcatggcagggccaggttccagcagtgaggaggatgaggcctctcacagcggtggcagcggagatgaagcccccaagcttcctcagaagcaaccccagaccaaaaccaagcccactcaggcagctggacccagctcaccccagaagcccccaacccctgaagagaccaaagcagcctcaccagtgctccaggaagatatagacattgagggggtacagtcagaaggacaggacaatggggcggaagattctggggacacagaggatgagctgaggagggtggcagagcagaaggaacacagactgccccctggccaggaggagaatggggaagacccgtatgcaggctccacggatgagaacacggacagtgaggaacaccaggagcctcctgatctgccagtccctgagctcccagatttcttccagggcaagcacttctttctttacggggagttccctggggacgagcggcggaaactcatccgatacgtcacagccttcaatggggagctcgaggactatatgagtgaccgggttcagtttgtgatcacagcacaggaatgggatcccagctttgaggaggccctgatggacaacccctccctggcattcgttcgtccccgatggatctacagttgcaatgagaagcagaagttacttcctcaccagctctatggggtggtgccgcaagcctgaagtatgtgctatacacacacacacacacacacacacacacacacacacacgatgcatttaataaagatgagttggttctca

SEQ ID NO: 458148 - DNA, 2544 bp, Homo sapiens
cgctactggctgtgcggaacctccgtcctggggattcacagactgccgcccaggcccgtgatcagacagcagctctgctgaacagcgcggggttaggagctgcggatctgtttgtgctaccggcgaactgcggcagcagcgacggctgcgaggagctagagcgcctccgggcggcgctgcagagccaggcagaagcgctgcgcaggctcctgccaccggcgcaggatggcttcgaggtgttgggtgcagcagagctagaggctgtgcgtgaggcctttgagaccggcggccttgaggctgcgctgtcgtgggtgcgctcaggcctggagcgcctgggcagcgcacggctagacctggccgtggctggcaaggctgacgtgggccttgtggtggacatgctgcttggattggatcctggcgacccaggcgctgcgcctgcttcggtccccacagcacccactcccttcccagccccagagcgcccgaatgtggtgctctggaccgtgcctctgggccacacgggcactgccaccaccgcggccgccgcctctcacccaacgcactacgacgccctcatcctcgtcacccctggggcccccactgagaaggactgggcccaggtccaggccttgctgctaccagatgcgcctcttgtctgcgtgcgcacagacggcgagggcgaggatccggagtgtctgggagaagttggagaaggaggagcagatacacagtgtggacattgggaatgatggctcagctttcgtggaggtgctggtgggcagttcagctggaggcgctggggagcaagactatgaggtccttctggtcacctcatctttcatgtccccttccgagagccgcagtggctcaaaccccaaccgcgttcgcatgtttgggcctgacaagctggtccgggcagccgccgagaagcgctgggaccgggtcaaaattgtttgcagccagccctacagcaaggactccccctttggcttgagttttgtacggtttcatagccccccagacaaagatgaggcagaggccccgtcccagaaggtgacagtgaccaagcttggccagttccgtgtgaaggaggaggatgagagcgccaactctctgaggccgggggctctcttcttcagccggatcaacaagacatccccagtcacagccagcgacccagcaggacctagctatgcagctgctaccctccaggcttctagtgctgcctcctcagcctctccagtctccagggccataggcagcacctccaagccccaggagtctcccaaagggaagaggaagttggatttgaaccaagaagaaaagaagacccccagcaaaccaccagcccagctgtcgccatctgttcccaagagacctaaattgccagctccaactcgtaccccagccacagccccagtccctgcccgagcacagggggcagtgacaggcaaaccccgaggagaaggcaccgagcccagacgaccccgagctggcccagaggagctggggaagatccttcagggtgtggtagtggtgctgagtggcttccagaaccccttccgctccgagctgcgagataaggccctagagcttggggccaagtatcggccagactggacccgggacagcacgcacctcatctgtgcctttgccaacacccccaagtacagccaggtcctaggcctgggaggccgcatcgtgcgtaaggagtgggtgctggactgtcaccgcatgcgtcggcggctgccctcccggaggtacctcatggcagggccaggttccagcagtgaggaggatgaggcctctcacagcggtggcagcggagatgaagcccccaagcttcctcagaagcaaccccagaccaaaaccaagcccactcaggcagctggacccagctcaccccagaagcccccaacccctgaagagaccaaagcagcctcaccagtgctccaggaagatatagacattgagggggtacagtcagaaggacaggacaatggggcggaagattctggggacacagaggatgagctgaggagggtggcagagcagaaggaacacagactgccccctggccaggaggagaatggggaagacccgtatgcaggctccacggatgagaacacggacagtgaggaacaccaggagcctcctgatctgccagtccctgagctcccagatttcttccagggcaagcacttctttctttacggggagttccctggggacgagcggcggaaactcatccgatacgtcacagccttcaatggggagctcgaggactatatgagtgaccgggttcagtttgtgatcacagcacaggaatgggatcccagctttgaggaggccctgatggacaacccctccctggcattcgttcgtccccgatggatctacagttgcaatgagaagcagaagttacttcctcaccagctctatggggtggtgccgcaagcctgaagtatgtgctatacacacacacacacacacacacacacacacacacacacgatgcatttaataaagatgagttggttctca

SEQ ID NO: 458149 - DNA, 1877 bp, Homo sapiens
ggagagactgagggagtattgcagcggtcaccaacatgttggagaaggaggagcagatacacagtgtggacattgggaatgatggctcagctttcgtggaggtgctggtgggcagttcagctggaggcgctggggagcaagactatgaggtccttctggtcacctcatctttcatgtccccttccgagagccgcagtggctcaaaccccaaccgcgttcgcatgtttgggcctgacaagctggtccgggcagccgccgagaagcgctgggaccgggtcaaaattgtttgcagccagccctacagcaaggactccccctttggcttgagttttgtacggtttcatagccccccagacaaagatgaggcagaggccccgtcccagaaggtgacagtgaccaagcttggccagttccgtgtgaaggaggaggatgagagcgccaactctctgaggccgggggctctcttcttcagccggatcaacaagacatccccagtcacagccagcgacccagcaggacctagctatgcagctgctaccctccaggcttctagtgctgcctcctcagcctctccagtctccagggccataggcagcacctccaagccccaggagtctcccaaagggaagaggaagttggatttgaaccaagaagaaaagaagacccccagcaaaccaccagcccagctgtcgccatctgttcccaagagacctaaattgccagctccaactcgtaccccagccacagccccagtccctgcccgagcacagggggcagtgacaggcaaaccccgaggagaaggcaccgagcccagacgaccccgagctggcccagaggagctggggaagatccttcagggtgtggtagtggtgctgagtggcttccagaaccccttccgctccgagctgcgagataaggccctagagcttggggccaagtatcggccagactggacccgggacagcacgcacctcatctgtgcctttgccaacacccccaagtacagccaggtcctaggcctgggaggccgcatcgtgcgtaaggagtgggtgctggactgtcaccgcatgcgtcggcggctgccctcccggaggtacctcatggcagggccaggttccagcagtgaggaggatgaggcctctcacagcggtggcagcggagatgaagcccccaagcttcctcagaagcaaccccagaccaaaaccaagcccactcaggcagctggacccagctcaccccagaagcccccaacccctgaagagaccaaagcagcctcaccagtgctccaggaagatatagacattgagggggtacagtcagaaggacaggacaatggggcggaagattctggggacacagaggatgagctgaggagggtggcagagcagaaggaacacagactgccccctggccaggaggagaatggggaagacccgtatgcaggctccacggatgagaacacggacagtgaggaacaccaggagcctcctgatctgccagtccctgagctcccagatttcttccagggcaagcacttctttctttacggggagttccctggggacgagcggcggaaactcatccgatacgtcacagccttcaatggggagctcgaggactatatgagtgaccgggttcagtttgtgatcacagcacaggaatgggatcccagctttgaggaggccctgatggacaacccctccctggcattcgttcgtccccgatggatctacagttgcaatgagaagcagaagttacttcctcaccagctctatggggtggtgccgcaagcctgaagtatgtgctatacacacacacacacacacacacacacacacacacacacgatgcatttaataaagatgagttggttctca

SEQ ID NO: 458150 - DNA, 1664 bp, Homo sapiens
ggagccaggaagaggtttccctgagtgaaaagggtcttgggccctggcctctgtccttgggccagactccctgactcccacccctcctttcccaggactccccctttggcttgagttttgtacggtttcatagccccccagacaaagatgaggcagaggccccgtcccagaaggtgacagtgaccaagcttggccagttccgtgtgaaggaggaggatgagagcgccaactctctgaggccgggggctctcttcttcagccggatcaacaagacatccccagtcacagccagcgacccagcaggacctagctatgcagctgctaccctccaggcttctagtgctgcctcctcagcctctccagtctccagggccataggcagcacctccaagccccaggagtctcccaaagggaagaggaagttggatttgaaccaagaagaaaagaagacccccagcaaaccaccagcccagctgtcgccatctgttcccaagagacctaaattgccagctccaactcgtaccccagccacagccccagtccctgcccgagcacagggggcagtgacaggcaaaccccgaggagaaggcaccgagcccagacgaccccgagctggcccagaggagctggggaagatccttcagggtgtggtagtggtgctgagtggcttccagaaccccttccgctccgagctgcgagataaggccctagagcttggggccaagtatcggccagactggacccgggacagcacgcacctcatctgtgcctttgccaacacccccaagtacagccaggtcctaggcctgggaggccgcatcgtgcgtaaggagtgggtgctggactgtcaccgcatgcgtcggcggctgccctcccggaggtacctcatggcagggccaggttccagcagtgaggaggatgaggcctctcacagcggtggcagcggagatgaagcccccaagcttcctcagaagcaaccccagaccaaaaccaagcccactcaggcagctggacccagctcaccccagaagcccccaacccctgaagagaccaaagcagcctcaccagtgctccaggaagatatagacattgagggggtacagtcagaaggacaggacaatggggcggaagattctggggacacagaggatgagctgaggagggtggcagagcagaaggaacacagactgccccctggccaggaggagaatggggaagacccgtatgcaggctccacggatgagaacacggacagtgaggaacaccaggagcctcctgatctgccagtccctgagctcccagatttcttccagggcaagcacttctttctttacggggagttccctggggacgagcggcggaaactcatccgatacgtcacagccttcaatggggagctcgaggactatatgagtgaccgggttcagtttgtgatcacagcacaggaatgggatcccagctttgaggaggccctgatggacaacccctccctggcattcgttcgtccccgatggatctacagttgcaatgagaagcagaagttacttcctcaccagctctatggggtggtgccgcaagcctgaagtatgtgctatacacacacacacacacacacacacacacacacacacacgatgcatttaataaagatgagttggttctca

SEQ ID NO: 458151 - DNA, 2356 bp, Homo sapiens
tcccttggccccaggagacaggggttgcagaaagccgagatcgtgccactgcactccatcctgggtgagagagcaagaccctgtctcaacaaaaaatttttaaaaaataaaataaataataatacagcaaaaagatttgctttctcggcttcagtgtgggcggtaactccatcgtgcaatgagaaaggcgaatttcttccagacaccaatcccggaggtcgcttctgttgctaggctcccagaaagcagggttcggacgtcattgggaggcgaggctagagcggggttgtgtgtggcggagggaggcggggctggaggaaacgctcgttgctaaggaacgcagcgctcttcccgctctggagaggcgcgactgggcttgcgcagtgtcgacgccggcgccggcgcgccggggtttgaaaggcccgagcctcgcgcgcttgcgcactttagccagcgcagggcgcaccccgctccctcccactctccctgcccctcggaccccatactctacctcatccttctggccaggcgaagcccacgacgttgacatgccggagatccgcctccgccatgtcgtgtcctgcagcagccaggactcgactcactgtgcagaaaatcttctcaaggcagacacttaccgaaaatggcgggcagccaaggcaggcgagaagaccatctctgtggtcctacagttggagaaggaggagcagatacacagtgtggacattgggaatgatggctcagctttcgtggaggtgctggtgggcagttcagctggaggcgctggggagcaagactatgaggtccttctggtcacctcatctttcatgtccccttccgagagccgcagtggctcaaaccccaaccgcgttcgcatgtttgggcctgacaagctggtccgggcagccgccgagaagcgctgggaccgggtcaaaattgtttgcagccagccctacagcaaggactccccctttggcttgagttttgtacggtttcatagccccccagacaaagatgaggcagaggccccgtcccagaaggtgacagtgaccaagcttggccagttccgtgtgaaggaggaggatgagagcgccaactctctgaggccgggggctctcttcttcagccggatcaacaagacatccccagcaaaccaccagcccagctgtcgccatctgttcccaagagacctaaattgccagctccaactcgtaccccagccacagccccagtccctgcccgagcacagggggcagtgacaggcaaaccccgaggagaaggcaccgagcccagacgaccccgagctggcccagaggagctggggaagatccttcagggtgtggtagtggtgctgagtggcttccagaaccccttccgctccgagctgcgagataaggccctagagcttggggccaagtatcggccagactggacccgggacagcacgcacctcatctgtgcctttgccaacacccccaagtacagccaggtcctaggcctgggaggccgcatcgtgcgtaaggagtgggtgctggactgtcaccgcatgcgtcggcggctgccctcccggaggtacctcatggcagggccaggttccagcagtgaggaggatgaggcctctcacagcggtggcagcggagatgaagcccccaagcttcctcagaagcaaccccagaccaaaaccaagcccactcaggcagctggacccagctcaccccagaagcccccaacccctgaagagaccaaagcagcctcaccagtgctccaggaagatatagacattgagggggtacagtcagaaggacaggacaatggggcggaagattctggggacacagaggatgagctgaggagggtggcagagcagaaggaacacagactgccccctggccaggaggagaatggggaagacccgtatgcaggctccacggatgagaacacggacagtgaggaacaccaggagcctcctgatctgccagtccctgagctcccagatttcttccagggcaagcacttctttctttacggggagttccctggggacgagcggcggaaactcatccgatacgtcacagccttcaatggggagctcgaggactatatgagtgaccgggttcagtttgtgatcacagcacaggaatgggatcccagctttgaggaggccctgatggacaacccctccctggcattcgttcgtccccgatggatctacagttgcaatgagaagcagaagttacttcctcaccagctctatggggtggtgccgcaagcctgaagtatgtgctatacacacacacacacacacacacacacacacacacacacgatgcatttaataaagatgagttggttctca

SEQ ID NO: 458152 - DNA, 1575 bp, Homo sapiens
tacacgtctggctggcagtcatgcacggttgcgataatggccgccgactaacatggtgctgacgggcgcgtacaccctgagaaggtgacagtgaccaagcttggccagttccgtgtgaaggaggaggatgagagcgccaactctctgaggccgggggctctcttcttcagccggatcaacaagacatccccagtcacagccagcgacccagcaggacctagctatgcagctgctaccctccaggcttctagtgctgcctcctcagcctctccagtctccagggccataggcagcacctccaagccccaggagtctcccaaagggaagaggaagttggatttgaaccaagaagaaaagaagacccccagcaaaccaccagcccagctgtcgccatctgttcccaagagacctaaattgccagctccaactcgtaccccagccacagccccagtccctgcccgagcacagggggcagtgacaggcaaaccccgaggagaaggcaccgagcccagacgaccccgagctggcccagaggagctggggaagatccttcagggtgtggtagtggtgctgagtggcttccagaaccccttccgctccgagctgcgagataaggccctagagcttggggccaagtatcggccagactggacccgggacagcacgcacctcatctgtgcctttgccaacacccccaagtacagccaggtcctaggcctgggaggccgcatcgtgcgtaaggagtgggtgctggactgtcaccgcatgcgtcggcggctgccctcccggaggtacctcatggcagggccaggttccagcagtgaggaggatgaggcctctcacagcggtggcagcggagatgaagcccccaagcttcctcagaagcaaccccagaccaaaaccaagcccactcaggcagctggacccagctcaccccagaagcccccaacccctgaagagaccaaagcagcctcaccagtgctccaggaagatatagacattgagggggtacagtcagaaggacaggacaatggggcggaagattctggggacacagaggatgagctgaggagggtggcagagcagaaggaacacagactgccccctggccaggaggagaatggggaagacccgtatgcaggctccacggatgagaacacggacagtgaggaacaccaggagcctcctgatctgccagtccctgagctcccagatttcttccagggcaagcacttctttctttacggggagttccctggggacgagcggcggaaactcatccgatacgtcacagccttcaatggggagctcgaggactatatgagtgaccgggttcagtttgtgatcacagcacaggaatgggatcccagctttgaggaggccctgatggacaacccctccctggcattcgttcgtccccgatggatctacagttgcaatgagaagcagaagttacttcctcaccagctctatggggtggtgccgcaagcctgaagtatgtgctatacacacacacacacacacacacacacacacacacacacgatgcatttaataaagatgagttggttctca

SEQ ID NO: 458153 - DNA, 2392 bp, Homo sapiens
gtgatccaccggcctcagcctcccaaagtgctgggattataggcgtgagccactgcacccgtcctaatttttgtatttttagtagagatggggtttcaccatgttggctaagctggtctggaactcatggcctcaagttatctgcccacctcagcctcccaaagtgctgagtaagccaagttttctaatagccacattagacaagtaaaaggaaacaggttaaattcattttaacatgttttacttaacccaatgtatccaaaatagcatttcaacatgtcatcggttttttagttttttttttttttgagatagtgcttcgctttgttgcccaggctggagtgcagtggcacaatctcggctcactgcaacctccaccttccaggttcaagtgattctcctgcctcagcctcccgagtagctgggattacaggcacccgccaccatgcccactaatttttgtatttttggttagagatggggtttcgccatgttggccaggctagtctcaaactcctgacctcaggtgatccacccacctcggcctcccaaagtgctaggattacaggcgtgaggcaccgtgcctggcgtcatcggtattatttaaatgaattatgttacgttcttttgtgctgtcttcaaaatctgttatatattttacacttacaccaaatctcaattaccatggtacatttttatctgaaatgcttgacctttattttgatttcataaaattcatagttggagaagtagattcacatatccaagttgttccaattatataatagttttccaaaaactgagatgggtgtccattttttttttaagtaaagatgcaggtctggttatgttgaccaagttgctgggttgttttgttttgttttgagacagagtctcactttgtcacccaggctggagtgcagtggcatgacctcagctcactgcaacctctgcctcccaggttcaactgattctcttgcatcatcctcctgagtagctgggactacaggtgtatgccaccatgcctggctaattttggtatttttctcagagacggggtttcaccatgttgggcatgctggtcttgaactgctgacctcaggtgatccgcccacctcggcctcccaaagtgctggtattacaggcatgggccaccacacctggcctcagctgttcaattaaaagtaaatacaacttaaaattctatgtttcattggcagtagtgcaacattaatactgagtagccacatgtgattagtggctatggtattggacagggaaggtacagaatacttccatcaacatagaaaattctatcagtctagctctaggggcagatagtccttccactgacttgggcaagtcactctacaaatggcatctacctcacatggttatggtgagaattcagcgtatgtatgtacatgcaggcacacaatatgcacacagacacataacatagtacaccctttcctgaaaagcctgacacatggagctcaaacatgagtgccacccacccctgggcagcaccaagatggctctagtctgggtgcctttgtctcacccccatgcctttgctcggagtgtgctcctcatttttctgccactttgaccctgtctctgatttggtcctgtctgacatcactgctatatgctttgctcctctcaatttcctctgccctcatgccagcaggagtcatgccagagatcatatctgagaaagcaagacaattttgtgtgtgtgtctgtgcccatagaggagtgctggttgtgttgatatagttgtagattggttgtgtttacacagttgtatatattgacacccttgagtgttatgacttcttttgggggtggtcgccttttaaatcataacttttaatgggattccattttagtctttgtgaagacataaggttgttggcaggcatctgtccctgggagcatccaagcagaaaagactaagactcccttgtagacagatcactggccgccactgaagtgtgtctgcatggcaccacagggctggaagacccttgaaggcaggaattcaaggaaatgtatgatgaattttggcattgccatcaaaagcagaacaggcatggaaaacttgggtgagtgggcgagacaacctcctcaccacagcagagttccatccatgcctggataatgatggagggatttgtgtccactgcagtggggaaccatgaaggacacatcaagggtgtggttggcctgtggtgctctttggaggaatgaataaaaatgaatagaaatcctaaaaaaaaaaaatatcttttctttaccaccttctctaaactcttacttctccctctttctctctcctttctcttctctccctctcatcttttatctacaaaaaaatggggcccat

SEQ ID NO: 458154 - DNA, 1454 bp, Homo sapiens
tcccttggccccaggagacaggggttgcagaaagccgagatcgtgccactgcactccatcctgggtgagagagcaagaccctgtctcaacaaaaaatttttaaaaaataaaataaataataatacagcaaaaagatttgctttctcggcttcagtgtgggcggtaactccatcgtgcaatgagaaaggcgaatttcttccagacaccaatcccggaggtcgcttctgttgctaggctcccagaaagcagggttcggacgtcattgggaggcgaggctagagcggggttgtgtgtggcggagggaggcggggctggaggaaacgctcgttgctaaggaacgcagcgctcttcccgctctggagaggcgcgactgggcttgcgcagtgtcgacgccggcgccggcgcgccggggtttgaaaggcccgagcctcgcgcgcttgcgcactttagccagcgcagggcgcaccccgctccctcccactctccctgcccctcggaccccatactctacctcatccttctggccaggcgaagcccacgacgttgacatgccggagatccgcctccgccatgtcgtgtcctgcagcagccaggactcgactcactgtgcagaaaatcttctcaaggcagacacttaccgaaaatggcgggcagccaaggcaggcgagaagaccatctctgtggtcctacagttggagaaggaggagcagatacacagtgtggacattgggaatgatggctcagctttcgtggaggtgctggtgggcagttcagctggaggcgctggggagcaagactatgaggtccttctggtcacctcatctttcatgtccccttccgagagccgcagtggctcaaaccccaaccgcgttcgcatgtttgggcctgacaagctggtccgggcagccgccgagaagcgctgggaccgggtcaaaattgtttgcagccagccctacagcaaggactccccctttggcttgagttttgtacggtttcatagccccccagacaaagatgaggcagaggccccgtcccagaaggtgacagtgaccaagcttggccagttccgtgtgaaggaggaggatgagagcgccaactctctgaggccgggggctctcttcttcagccggatcaacaagacatccccagtcacagccagcgacccagcaggacctagctatgcagctgctaccctccaggcttctagtgctgcctcctcagcctctccagtctccagggccataggcagcacctccaaggccctgatggacaacccctccctggcattcgttcgtccccgatggatctacagttgcaatgagaagcagaagttacttcctcaccagctctatggggtggtgccgcaagcctgaagtatgtgctatacacacacacacacacacacacacacacacacacacacgatgcatttaataaagatgagttggttctca

SEQ ID NO: 458155 - DNA, 881 bp, Homo sapiens
acaatacaacgaaaatcataaaccataggctaggtacgaggccggtgtgaatcggccgaggcaaaatagtttgcagccagtccctgccctcccggaggtacctcatggcagggccaggttccagcagtgaggaggatgaggcctctcacagcggtggcagcggagatgaagcccccaagcttcctcagaagcaaccccagaccaaaaccaagcccactcaggcagctggacccagctcaccccagaagcccccaacccctgaagagaccaaagcagcctcaccagtgctccaggaagatatagacattgagggggtacagtcagaaggacaggacaatggggcggaagattctggggacacagaggatgagctgaggagggtggcagagcagaaggaacacagactgccccctggccaggaggagaatggggaagacccgtatgcaggctccacggatgagaacacggacagtgaggaacaccaggagcctcctgatctgccagtccctgagctcccagatttcttccagggcaagcacttctttctttacggggagttccctggggacgagcggcggaaactcatccgatacgtcacagccttcaatggggagctcgaggactatatgagtgaccgggttcagtttgtgatcacagcacaggaatgggatcccagctttgaggaggccctgatggacaacccctccctggcattcgttcgtccccgatggatctacagttgcaatgagaagcagaagttacttcctcaccagctctatggggtggtgccgcaagcctgaagtatgtgctatacacacacacacacacacacacacacacacacacacacgatgcatttaataaagatgagttggttctca

SEQ ID NO: 458156 - DNA, 2025 bp, Homo sapiens
  misc_feature (1452)..(1452): n is a, c, g, or t
  misc_feature (1454)..(1454): n is a, c, g, or t
tcccttggccccaggagacaggggttgcagaaagccgagatcgtgccactgcactccatcctgggtgagagagcaagaccctgtctcaacaaaaaatttttaaaaaataaaataaataataatacagcaaaaagatttgctttctcggcttcagtgtgggcggtaactccatcgtgcaatgagaaaggcgaatttcttccagacaccaatcccggaggtcgcttctgttgctaggctcccagaaagcagggttcggacgtcattgggaggcgaggctagagcggggttgtgtgtggcggagggaggcggggctggaggaaacgctcgttgctaaggaacgcagcgctcttcccgctctggagaggcgcgactgggcttgcgcagtgtcgacgccggcgccggcgcgccggggtttgaaaggcccgagcctcgcgcgcttgcgcactttagccagcgcagggcgcaccccgctccctcccactctccctgcccctcggaccccatactctacctcatccttctggccaggcgaagcccacgacgttgacatgccggagatccgcctccgccatgtcgtgtcctgcagcagccaggactcgactcactgtgcagaaaatcttctcaaggcagacacttaccgaaaatggcgggcagccaaggcaggcgagaagaccatctctgtggtcctacagttggagaaggaggagcagatacacagtgtggacattgggaatgatggctcagctttcgtggaggtgctggtgggcagttcagctggaggcgctggggagcaagactatgaggtccttctggtcacctcatctttcatgtccccttccgagagccgcagtggctcaaaccccaaccgcgttcgcatgtttgggcctgacaagctggtccgggcagccgccgagaagcgctgggaccgggtcaaaattgtttgcagccagccctacagcaaggactccccctttggcttgagttttgtacggtttcatagccccccagacaaagatgaggcagaggccccgtcccagaaggtgacagtgaccaagcttggccagttccgtgtgaaggaggaggatgagagcgccaactctcggagctcgaggactatatgagtgaccgggttcagtttgtgatcacagcacaggaatgggatcccagctttgaggaggccctgatggacaacccctccctggcattcgttcgtccccgatggatctacagttgcaatgagaagcagaagttacttcctcaccagctctatggggtggtgccgcaagcctgaagtatgtgctatacacacacacacacacacacacacacacacacacacacgatgcatttaataaagatgagttggttctcatccaagagtctcccaaaactctaagaggctccctgggacctggggaagaatgctgggcacctccgtcagagatctggtananaaggaactctttgtctcttctgcttggccccttatccctgtgttggcaagaggcagggaactgggaatctgaccctcagcactgcccctcaactttttctggccctctgagccacacctgtatcttggctgtccctttgtggctggaggcctgggtacccatgaggcttgtctctctcctgaagcctcagcgtccccaggccagggatagtgcctttcctccagggttttcagaagtagctgtataatgaatgtcaccactgtggttttacatcacctaatttaggaggtagaatgggaggaagggacattttaagcaacctacccaaaccctgcacccccttcaaggctccaccacatttaagtgggaattgaggtgattgtgagggaatcagggcagaggatgggatggtgctctaggcagaggccatagcatgggccaggaggtgggaagcagcctgaggcaggcagaagagcattgctgcctttggcaaagaggctttgggggcagatttagaaagccaggcacagtccttgcagctctgctgtccagtgtgatcaccactgggtac

SEQ ID NO: 458157 - DNA, 3184 bp, Homo sapiens
  misc_feature (2611)..(2611): n is a, c, g, or t
  misc_feature (2613)..(2613): n is a, c, g, or t
tcccttggccccaggagacaggggttgcagaaagccgagatcgtgccactgcactccatcctgggtgagagagcaagaccctgtctcaacaaaaaatttttaaaaaataaaataaataataatacagcaaaaagatttgctttctcggcttcagtgtgggcggtaactccatcgtgcaatgagaaaggcgaatttcttccagacaccaatcccggaggtcgcttctgttgctaggctcccagaaagcagggttcggacgtcattgggaggcgaggctagagcggggttgtgtgtggcggagggaggcggggctggaggaaacgctcgttgctaaggaacgcagcgctcttcccgctctggagaggcgcgactgggcttgcgcagtgtcgacgccggcgccggcgcgccggggtttgaaaggcccgagcctcgcgcgcttgcgcactttagccagcgcagggcgcaccccgctccctcccactctccctgcccctcggaccccatactctacctcatccttctggccaggcgaagcccacgacgttgacatgccggagatccgcctccgccatgtcgtgtcctgcagcagccaggactcgactcactgtgcagaaaatcttctcaaggcagacacttaccgaaaatggcgggcagccaaggcaggcgagaagaccatctctgtggtcctacagttggagaaggaggagcagatacacagtgtggacattgggaatgatggctcagctttcgtggaggtgctggtgggcagttcagctggaggcgctggggagcaagactatgaggtccttctggtcacctcatctttcatgtccccttccgagagccgcagtggctcaaaccccaaccgcgttcgcatgtttgggcctgacaagctggtccgggcagccgccgagaagcgctgggaccgggtcaaaattgtttgcagccagccctacagcaaggactccccctttggcttgagttttgtacggtttcatagccccccagacaaagatgaggcagaggccccgtcccagaaggtgacagtgaccaagcttggccagttccgtgtgaaggaggaggatgagagcgccaactctctgaggccgggggctctcttcttcagccggatcaacaagacatccccagtcacagccagcgacccagcaggacctagctatgcagctgctaccctccaggcttctagtgctgcctcctcagcctctccagtctccagggccataggcagcacctccaagccccaggagtctcccaaagggaagaggaagttggatttgaaccaagaagaaaagaagacccccagcaaaccaccagcccagctgtcgccatctgttcccaagagacctaaattgccagctccaactcgtaccccagccacagccccagtccctgcccgagcacagggggcagtgacaggcaaaccccgaggagaaggcaccgagcccagacgaccccgagctggcccagaggagctggggaagatccttcagggtgtggtagtggtgctgagtggcttccagaaccccttccgctccgagctgcgagataaggccctagagcttggggccaagtatcggccagactggacccgggacagcacgcacctcatctgtgcctttgccaacacccccaagtacagccaggtcctaggcctgggaggccgcatcgtgcgtaaggagtgggtgctggactgtcaccgcatgcgtcggcggctgccctcccggaggtacctcatggcagggccaggttccagcagtgaggaggatgaggcctctcacagcggtggcagcggagatgaagcccccaagcttcctcagaagcaaccccagaccaaaaccaagcccactcaggcagctggacccagctcaccccagaagcccccaacccctgaagagaccaaagcagcctcaccagtgctccaggaagatatagacattgagggggtacagtcagaaggacaggacaatggggcggaagattctggggacacagaggatgagctgaggagggtggcagagcagaaggaacacagactgccccctggccaggaggagaatggggaagacccgtatgcaggctccacggatgagaacacggacagtgaggaacaccaggagcctcctgatctgccagtccctgagctcccagatttcttccagggcaagcacttctttctttacggggagttccctggggacgagcggcggaaactcatccgatacgtcacagccttcaatggggagctcgaggactatatgagtgaccgggttcagtttgtgatcacagcacaggaatgggatcccagctttgaggaggccctgatggacaacccctccctggcattcgttcgtccccgatggatctacagttgcaatgagaagcagaagttacttcctcaccagctctatggggtggtgccgcaagcctgaagtatgtgctatacacacacacacacacacacacacacacacacacacacgatgcatttaataaagatgagttggttctcatccaagagtctcccaaaactctaagaggctccctgggacctggggaagaatgctgggcacctccgtcagagatctggtananaaggaactctttgtctcttctgcttggccccttatccctgtgttggcaagaggcagggaactgggaatctgaccctcagcactgcccctcaactttttctggccctctgagccacacctgtatcttggctgtccctttgtggctggaggcctgggtacccatgaggcttgtctctctcctgaagcctcagcgtccccaggccagggatagtgcctttcctccagggttttcagaagtagctgtataatgaatgtcaccactgtggttttacatcacctaatttaggaggtagaatgggaggaagggacattttaagcaacctacccaaaccctgcacccccttcaaggctccaccacatttaagtgggaattgaggtgattgtgagggaatcagggcagaggatgggatggtgctctaggcagaggccatagcatgggccaggaggtgggaagcagcctgaggcaggcagaagagcattgctgcctttggcaaagaggctttgggggcagatttagaaagccaggcacagtccttgcagctctgctgtccagtgtgatcaccactgggtac

SEQ ID NO: 458158 - DNA, 2521 bp, Homo sapiens
  misc_feature (2489)..(2489): n is a, c, g, or t
tcccttggccccaggagacaggggttgcagaaagccgagatcgtgccactgcactccatcctgggtgagagagcaagaccctgtctcaacaaaaaatttttaaaaaataaaataaataataatacagcaaaaagatttgctttctcggcttcagtgtgggcggtaactccatcgtgcaatgagaaaggcgaatttcttccagacaccaatcccggaggtcgcttctgttgctaggctcccagaaagcagggttcggacgtcattgggaggcgaggctagagcggggttgtgtgtggcggagggaggcggggctggaggaaacgctcgttgctaaggaacgcagcgctcttcccgctctggagaggcgcgactgggcttgcgcagtgtcgacgccggcgccggcgcgccggggtttgaaaggcccgagcctcgcgcgcttgcgcactttagccagcgcagggcgcaccccgctccctcccactctccctgcccctcggaccccatactctacctcatccttctggccaggcgaagcccacgacgttgacatgccggagatccgcctccgccatgtcgtgtcctgcagcagccaggactcgactcactgtgcagaaaatcttctcaaggcagacacttaccgaaaatggcgggcagccaaggcaggcgagaagaccatctctgtggtcctacagttggagaaggaggagcagatacacagtgtggacattgggaatgatggctcagctttcgtggaggtgctggtgggcagttcagctggaggcgctggggagcaagactatgaggtccttctggtcacctcatctttcatgtccccttccgagagccgcagtggctcaaaccccaaccgcgttcgcatgtttgggcctgacaagctggtccgggcagccgccgagaagcgctgggaccgggtcaaaattgtttgcagccagccctacagcaaggactccccctttggcttgagttttgtacggtttcatagccccccagacaaagatgaggcagaggccccgtcccagaaggtgacagtgaccaagcttggccagttccgtgtgaaggaggaggatgagagcgccaactctctgaggccgggggctctcttcttcagccggatcaacaagacatccccagtcacagccagcgacccagcaggacctagctatgcagctgctaccctccaggcttctagtgctgcctcctcagcctctccagtctccagggccataggcagcacctccaagccccaggagtctcccaaagggaagaggaagttggatttgaaccaagaagaaaagaagacccccagcaaaccaccagcccagctgtcgccatctgttcccaagagacctaaattgccagctccaactcgtaccccagccacagccccagtccctgcccgagcacagggggcagtgacaggcaaaccccgaggagaaggcaccgagcccagacgaccccgagctggcccagaggagctggggaagatccttcagggtgtggtagtggtgctgagtggcttccagaaccccttccgctccgagctgcgagataaggccctagagcttggggccaagtatcggccagactggacccgggacagcacgcacctcatctgtgcctttgccaacacccccaagtacagccaggtcctaggcctgggaggccgcatcgtgcgtaaggagtgggtgctggactgtcaccgcatgcgtcggcggctgccctcccggaggtacctcatggcagggccaggttccagcagtgaggaggatgaggcctctcacagcggtggcagcggagatgaagcccccaagcttcctcagaagcaaccccagaccaaaaccaagcccactcaggcagctggacccagctcaccccagaagcccccaacccctgaagagaccaaagcagcctcaccagtgctccaggaagatatagacattgagggggtacagtcagaaggacaggacaatggggcggaagattctggggacacagaggatgagctgaggagggtggcagagcagaaggaacacagactgccccctggccaggaggagaatggggaagacccgtatgcaggctccacggatgagaacacggacagtgaggaacaccaggagcctcctgatctgccagtccctgagctcccagatttcttccagggcaagcacttctttctttacggggagttccctggggacgagcggcggaaactcatccgatacgtcacagccttcaatggggagctcgaggactatatgagtgaccgggttcagtttgtgatcacagcacaggaatgggatcccagctttgaggaggccctgatggacaacccctccctggcattcgttcgtccccgatggatctacagttgcaatgagaagcagaagttacttcctcaccagctctatggggtggtgccgcaagcctgaagtatgtgcttatgtgagagattccgtgatcttttaaantgttactttttgtaacacaagaataattcaat

SEQ ID NO: 458159 - DNA, 2296 bp, Homo sapiens
tcccttggccccaggagacaggggttgcagaaagccgagatcgtgccactgcactccatcctgggtgagagagcaagaccctgtctcaacaaaaaatttttaaaaaataaaataaataataatacagcaaaaagatttgctttctcggcttcagtgtgggcggtaactccatcgtgcaatgagaaaggcgaatttcttccagacaccaatcccggaggtcgcttctgttgctaggctcccagaaagcagggttcggacgtcattgggaggcgaggctagagcggggttgtgtgtggcggagggaggcggggctggaggaaacgctcgttgctaaggaacgcagcgctcttcccgctctggagaggcgcgactgggcttgcgcagtgtcgacgccggcgccggcgcgccggggtttgaaaggcccgagcctcgcgcgcttgcgcactttagccagcgcagggcgcaccccgctccctcccactctccctgcccctcggaccccatactctacctcatccttctggccaggcgaagcccacgacgttgacatgccggagatccgcctccgccatgtcgtgtcctgcagcagccaggactcgactcactgtgcagaaaatcttctcaaggcagacacttaccgaaaatggcgggcagccaaggcaggcgagaagaccatctctgtggtcctacagttggagaaggaggagcagatacacagtgtggacattgggaatgatggctcagctttcgtggaggtgctggtgggcagttcagctggaggcgctggggagcaagactatgaggtccttctggtcacctcatctttcatgtccccttccgagagccgcagtggctcaaaccccaaccgcgttcgcatgtttgggcctgacaagctggtccgggcagccgccgagaagcgctgggaccgggtcaaaattgtttgcagccagccctacagcaaggactccccctttggcttgagttttgtacggtttcatagccccccagacaaagatgaggcagaggccccgtcccagaaggtgacagtgaccaagcttggccagttccgtgtgaaggaggaggatgagagcgccaactctctgaggccgggggctctcttcttcagccggatcaacaagacatccccagtcacagccagcgacccagcaggacctagctatgcagctgctaccctccaggcttctagtgctgcctcctcagcctctccagtctccagggccataggcagcacctccaagccccaggagtctcccaaagggaagaggaagttggatttgaaccaagaagaaaagaagacccccagcaaaccaccagcccagctgtcgccatctgttcccaagagacctaaattgccagctccaactcgtaccccagccacagccccagtccctgcccgagcacagggggcagtgacaggcaaaccccgaggagaaggcaccgagcccagacgaccccgagctggcccagaggagctggggaagatccttcagggtgtggtagtggtgctgagtggcttccagaaccccttccgctccgagctgcgagataaggccctagagcttggggccaagtatcggccagactggacccgggacagcacgcacctcatctgtgcctttgccaacacccccaagtacagccaggtcctaggcctgggaggccgcatcgtgcgtaaggagtgggtgctggactgtcaccgcatgcgtcggcggctgccctcccggaggtacctcatggcagggccaggttccagcagtgaggaggatgaggcctctcacagcggtggcagcggagatgaagcccccaagcttcctcagaagcaaccccagaccaaaaccaagcccactcaggcagctggacccagctcaccccagaagcccccaacccctgaagagaccaaagcagcctcaccaatttcttccagggcaagcacttctttctttacggggagttccctggggacgagcggcggaaactcatccgatacgtcacagccttcaatggggagctcgaggactatatgagtgaccgggttcagtttgtgatcacagcacaggaatgggatcccagctttgaggaggccctgatggacaacccctccctggcattcgttcgtccccgatggatctacagttgcaatgagaagcagaagttacttcctcaccagctctatggggtggtgccgcaagcctgaagtatgtgctatacacacacacacacacacacacacacacacacacacacgatgcatttaataaagatgagttggttctca

SEQ ID NO: 458160 - DNA, 2605 bp, Homo sapiens
tcccttggccccaggagacaggggttgcagaaagccgagatcgtgccactgcactccatcctgggtgagagagcaagaccctgtctcaacaaaaaatttttaaaaaataaaataaataataatacagcaaaaagatttgctttctcggcttcagtgtgggcggtaactccatcgtgcaatgagaaaggcgaatttcttccagacaccaatcccggaggtcgcttctgttgctaggctcccagaaagcagggttcggacgtcattgggaggcgaggctagagcggggttgtgtgtggcggagggaggcggggctggaggaaacgctcgttgctaaggaacgcagcgctcttcccgctctggagaggcgcgactgggcttgcgcagtgtcgacgccggcgccggcgcgccggggtttgaaaggcccgagcctcgcgcgcttgcgcactttagccagcgcagggcgcaccccgctccctcccactctccctgcccctcggaccccatactctacctcatccttctggccaggcgaagcccacgacgttgacatgccggagatccgcctccgccatgtcgtgtcctgcagcagccaggactcgactcactgtgcagaaaatcttctcaaggcagacacttaccgaaaatggcgggcagccaaggcaggcgagaagaccatctctgtggtcctacagttggagaaggaggagcagatacacagtgtggacattgggaatgatggctcagctttcgtggaggtgctggtgggcagttcagctggaggcgctggggagcaagactatgaggtccttctggtcacctcatctttcatgtccccttccgagagccgcagtggctcaaaccccaaccgcgttcgcatgtttgggcctgacaagctggtccgggcagccgccgagaagcgctgggaccgggtcaaaattgtttgcagccagccctacagcaaggactccccctttggcttgagttttgtacggtttcatagccccccagacaaagatgaggcagaggccccgtcccagaaggtgacagtgaccaagcttggccagttccgtgtgaaggaggaggatgagagcgccaactctctgaggccgggggctctcttcttcagccggatcaacaagacatccccagtcacagccagcgacccagcaggacctagctatgcagctgctaccctccaggcttctagtgctgcctcctcagcctctccagtctccagggccataggcagcacctccaagggtgaaatcatcagactttggtggggtggaggaggagagaagctggaggcctcaatccatccccatcccctcagccccaggagtctcccaaagggaagaggaagttggatttgaaccaagaagaaaagaagacccccagcaaaccaccagcccagctgtcgccatctgttcccaagagacctaaattgccagctccaactcgtaccccagccacagccccagtccctgcccgagcacagggggcagtgacaggcaaaccccgaggagaaggcaccgagcccagacgaccccgagctggcccagaggagctggggaagatccttcagggtgtggtagtggtgctgagtggcttccagaaccccttccgctccgagctgcgagataaggccctagagcttggggccaagtatcggccagactggacccgggacagcacgcacctcatctgtgcctttgccaacacccccaagtacagccaggtcctaggcctgggaggccgcatcgtgcgtaaggagtgggtgctggactgtcaccgcatgcgtcggcggctgccctcccggaggtacctcatggcagggccaggttccagcagtgaggaggatgaggcctctcacagcggtggcagcggagatgaagcccccaagcttcctcagaagcaaccccagaccaaaaccaagcccactcaggcagctggacccagctcaccccagaagcccccaacccctgaagagaccaaagcagcctcaccagtgctccaggaagatatagacattgagggggtacagtcagaaggacaggacaatggggcggaagattctggggacacagaggatgagctgaggagggtggcagagcagaaggaacacagactgccccctggccaggaggagaatggggaagacccgtatgcaggctccacggatgagaacacggacagtgaggaacaccaggagcctcctgatctgccagtccctgagctcccagatttcttccagggcaagcacttctttctttacggggagttccctggggacgagcggcggaaactcatccgatacgtcacagccttcaatggggagctcgaggactatatgagtgaccgggttcagtttgtgatcacagcacaggaatgggatcccagctttgaggaggccctgatggacaacccctccctggcattcgttcgtccccgatggatctacagttgcaatgagaagcagaagttacttcctcaccagctctatggggtggtgccgcaagcctgaagtatgtgctatacacacacacacacacacacacacacacacacacacacgatgcatttaataaagatgagttggttctca

SEQ ID NO: 458161 - DNA, 1991 bp, Homo sapiens
accgagagatcagaccatccgacgcaagtgtcgatgtacagcgagagaccaggactcgaactcactgtgcagaaaatcttctcaaggcagacacttaccgaaaatggcgggcagccaaggcaggcgagaagaccatctctgtggtcctacagttggagaaggaggagcagatacacagtgtggacattgggaatgatggctcagctttcgtggaggtgctggtgggcagttcagctggaggcgctggggagcaagactatgaggtccttctggtcacctcatctttcatgtccccttccgagagccgcagtggctcaaaccccaaccgcgttcgcatgtttgggcctgacaagctggtccgggcagccgccgagaagcgctgggaccgggtcaaaattgtttgcagccagccctacagcaaggactccccctttggcttgagttttgtacggtttcatagccccccagacaaagatgaggcagaggccccgtcccagaaggtgacagtgaccaagcttggccagttccgtgtgaaggaggaggatgagagcgccaactctctgaggccgggggctctcttcttcagccggatcaacaagacatccccagtcacagccagcgacccagcaggacctagctatgcagctgctaccctccaggcttctagtgctgcctcctcagcctctccagtctccagggccataggcagcacctccaagccccaggagtctcccaaagggaagaggaagttggatttgaaccaagaagaaaagaagacccccagcaaaccaccagcccagctgtcgccatctgttcccaagagacctaaattgccagctccaactcgtaccccagccacagccccagtccctgcccgagcacagggggcagtgacaggcaaaccccgaggagaaggcaccgagcccagacgaccccgagctggcccagaggagctggggaagatccttcagggtgtggtagtggtgctgagtggcttccagaaccccttccgctccgagctgcgagataaggccctagagcttggggccaagtatcggccagactggacccgggacagcacgcacctcatctgtgcctttgccaacacccccaagtacagccaggtcctaggcctgggaggccgcatcgtgcgtaaggagtgggtgctggactgtcaccgcatgcgtcggcggctgccctcccggaggtacctcatggcagggccaggttccagcagtgaggaggatgaggcctctcacagcggtggcagcggagatgaagcccccaagcttcctcagaagcaaccccagaccaaaaccaagcccactcaggcagctggacccagctcaccccagaagcccccaacccctgaagagaccaaagcagcctcaccagtgctccaggaagatatagacattgagggggtacagtcagaaggacaggacaatggggcggaagattctggggacacagaggatgagctgaggagggtggcagagcagaaggaacacagactgccccctggccaggaggagaatggggaagacccgtatgcaggctccacggatgagaacacggacagtgaggaacaccaggagcctcctgatctgccagtccctgagctcccagatttcttccagggcaagcacttctttctttacggggagttccctggggacgagcggcggaaactcatccgatacgtcacagccttcaatggggagctcgaggactatatgagtgaccgggttcagtttgtgatcacagcacaggaatgggatcccagctttgaggaggccctgatggacaacccctccctggcattcgttcgtccccgatggatctacagttgcaatgagaagcagaagttacttcctcaccagctctatggggtggtgccgcaagcctgaagtatgtgctatacacacacacacacacacacacacacacacacacacacgatgcatttaataaagatgagttggttctca

SEQ ID NO: 458162 - DNA, 1894 bp, Homo sapiens
ctcggtacccggctgagcaagcgggcaggcgagaagaccatctctgtggtcctacttggagaaggaggagcagatacacagtgtggacattgggaatgatggctcagctttcgtggaggtgctggtgggcagttcagctggaggcgctggggagcaagactatgaggtccttctggtcacctcatctttcatgtccccttccgagagccgcagtggctcaaaccccaaccgcgttcgcatgtttgggcctgacaagctggtccgggcagccgccgagaagcgctgggaccgggtcaaaattgtttgcagccagccctacagcaaggactccccctttggcttgagttttgtacggtttcatagccccccagacaaagatgaggcagaggccccgtcccagaaggtgacagtgaccaagcttggccagttccgtgtgaaggaggaggatgagagcgccaactctctgaggccgggggctctcttcttcagccggatcaacaagacatccccagtcacagccagcgacccagcaggacctagctatgcagctgctaccctccaggcttctagtgctgcctcctcagcctctccagtctccagggccataggcagcacctccaagccccaggagtctcccaaagggaagaggaagttggatttgaaccaagaagaaaagaagacccccagcaaaccaccagcccagctgtcgccatctgttcccaagagacctaaattgccagctccaactcgtaccccagccacagccccagtccctgcccgagcacagggggcagtgacaggcaaaccccgaggagaaggcaccgagcccagacgaccccgagctggcccagaggagctggggaagatccttcagggtgtggtagtggtgctgagtggcttccagaaccccttccgctccgagctgcgagataaggccctagagcttggggccaagtatcggccagactggacccgggacagcacgcacctcatctgtgcctttgccaacacccccaagtacagccaggtcctaggcctgggaggccgcatcgtgcgtaaggagtgggtgctggactgtcaccgcatgcgtcggcggctgccctcccggaggtacctcatggcagggccaggttccagcagtgaggaggatgaggcctctcacagcggtggcagcggagatgaagcccccaagcttcctcagaagcaaccccagaccaaaaccaagcccactcaggcagctggacccagctcaccccagaagcccccaacccctgaagagaccaaagcagcctcaccagtgctccaggaagatatagacattgagggggtacagtcagaaggacaggacaatggggcggaagattctggggacacagaggatgagctgaggagggtggcagagcagaaggaacacagactgccccctggccaggaggagaatggggaagacccgtatgcaggctccacggatgagaacacggacagtgaggaacaccaggagcctcctgatctgccagtccctgagctcccagatttcttccagggcaagcacttctttctttacggggagttccctggggacgagcggcggaaactcatccgatacgtcacagccttcaatggggagctcgaggactatatgagtgaccgggttcagtttgtgatcacagcacaggaatgggatcccagctttgaggaggccctgatggacaacccctccctggcattcgttcgtccccgatggatctacagttgcaatgagaagcagaagttacttcctcaccagctctatggggtggtgccgcaagcctgaagtatgtgctatacacacacacacacacacacacacacacacacacacacgatgcatttaataaagatgagttggttctca

SEQ ID NO: 458163 - DNA, 1972 bp, Homo sapiens
tgctgctgcaggcaggaaccactgcagcagcagaagcttaactgggggtgatgctcacaggatctgcaatgcacgagaagctggtccttcctccctcctgcagccttgcaaactctctctcttgccccccctattggcagagcctggtcacgatcagctagggaagcagaaaggtggtttgccaagtgcgggcccagatcacagagatgagttgtagagggtaggtttgagctgagaaacaatcacttaatacttagtgcagctcgcctgactctctggattctgttttctcatttccagcctctagtaattccccttgcctttccgctgactcacctgtgcatttccaaaaggtgtttgaatattgtgccagtttactgaatattctctgccgggaaagttccttaggacatgtagcccgctgtattgccagatatggaagactccatgggagaatttagataagggtcgctcacataaggtgacagtgaccaagcttggccagttccgtgtgaaggaggaggatgagagcgccaactctctgaggccgggggctctcttcttcagccggatcaacaagacatccccagtcacagccagcgacccagcaggacctagctatgcagctgctaccctccaggcttctagtgctgcctcctcagcctctccagtctccagggccataggcagcacctccaagccccaggagtctcccaaagggaagaggaagttggatttgaaccaagaagaaaagaagacccccagcaaaccaccagcccagctgtcgccatctgttcccaagagacctaaattgccagctccaactcgtaccccagccacagccccagtccctgcccgagcacagggggcagtgacaggcaaaccccgaggagaaggcaccgagcccagacgaccccgagctggcccagaggagctggggaagatccttcagggtgtggtagtggtgctgagtggcttccagaaccccttccgctccgagctgcgagataaggccctagagcttggggccaagtatcggccagactggacccgggacagcacgcacctcatctgtgcctttgccaacacccccaagtacagccaggtcctaggcctgggaggccgcatcgtgcgtaaggagtgggtgctggactgtcaccgcatgcgtcggcggctgccctcccggaggtacctcatggcagggccaggttccagcagtgaggaggatgaggcctctcacagcggtggcagcggagatgaagcccccaagcttcctcagaagcaaccccagaccaaaaccaagcccactcaggcagctggacccagctcaccccagaagcccccaacccctgaagagaccaaagcagcctcaccagtgctccaggaagatatagacattgagggggtacagtcagaaggacaggacaatggggcggaagattctggggacacagaggatgagctgaggagggtggcagagcagaaggaacacagactgccccctggccaggaggagaatggggaagacccgtatgcaggctccacggatgagaacacggacagtgaggaacaccaggagcctcctgatctgccagtccctgagctcccagatttcttccagggcaagcacttctttctttacggggagttccctggggacgagcggcggaaactcatccgatacgtcacagccttcaatggggagctcgaggactatatgagtgaccgggttcagtttgtgatcacagcacaggaatgggatcccagctttgaggaggccctgatggacaacccctccctggcattcgttcgtccccgatggatctacagttgcaatgagaagcagaagttacttcctcaccagctctatggggtggtgccgcaagcctgaagtatgtgctatacacacacacacacacacacacacacacacacacacacgatgcatttaataaagatgagttggttctca

SEQ ID NO: 458164 - DNA, 1579 bp, Homo sapiens
acttgaacccaggagccggaggttccagtgagccaatattatgccattacactccaggcctgggcaacaagagcaaaacttcatctcaagaaaaaaaaaattagccaggcgtggtggcaggtgcctgtcccagctactccggaggctgatgaggccgggggctctcttcttcagccggatcaacaagacatccccagtcacagccagcgacccagcaggacctagctatgcagctgctaccctccaggcttctagtgctgcctcctcagcctctccagtctccagggccataggcagcacctccaagccccaggagtctcccaaagggaagaggaagttggatttgaaccaagaagaaaagaagacccccagcaaaccaccagcccagctgtcgccatctgttcccaagagacctaaattgccagctccaactcgtaccccagccacagccccagtccctgcccgagcacagggggcagtgacaggcaaaccccgaggagaaggcaccgagcccagacgaccccgagctggcccagaggagctggggaagatccttcagggtgtggtagtggtgctgagtggcttccagaaccccttccgctccgagctgcgagataaggccctagagcttggggccaagtatcggccagactggacccgggacagcacgcacctcatctgtgcctttgccaacacccccaagtacagccaggtcctaggcctgggaggccgcatcgtgcgtaaggagtgggtgctggactgtcaccgcatgcgtcggcggctgccctcccggaggtacctcatggcagggccaggttccagcagtgaggaggatgaggcctctcacagcggtggcagcggagatgaagcccccaagcttcctcagaagcaaccccagaccaaaaccaagcccactcaggcagctggacccagctcaccccagaagcccccaacccctgaagagaccaaagcagcctcaccagtgctccaggaagatatagacattgagggggtacagtcagaaggacaggacaatggggcggaagattctggggacacagaggatgagctgaggagggtggcagagcagaaggaacacagactgccccctggccaggaggagaatggggaagacccgtatgcaggctccacggatgagaacacggacagtgaggaacaccaggagcctcctgatctgccagtccctgagctcccagatttcttccagggcaagcacttctttctttacggggagttccctggggacgagcggcggaaactcatccgatacgtcacagccttcaatggggagctcgaggactatatgagtgaccgggttcagtttgtgatcacagcacaggaatgggatcccagctttgaggaggccctgatggacaacccctccctggcattcgttcgtccccgatggatctacagttgcaatgagaagcagaagttacttcctcaccagctctatggggtggtgccgcaagcctgaagtatgtgctatacacacacacacacacacacacacacacacacacacacgatgcatttaataaagatgagttggttctca

SEQ ID NO: 458165 - DNA, 1401 bp, Homo sapiens
cgctactggctgtgcggaacctccgtcctggggattcacagactgccgcccaggcccgtgatcagacagcagctctgctgaacagcgcggggttaggagctgcggatctgtttgtgctaccggcgaactgcggcagcagcgacggctgcgaggagctagagcgcctccgggcggcgctgcagagccaggcagaagcgctgcgcaggctcctgccaccggcgcaggatggcttcgaggtgttgggtgcagcagagctagaggctgtgcgtgaggcctttgagaccggcggccttgaggctgcgctgtcgtgggtgcgctcaggcctggagcgcctgggcagcgcacggctagacctggccgtggctggcaaggctgacgtgggccttgtggtggacatgctgcttggattggatcctggcgacccaggcgctgcgcctgcttcggtccccacagcacccactcccttcccagccccagagcgcccgaatgtggtgctctggaccgtgcctctgggccacacgggcactgccaccaccgcggccgccgcctctcacccaacgcactacgacgccctcatcctcgtcacccctggggcccccactgagaaggactgggcccaggtccaggccttgctgctaccagatgcgcctcttgtctgcgtgcgcacagacggcgagggcgaggatccggagtgtctgggagaaggcaagatggagaatcccaagggcgagagcttaaagaacgcaggtggagggggattggagaatgcactcagtaagggaagggagaaatgtagcgctggatcgcagaaagcaggagtcatgccagagatcatatctgagaaagcaagacaattttgtgtgtgtgtctgtgcccatagaggagtgctggttgtgttgatatagttgtagattggttgtgtttacacagttgtatatattgacacccttgagtgttatgacttcttttgggggtggtcgccttttaaatcataacttttaatgggattccattttagtctttgtgaagacataaggttgttggcaggcatctgtccctgggagcatccaagcagaaaagactaagactcccttgtagacagatcactggccgccactgaagtgtgtctgcatggcaccacagggctggaagacccttgaaggcaggaattcaaggaaatgtatgatgaattttggcattgccatcaaaagcagaacaggcatggaaaacttgggtgagtgggcgagacaacctcctcaccacagcagagttccatccatgcctggataatgatggagggatttgtgtccactgcagtggggaaccatgaaggacacatcaagggtgtggttggcctgtggtgctctttggaggaatgaataaaaatgaatagaaatccta

SEQ ID NO: 458166 - DNA, 1486 bp, Homo sapiens
cgctactggctgtgcggaacctccgtcctggggattcacagactgccgcccaggcccgtgatcagacagcagctctgctgaacagcgcggggttaggagctgcggatctgtttgtgctaccggcgaactgcggcagcagcgacggctgcgaggagctagagcgcctccgggcggcgctgcagagccaggcagaagcgctgcgcaggctcctgccaccggcgcaggatggcttcgaggtgttgggtgcagcagagctagaggctgtgcgtgaggcctttgagaccggcggccttgaggctgcgctgtcgtgggtgcgctcaggcctggagcgcctgggcagcgcacggctagacctggccgtggctggcaaggctgacgtgggccttgtggtggacatgctgcttggattggatcctggcgacccaggcgctgcgcctgcttcggtccccacagcacccactcccttcccagccccagagcgcccgaatgtggtgctctggaccgtgcctctgggccacacgggcactgccaccaccgcggccgccgcctctcacccaacgcactacgacgccctcatcctcgtcacccctggggcccccactgagaaggactgggcccaggtccaggccttgctgctaccagatgcgcctcttgtctgcgtgcgcacagacggcgagggcgaggatccggagtgtctgggagaaggcaagatggagaatcccaagggcgagagcttaaagaacgcaggtggagggggattggagaatgcactcagtaagggaagggagaaatgtagcgctggatcgcagaaagcaggcagcggggaaggtcctgggaaagctggcagcgagggtttgcagcaggttgtcggcatgaagaaatcaggtggtggcgactcagagcgggccgctgcgttaagcccggaggacgagacgtgggaggtgctggaggaggcgccgccgccagtgttccccctacggcctggcggactcccagggctatgcgaatggctgcggcgagcgctccccccagcccaggcaggggcactgctgctggcgttgccaccagcatctcccagcgctgcccgaaccaaggctgcggcgttgcgagccggggcgtggaggccagctctgctggctagtctggcggcggcggcggcaccactcccagggctgggctgggcatgcgacgtggcacttctgcggggtcagctggcggagtggcgacggggcctggggctggaacccacggcactggctcgacgtgagcgtgccctgggcctggcttctggagagctggcagcgcgcgctcatttcccaggcccggtgacgcgcgccgaggtggaagcaagactgggcgcctgggcgggcgagggcactgctgggggcgcagcactgggggctctctccttcctgtggcctgcgggtggtgcagcggcgacaggtggcctgggctaccgagcggctcacggcgtcctgctgcaggc

SEQ ID NO: 458167 - DNA, 1678 bp, Homo sapiens
ccccaccccggccagatccctttcccagtcctgcttcccagtgcctcgggccaggaatcctggcctccgcctgcggagccggcggaacccgcttcccgcctccacggggcagcgccagcggcctggtcctttcaccggcagctccgtgccgacgctctcaccgctcttcctatcgccgggagtggcgggccgaccagggggcggccgggctaccgtccgccattcccgtgtctctgcgcccgcgggggccgcccgagccggccaccatgccgctgggcctgaagcccacctgcagcgtatgcaagaccacgtcgtcctccatgtggaagaagggagcgcagggggagatcctctgccatcattgcactggccggggcggcgcgggcagcgggggcgcaggctcgggggcggctggagggactgggggcagcggcggcggcggcttcggcgcggcgaccttcgccagcacctccgccacccctccgcagagcaacgggggcgggggcggcaagcagagtaagcaggaaattcacaggaggtctgctcggctcagaaacactaaatacaaatctgctccggctgctgaaaagaaagtctccaccaaaggaaaagggagaagacatatatttaaattgaaaaatcccatcaaagctcctgagtcagtttccactataatcactgcagaatcaatcttctacaagggagtatattaccaaattggtgatgttgtttctgtgattgatgaacaagatggaaagccctactatgctcaaatcagaggttttatccaggaccagtattgcgagaagagtgcagcactgacgtggctcattcctaccctctctagccccagagaccaatttgatcccgcctcctatatcatagggccagaggaagatcttccaaggaagatggaatacttggaatttgtttgtcatgcaccttctgagtatttcaagtcacggtcatcaccatttcccacagttcccaccagaccagagaagggctacatatggactcatgttgggcctactcctgcaataacaattaaggaatcagttgccaaccatttgtagttcacaaattaaaactgggtttccaggcctggtgtggtggctcacgcctgtagccccagctattgcaccactgctctccaagctgggcaatggagtcagattctctttcttaaaaaaccacaaaaaaactggatttccagttctctaatattcttagtaccacaagatatgtcataggtatctttaaatgaaattcttagctggaaaagtgactaaaaagtttttctcctgctacctagtaataaacaaatcattgtttattactggtcacttagaaaattaaaagggatagggccaggcacagtggcttatgcctgtaattgcagcacttttagaggccgaggcaggcggatcacctgaggtcgggaagtggatcgcctgaggtcaggagttcgagaccagcctggccaacatggcgaaaccccgtcgctactaaaaatacaaaaattagccaggtgtggtggcatgtgcctgtaatcccagctatttgggaggctgaggcaggagaatcgcctaaacccaggaggtggaggttgtagtgagccaagattgcaccgctgtgctccagcctgggcaacagagtgagactcttgtctcggaaa

SEQ ID NO: 458168 - DNA, 361 bp, Homo sapiens
accttctgcataatgaattaactagaaataactttgcaaggagagccaaagctaagacccccgaaaccagacgagctacctaagaacagctaaaagagcacacccgtctatgtagcaaaatagtgggaagattaataggtagaggcgacaaacctaccgagcctggtgatagctggttgtccaagatagaatcttagttcaactttaaatttgccctttctggtgcagaaaagggagaagacatatatttaaattgaaaaatgtaagatatttgtggacagtgccttttactgtaatgacgttgtgtgtatcctgccactgccttcatttctcaccattgaacttggactctgcccttggt

SEQ ID NO: 458169 - DNA, 1737 bp, Homo sapiens
taagaaccaagatgtaaagcccttaagaaaatctcaatatacacatgtctacacagtcgtatacagtgtcatgccacaaatgcaggcgctggacctcattccttgttaaaggttttgtcatatcaggttatgaagtaagattattatgtcattattgtaaatggcagcttaagtattccgttgcagggggcgccataacctactacgttctctggccttagggagtaaagttgttaagtgtttttctctattgtagacacaacaaatgaatagtgtttgtcttggtcaagactgactcctactcccgcctcctgccctattacaagcagctcacaccttttggaggctctggagacgcctgtccagcgagctccgagattccgggtgctgaacttccggttttacttagcctagttgctgtaattacttctcttgaaaagcaaaagggcaatcttaattgttaaatgctcttataaagtacatactctgggatccttgtaagatgattgtactgcaacctttatgcactttttacttctttctctttttgttctttaatttgtttgtgtaacagagtaagcaggaaattcacaggaggtctgctcggctcagaaacactaaatacaaatctgctccggctgctgaaaagaaagtctccaccaaaggaaaagggagaagacatatatttaaattgaaaaatcccatcaaagctcctgagtcagtttccactataatcactgcagaatcaatcttctacaagggagtatattaccaaattggtgatgttgtttctgtgattgatgaacaagatggaaagccctactatgctcaaatcagaggttttatccaggaccagtattgcgagaagagtgcagcactgacgtggctcattcctaccctctctagccccagagaccaatttgatcccgcctcctatatcatagggccagaggaagatcttccaaggaagatggaatacttggaatttgtttgtcatgcaccttctgagtatttcaagtcacggtcatcaccatttcccacagttcccaccagaccagagaagggctacatatggactcatgttgggcctactcctgcaataacaattaaggaatcagttgccaaccatttgtagttcacaaattaaaactgggtttccaggcctggtgtggtggctcacgcctgtagccccagctattgcaccactgctctccaagctgggcaatggagtcagattctctttcttaaaaaaccacaaaaaaactggatttccagttctctaatattcttagtaccacaagatatgtcataggtatctttaaatgaaattcttagctggaaaagtgactaaaaagtttttctcctgctacctagtaataaacaaatcattgtttattactggtcacttagaaaattaaaagggatagggccaggcacagtggcttatgcctgtaattgcagcacttttagaggccgaggcaggcggatcacctgaggtcgggaagtggatcgcctgaggtcaggagttcgagaccagcctggccaacatggcgaaaccccgtcgctactaaaaatacaaaaattagccaggtgtggtggcatgtgcctgtaatcccagctatttgggaggctgaggcaggagaatcgcctaaacccaggaggtggaggttgtagtgagccaagattgcaccgctgtgctccagcctgggcaacagagtgagactcttgtctcggaaa

SEQ ID NO: 458170 - DNA, 1234 bp, Homo sapiens
atcaaaatactttatgaacaaatcttttctccagatgtaaactgtcatatatgcaccctcgtatgtgtatgtataattttcattcaaacgtgaaacaactttagaattggcaccaaacatataaacactgatacattagactatctcgaacaccttttactgaccactttgaaaacttgcttacctattaaggttcattcatagctgtgatgttctatttttattttcaatgtgggattatcttctgtttcccccagggagtatattaccaaattggtgatgttgtttctgtgattgatgaacaagatggaaagccctactatgctcaaatcagaggttttatccaggaccagtattgcgagaagagtgcagcactgacgtggctcattcctaccctctctagccccagagaccaatttgatcccgcctcctatatcatagggccagaggaagatcttccaaggaagatggaatacttggaatttgtttgtcatgcaccttctgagtatttcaagtcacggtcatcaccatttcccacagttcccaccagaccagagaagggctacatatggactcatgttgggcctactcctgcaataacaattaaggaatcagttgccaaccatttgtagttcacaaattaaaactgggtttccaggcctggtgtggtggctcacgcctgtagccccagctattgcaccactgctctccaagctgggcaatggagtcagattctctttcttaaaaaaccacaaaaaaactggatttccagttctctaatattcttagtaccacaagatatgtcataggtatctttaaatgaaattcttagctggaaaagtgactaaaaagtttttctcctgctacctagtaataaacaaatcattgtttattactggtcacttagaaaattaaaagggatagggccaggcacagtggcttatgcctgtaattgcagcacttttagaggccgaggcaggcggatcacctgaggtcgggaagtggatcgcctgaggtcaggagttcgagaccagcctggccaacatggcgaaaccccgtcgctactaaaaatacaaaaattagccaggtgtggtggcatgtgcctgtaatcccagctatttgggaggctgaggcaggagaatcgcctaaacccaggaggtggaggttgtagtgagccaagattgcaccgctgtgctccagcctgggcaacagagtgagactcttgtctcggaaa

SEQ ID NO: 458171 - DNA, 1502 bp, Homo sapiens
gccttagtttcagcttgctagaaaacctatgttgagtattatggctagttccatagttgagttgggaaatgtctttgaggagacactttttcactttgtattcatctgtacattttctgttacttgcattctgtcatgctcaggctattagagcaggtacatttttataactggaatgtttatgtgtagtgaagctctgagaggactttgcattagatctcagcagcataatcagaaggttgtcctttgtctcagcaatttttaagctaatagtagcagaaattgcagtggaaatagactgctttgccacaacattcagaaaatcatttatctttttattgcagttcttgtcaccaaacaatacattttagtacttctcaaattgcagaactctcatagggctgggaaaatgcctgtagacacatacatactatgaatgtgctaatgttttttgtattttcatagcccatcaaagctcctgagtcagtttccactataatcactgcagaatcaatcttctacaagggagtatattaccaaattggtgatgttgtttctgtgattgatgaacaagatggaaagccctactatgctcaaatcagaggttttatccaggaccagtattgcgagaagagtgcagcactgacgtggctcattcctaccctctctagccccagagaccaatttgatcccgcctcctatatcatagggccagaggaagatcttccaaggaagatggaatacttggaatttgtttgtcatgcaccttctgagtatttcaagtcacggtcatcaccatttcccacagttcccaccagaccagagaagggctacatatggactcatgttgggcctactcctgcaataacaattaaggaatcagttgccaaccatttgtagttcacaaattaaaactgggtttccaggcctggtgtggtggctcacgcctgtagccccagctattgcaccactgctctccaagctgggcaatggagtcagattctctttcttaaaaaaccacaaaaaaactggatttccagttctctaatattcttagtaccacaagatatgtcataggtatctttaaatgaaattcttagctggaaaagtgactaaaaagtttttctcctgctacctagtaataaacaaatcattgtttattactggtcacttagaaaattaaaagggatagggccaggcacagtggcttatgcctgtaattgcagcacttttagaggccgaggcaggcggatcacctgaggtcgggaagtggatcgcctgaggtcaggagttcgagaccagcctggccaacatggcgaaaccccgtcgctactaaaaatacaaaaattagccaggtgtggtggcatgtgcctgtaatcccagctatttgggaggctgaggcaggagaatcgcctaaacccaggaggtggaggttgtagtgagccaagattgcaccgctgtgctccagcctgggcaacagagtgagactcttgtctcggaaa

SEQ ID NO: 458172 - DNA, 1624 bp, Homo sapiens
ccccaccccggccagatccctttcccagtcctgcttcccagtgcctcgggccaggaatcctggcctccgcctgcggagccggcggaacccgcttcccgcctccacggggcagcgccagcggcctggtcctttcaccggcagctccgtgccgacgctctcaccgctcttcctatcgccgggagtggcgggccgaccagggggcggccgggctaccgtccgccattcccgtgtctctgcgcccgcgggggccgcccgagccggccaccatgccgctgggcctgaagcccacctgcagcgtatgcaagaccacgtcgtcctccatgtggaagaagggagcgcagggggagatcctctgccatcattgcactggccggggcggcgcgggcagcgggggcgcaggctcgggggcggctggagggactgggggcagcggcggcggcggcttcggcgcggcgaccttcgccagcacctccgccacccctccgcagagcaacgggggcgggggcggcaagcagagtaagcaggaaattcacaggaggtctgctcggctcagaaacactaaatacaaatctgctccggctgctgaaaagaaagtctccaccaaaggaaaagggagaagacatatatttaaattgaaaaatcccatcaaagctcctgagtcagtttccactataatcactgcagaatcaatcttctacaagggagtatattaccaaattggtgatgttgtttctgtgattgatgaacaagatggaaagccctactatgctcaaatcagaggttttatccaggaccagtattgcgagaagagtgcagcactgacgtggctcattcctaccctctctagccccagagaccaatttgatcccgcctcctatatcatagggccagaggaagatcttccaaggaagatggaatacttggaatttgtttgtcatgcaccttctgagtatttcaagtcacggtcatcaccatttcccacagttcccaccagaccagagaagggctacatatggactcatgttgggcctactcctgcaataacaattaaggaatcagttgccaaccatttgtagttcacaaattaaaactgggtttccaggcctggtgtggtggctcacgcctgtagccccagctattgcaccactgctctccaagctgggcaatggagtcagattctctttcttaaaaaaccacaaaaaaactggatttccagttctctaatattcttagtaccacaagatatgtcataggtatctttaaatgaaattcttagctggaaaagtgactaaaaagtttttctcctgctacctagtaataaacaaatcattgtttattactggtcacttagaaaattaaaagggatagggccaggcacagtggcttatgcctgtaattgcagcacttttagaggccgaggcaggcggatcacctgaggtcgggaagtggatcgcctgaggtcaggagttcgagaccagcctggccaacatggcgaaaccccgtcgctactaaaaatacaaaagcaggagaatcgcctaaacccaggaggtggaggttgtagtgagccaagattgcaccgctgtgctccagcctgggcaacagagtgagactcttgtctcggaaa

SEQ ID NO: 458173 - DNA, 1661 bp, Homo sapiens
ggagggatggatcccggtcccacctaaagaagcagtctggccatgatctgccacagcggctgtgctgcactgtgaagactgctgcccagtccaatctgcccagcctccctagcactgtcagaaactaaattccagtaattggatgccaatttgctgatgacaaggcacttcctgataatgagtctggaattctgagcagcagtttcacaatctgtaattacacgtttccgccctttgcaataaggaaatacatagtttactttcatttttgactctgaggctctttccaacgctgtaaaaaaggacagaggctgttccctatggcagaagcctttgtgatctcacctgttggaatgcactaatgttttctgagccccttaaatatcttgtctacattcttttaagaagctcttcaccaactgtcagaaggcaaccacagaaaaaagccacttaaggtgttggaatccctgggcaaagatttcctcactggtgttttggataacttggtggaacaaaatgtactgaactggaaggaagaggaaaaaaagaaatattacgatgctaaaactgaagacaaagttcgggtcatggcagactctatgcaagagaagcaacgtatggcaggacaaatgcttcttcaaaccttttttaacatagaccaaatatcccccaataaaaaagctcatccgaatatggaggctggaccacctgagtcaggagaatctacagatgccctcaagctttgtcctcatgaagaattcctgagactatgtaaagaaagagctgaagagatctatccaataaaggagagaaacaaccgcacacgcctggctctcatcatatgcaatacagagtttgaccatctgcctccgaggaatggagctgactttgacatcacagggatgaaggagctacttgagggtctggactatagtgtagatgtagaagagaatctgacagccagggatatggagtcagcgctgagggcatttgctaccagaccagagcacaagtcctctgacagcacattcttggtactcatgtctcatggcatcctggagggaatctgcggaactgtgcatgatgagaaaaaaccagatgtgctgctttatgacaccatcttccagatattcaacaaccgcaactgcctcagtctgaaggacaaacccaaggtcatcattgtccaggcctgcagaggtgcaaaccgtggggaactgtgggtcagagactctccagcatccttggaagtggcctcttcacagtcatctgagaacctggaggaagatgctgtttacaagacccacgtggagaaggacttcattgctttctgctcttcaacgccacacaacgtgtcctggagagacagcacaatgggctctatcttcatcacacaactcatcacatgcttccagaaatattcttggtgctgccacctagaggaagtatttcggaaggtacagcaatcatttgaaactccaagggccaaagctcaaatgcccaccatagaacgactgtccatgacaagatatttctacctctttcctggcaattgaaaatggaagccacaagcagcccagccctccttaatcaacttcaaggagcaccttcattagtacagcttgcatatttaacattttgtatttcaataaaagtgaagacaa

SEQ ID NO: 458174 - DNA, 1620 bp, Homo sapiens
ggagggatggatcccggtcccacctaaagaagcagtctggccatgatctgccacagcggctgtgctgcactgtgaagactgctgcccagtccaatctgcccagcctccctagcactgtcagaaactaaattccagtaattggatgccaatttgctgatgacaaggcacttcctgataatgagtctggaattctgagcagcagtttcacaatctgtaattacacgtttccgccctttgcaataaggaaatacatagtttactttcatttttgactctgaggctctttccaacgctgtaaaaaaggacagaggctgttccctatggcagaaggcaaccacagaaaaaagccacttaaggtgttggaatccctgggcaaagatttcctcactggtgttttggataacttggtggaacaaaatgtactgaactggaaggaagaggaaaaaaagaaatattacgatgctaaaactgaagacaaagttcgggtcatggcagactctatgcaagagaagcaacgtatggcaggacaaatgcttcttcaaaccttttttaacatagaccaaatatcccccaataaaaaaggtgataaattgggtcacagaggcagaaatcacaatttatgttctgcaatatcctgcagctcatccgaatatggaggctggaccacctgagtcaggagaatctacagatgccctcaagctttgtcctcatgaagaattcctgagactatgtaaagaaagagctgaagagatctatccaataaaggagagaaacaaccgcacacgcctggctctcatcatatgcaatacagagtttgaccatctgcctccgaggaatggagctgactttgacatcacagggatgaaggagctacttgagggtctggactatagtgtagatgtagaagagaatctgacagccagggatatggagtcagcgctgagggcatttgctaccagaccagagcacaagtcctctgacagcacattcttggtactcatgtctcatggcatcctggagggaatctgcggaactgtgcatgatgagaaaaaaccagatgtgctgctttatgacaccatcttccagatattcaacaaccgcaactgcctcagtctgaaggacaaacccaaggtcatcattgtccaggcctgcagaggtgcaaaccgtggggaactgtgggtcagagactctccagcatccttggaagtggcctcttcacagtcatctgagaacctggaggaagatgctgtttacaagacccacgtggagaaggacttcattgctttctgctcttcaacgccacacaacgtgtcctggagagacagcacaatgggctctatcttcatcacacaactcatcacatgcttccagaaatattcttggtgctgccacctagaggaagtatttcggaaggtacagcaatcatttgaaactccaagggccaaagctcaaatgcccaccatagaacgactgtccatgacaagatatttctacctctttcctggcaattgaaaatggaagccacaagcagcccagccctccttaatcaacttcaaggagcaccttcattagtacagcttgcatatttaacattttgtatttcaataaaagtgaagacaa

SEQ ID NO: 458175 - DNA, 1292 bp, Homo sapiens
  misc_feature (24)..(24): n is a, c, g, or t
  misc_feature (27)..(27): n is a, c, g, or t
aactataggcaagtagcgaggctnggngttaatcggccgaggggctgtccctatggcaaggcaaccacagaaaaaagccacttaaggtgttggaatccctgggcaaagatttcctcactggtgttttggataacttggtggaacaaaatgtactgaactggaaggaagaggaaaaaaagaaatattacgatgctaaaactgaagacaaagttcgggtcatggcagactctatgcaagagaagcaacgtatggcaggacaaatgcttcttcaaaccttttttaacatagaccaaatatcccccaataaaaaagctcatccgaatatggaggctggaccacctgagtcaggagaatctacagatgccctcaagctttgtcctcatgaagaattcctgagactatgtaaagaaagagctgaagagatctatccaataaaggagagaaacaaccgcacacgcctggctctcatcatatgcaatacagagtttgaccatctgcctccgaggaatggagctgactttgacatcacagggatgaaggagctacttgagggtctggactatagtgtagatgtagaagagaatctgacagccagggatatggagtcagcgctgagggcatttgctaccagaccagagcacaagtcctctgacagcacattcttggtactcatgtctcatggcatcctggagggaatctgcggaactgtgcatgatgagaaaaaaccagatgtgctgctttatgacaccatcttccagatattcaacaaccgcaactgcctcagtctgaaggacaaacccaaggtcatcattgtccaggcctgcagaggtgcaaaccgtggggaactgtgggtcagagactctccagcatccttggaagtggcctcttcacagtcatctgagaacctggaggaagatgctgtttacaagacccacgtggagaaggacttcattgctttctgctcttcaacgccacacaacgtgtcctggagagacagcacaatgggctctatcttcatcacacaactcatcacatgcttccagaaatattcttggtgctgccacctagaggaagtatttcggaaggtacagcaatcatttgaaactccaagggccaaagctcaaatgcccaccatagaacgactgtccatgacaagatatttctacctctttcctggcaattgaaaatggaagccacaagcagcccagccctccttaatcaacttcaaggagcaccttcattagtacagcttgcatatttaacattttgtatttcaataaaagtgaagacaa

SEQ ID NO: 458176 - DNA, 1373 bp, Homo sapiens
catatagttgactcgcattctcgactctgaggttcttttgcaacgtctgttgaaacagtgagcaaaatctgggccctatgtcgtgagggaatcatagaaaaatagccacatttacacggtgtggggaactcgcacgtggtgtcatagagatttactctcagcattgggtgtttttcctggaaggttataccatttgggtggaatcataatatgtacgtgagatctggaaagggaagagtcggataatccaaagtaaaatatttacggaattgggtaaaactgaagacaaagttcgggtcatggcagactctatgcaagagaagcaacgtatggcaggacaaatgcttcttcaaaccttttttaacatagaccaaatatcccccaataaaaaagctcatccgaatatggaggctggaccacctgagtcaggagaatctacagatgccctcaagctttgtcctcatgaagaattcctgagactatgtaaagaaagagctgaagagatctatccaataaaggagagaaacaaccgcacacgcctggctctcatcatatgcaatacagagtttgaccatctgcctccgaggaatggagctgactttgacatcacagggatgaaggagctacttgagggtctggactatagtgtagatgtagaagagaatctgacagccagggatatggagtcagcgctgagggcatttgctaccagaccagagcacaagtcctctgacagcacattcttggtactcatgtctcatggcatcctggagggaatctgcggaactgtgcatgatgagaaaaaaccagatgtgctgctttatgacaccatcttccagatattcaacaaccgcaactgcctcagtctgaaggacaaacccaaggtcatcattgtccaggcctgcagaggtgcaaaccgtggggaactgtgggtcagagactctccagcatccttggaagtggcctcttcacagtcatctgagaacctggaggaagatgctgtttacaagacccacgtggagaaggacttcattgctttctgctcttcaacgccacacaacgtgtcctggagagacagcacaatgggctctatcttcatcacacaactcatcacatgcttccagaaatattcttggtgctgccacctagaggaagtatttcggaaggtacagcaatcatttgaaactccaagggccaaagctcaaatgcccaccatagaacgactgtccatgacaagatatttctacctctttcctggcaattgaaaatggaagccacaagcagcccagccctccttaatcaacttcaaggagcaccttcattagtacagcttgcatatttaacattttgtatttcaataaaagtgaagacaa

SEQ ID NO: 458177 - DNA, 1224 bp, Homo sapiens
gtagctataacagggaaatagtatgacttgggtacacttctctgttaggccctacagaacaggaggggaatcttacttttaccaaaggtagaaatcactcagtgtgttctagtctaccagctgcctcatttagccattggcttgaacaagggaatggataagggagtgatttgtcccgagttgctgtagccttttggggaaagagaccggggttatctatcccctctccaggctgcccttgtcttctggactcaggtggtgtgcacaccacctgagtcaggagaatctacagatgccctcaagctttgtcctcatgaagaattcctgagactatgtaaagaaagagctgaagagatctatccaataaaggagagaaacaaccgcacacgcctggctctcatcatatgcaatacagagtttgaccatctgcctccgaggaatggagctgactttgacatcacagggatgaaggagctacttgagggtctggactatagtgtagatgtagaagagaatctgacagccagggatatggagtcagcgctgagggcatttgctaccagaccagagcacaagtcctctgacagcacattcttggtactcatgtctcatggcatcctggagggaatctgcggaactgtgcatgatgagaaaaaaccagatgtgctgctttatgacaccatcttccagatattcaacaaccgcaactgcctcagtctgaaggacaaacccaaggtcatcattgtccaggcctgcagaggtgcaaaccgtggggaactgtgggtcagagactctccagcatccttggaagtggcctcttcacagtcatctgagaacctggaggaagatgctgtttacaagacccacgtggagaaggacttcattgctttctgctcttcaacgccacacaacgtgtcctggagagacagcacaatgggctctatcttcatcacacaactcatcacatgcttccagaaatattcttggtgctgccacctagaggaagtatttcggaaggtacagcaatcatttgaaactccaagggccaaagctcaaatgcccaccatagaacgactgtccatgacaagatatttctacctctttcctggcaattgaaaatggaagccacaagcagcccagccctccttaatcaacttcaaggagcaccttcattagtacagcttgcatatttaacattttgtatttcaataaaagtgaagacaa

SEQ ID NO: 458178 - DNA, 1735 bp, Homo sapiens
ggagggatggatcccggtcccacctaaagaagcagtctggccatgatctgccacagcggctgtgctgcactgtgaagactgctgcccagtccaatctgcccagcctccctagcactgtcagaaactaaattccagtaattggatgccaatttgctgatgacaaggcacttcctgataatgagtctggaattctgagcagcagtttcacaatctgtaattacacgtttccgccctttgcaataaggaaatacatagtttactttcatttttgactctgaggctctttccaacgctgtaaaaaaggacagaggctgttccctatggcagaaggcaaccacagaaaaaagccacttaaggtgttggaatccctgggcaaagatttcctcactggtgttttggataacttggtggaacaaaatgtactgaactggaaggaagaggaaaaaaagaaatattacgatgctaaaactgaagacaaagttcgggtcatggcagactctatgcaagagaagcaacgtatggcaggacaaatgcttcttcaaaccttttttaacatagaccaaatatcccccaataaaaaagctcatccgaatatggaggctggaccacctgagtcaggagaatctacagatgccctcaagctttgtcctcatgaagaattcctgagactatgtaaagaaagagctgaagagatctatccaataaaggagagaaacaaccgcacacgcctggctctcatcatatgcaatacagagtttgaccatctgcctccgaggaatggagctgactttgacatcacagggatgaaggagctacttgagggtctggactatagtgtagatgtagaagagaatctgacagccagggatatggagtcagcgctgagggcatttgctaccagaccagagcacaagtcctctgacagcacattcttggtactcatgtctcatggcatcctggagggaatctgcggaactgtgcatgatgagaaaaaaccagatgtgctgctttatgacaccatcttccagatattcaacaaccgcaactgcctcagtctgaaggacaaacccaaggtcatcattgtccaggcctgcagaggtgcaaaccgtggggaactgtgggtcagagactctccagcatccttggaagtggcctcttcacagtcatctgagaacctggaggaagatgctgtttacaagacccacgtggagaaggacttcattgctttctgctcttcaacgccacacaacgtgtcctggagagacagcacaatgggctctatcttcatcacacaactcatcacatgcttccagaaatattcttggtgctgccacctagaggaagtatttcggaaggtacagcaatcatttgaaactccaagggccaaagctcaaatgcccaccatagaacgactgtccatgacaagatatttctacctctttcctggcaattgaaaatgtggaagcaaaggcaggccagccttcttatcaatttgaggggcccttcattagtcaaggtgctttttacctttggtttttcctaaggtcgacaaaaaaaaaagggggggtaagataccggggggcccattggcgtccggtttgtcaagggcccagggagagtataagagagcgcgggggttaaaggtgtgggaagcttgcgttggcggaccctgtggggggggcacccacaataagggaaaattgtgtgtgacacgcttgcggggcgtctcaagaga

SEQ ID NO: 458179 - DNA, 1508 bp, Homo sapiens
ggagggatggatcccggtcccacctaaagaagcagtctggccatgatctgccacagcggctgtgctgcactgtgaagactgctgcccagtccaatctgcccagcctccctagcactgtcagaaactaaattccagtaattggatgccaatttgctgatgacaaggcacttcctgataatgagtctggaattctgagcagcagtttcacaatctgtaattacacgtttccgccctttgcaataaggaaatacatagtttactttcatttttgactctgaggctctttccaacgctgtaaaaaaggacagaggctgttccctatggcagaaggcaaccacagaaaaaagccacttaaggtgttggaatccctgggcaaagatttcctcactggtgttttggataacttggtggaacaaaatgtactgaactggaaggaagaggaaaaaaagaaatattacgatgctaaaactgaagacaaagttcgggtcatggcagactctatgcaagagaagcaacgtatggcaggacaaatgcttcttcaaaccttttttaacatagaccaaatatcccccaataaaaaagctcatccgaatatggaggctggaccacctgagtcaggagaatctacagatgccctcaagctttgtcctcatgaagaattcctgagactatgtaaagaaagagctgaagagatctatccaataaaggagagaaacaaccgcacacgcctggctctcatcatatgcaatacagagtttgaccatctgcctccgaggaatggagctgactttgacatcacagggatgaaggagctacttgagggtctggactatagtgtagatgtagaagagaatctgacagccagggatatggagtcagcgctgagggcatttgctaccagaccagagcacaagtcctctgacagcacattcttggtactcatgtctcatggcatcctggagggaatctgcggaactgtgcatgatgagaactgcctcagtctgaaggacaaacccaaggtcatcattgtccaggcctgcagaggtgcaaaccgtggggaactgtgggtcagagactctccagcatccttggaagtggcctcttcacagtcatctgagaacctggaggaagatgctgtttacaagacccacgtggagaaggacttcattgctttctgctcttcaacgccacacaacgtgtcctggagagacagcacaatgggctctatcttcatcacacaactcatcacatgcttccagaaatattcttggtgctgccacctagaggaagtatttcggaaggtacagcaatcatttgaaactccaagggccaaagctcaaatgcccaccatagaacgactgtccatgacaagatatttctacctctttcctggcaattgaaaatggaagccacaagcagcccagccctccttaatcaacttcaaggagcaccttcattagtacagcttgcatatttaacattttgtatttcaataaaagtgaagacaa

SEQ ID NO: 458180 - DNA, 1458 bp, Homo sapiens
ggagggatggatcccggtcccacctaaagaagcagtctggccatgatctgccacagcggctgtgctgcactgtgaagactgctgcccagtccaatctgcccagcctccctagcactgtcagaaactaaattccagtaattggatgccaatttgctgatgacaaggcacttcctgataatgagtctggaattctgagcagcagtttcacaatctgtaattacacgtttccgccctttgcaataaggaaatacatagtttactttcatttttgactctgaggctctttccaacgctgtaaaaaaggacagaggctgttccctatggcagaaggcaaccacagaaaaaagccacttaaggtgttggaatccctgggcaaagatttcctcactggtgttttggataacttggtggaacaaaatgtactgaactggaaggaagaggaaaaaaagaaatattacgatgctaaaactgaagacaaagttcgggtcatggcagactctatgcaagagaagcaacgtatggcaggacaaatgcttcttcaaaccttttttaacatagaccaaatatcccccaataaaaaagctcatccgaatatggaggctggaccacctgagtcaggagaatctacagatgccctcaagctttgtcctcatgaagaattcctgagactatgtaaagaaagagctgaagagatctatccaataaaggagagaaacaaccgcacacgcctggctctcatcatatgcaatacagagtttgaccatctgcctccgaggaatggagctgactttgacatcacagggatgaaggagctacttgagggtctggactatagtgtagatgtagaagagaatctgacagccagggatatggagtcagcgctgagggcatttgctaccagaccagagcacaagtcctctgacagcacattcttggtactcatgtctcatggcatcctggagggaatctgcggaactgtgcatgatgagaaaaaaccagatgtgctgctttatgacaccatcttccagatattcaacaaccgcaactgcctcagtctgaaggacaaacccaaggtcatcattgtccaggcctgcagaggtgcaaaccgtggggaactgtgggtcagagactctccagcatccttggaagtggcctcttcacagtcatctgagaacctggaggaagatgctgtttacaagacccacgtggagaaggacttcattgctttctgctcttcaacgccacacaacgtgtcctggagagacagcacaatgggctctatcttcatcacacaactcatcacatgcttccagaaatattcttggtgctgccacctagaggaagtatttcggaaggaagccacaagcagcccagccctccttaatcaacttcaaggagcaccttcattagtacagcttgcatatttaacattttgtatttcaataaaagtgaagacaa

SEQ ID NO: 458181 - DNA, 3448 bp, Homo sapiens
  misc_feature (1827)..(1827): n is a, c, g, or t
ggagggatggatcccggtcccacctaaagaagcagtctggccatgatctgccacagcggctgtgctgcactgtgaagactgctgcccagtccaatctgcccagcctccctagcactgtcagaaactaaattccagtaattggatgccaatttgctgatgacaaggcacttcctgataatgagtctggaattctgagcagcagtttcacaatctgtaattacacgtttccgccctttgcaataaggaaatacatagtttactttcatttttgactctgaggctctttccaacgctgtaaaaaaggacagaggctgttccctatggcagaaggcaaccacagaaaaaagccacttaaggtgttggaatccctgggcaaagatttcctcactggtgttttggataacttggtggaacaaaatgtactgaactggaaggaagaggaaaaaaagaaatattacgatgctaaaactgaagacaaagttcgggtcatggcagactctatgcaagagaagcaacgtatggcaggacaaatgcttcttcaaaccttttttaacatagaccaaatatcccccaataaaaaagctcatccgaatatggaggctggaccacctgagtcaggagaatctacagatgccctcaagctttgtcctcatgaagaattcctgagactatgtaaagaaagagctgaagagatctatccaataaaggagagaaacaaccgcacacgcctggctctcatcatatgcaatacagagtttgaccatctgcctccgaggaatggagctgactttgacatcacagggatgaaggagctacttgagggtctggactatagtgtagatgtagaagagaatctgacagccagggatatggagtcagcgctgagggcatttgctaccagaccagagcacaagtcctctgacagcacattcttggtactcatgtctcatggcatcctggagggaatctgcggaactgtgcatgatgagaaaaaaccagatgtgctgctttatgacaccatcttccagatattcaacaaccgcaactgcctcagtctgaaggacaaacccaaggtcatcattgtccaggcctgcagaggtggtgagtgctgagactgaacatctaacagttatgaaggtgtatgcagaggattgtgatgtttggtttatatttaggggcaacattcttaaacctcatccagtgtaaagaaagtacattgaattctaaagaaactctacctaagggtctggtataacaagaaattgtctcatcaaaattagtggagaaatttctgttcaattttatccacagtaagtggtgaaggagatcatcagaatccctaaatcaaagttaaacagaaatactcaaactttggaatggaatcattttcatgatagcttgatttgtaaatgttttacagaaattttgacattgtgtggtttgagaagaatttcatttgaaactggggccattatgtaaaacagcatccctttttcttataattattgagggggaaattagtaaagagatcaggggactgtagaatgttgcagtgccactttgctccaaagattcaattgcctcatggctggctgaggatggtggctcatgcctataatcccaacactttgggaggccaagacaggaggatggcttgaggccaggaatttgagaccaattgtctgatagctcttgggagctatttttcaaaagaaaacagattttttttctagaaaatggtaaattcaagatgatttcactatcagtaggcacattgttgaatgacactggagagaaagaaaagtggtgtgtgtgtgtgtgtgtctntctctgtgtgtgtttgtatgtgtgtgggtctgtatgtatgaaactagtaagaatgaacattcaaaaagaacaaggtgggcaactgtgacagccattctgtgggaggcacagcagtgtgcagaaagttaatgtctccatagcaaaccgtggggaactgtgggtcagagactctccagcatccttggaagtggcctcttcacagtcatctgagaacctggaggaagatgctgtttacaagacccacgtggagaaggacttcattgctttctgctcttcaacgccacacaacgtgtcctggagagacagcacaatgggctctatcttcatcacacaactcatcacatgcttccagaaatattcttggtgctgccacctagaggaagtatttcggaaggtaagtgtctcttttctagttactcatttatttcttcaggaagaatttgtcatgattcactttttacttcacaatgacaatttttgtcagggaagtgaaagtagagaggtacccagtttctgtcattcagttgtttaaaatatggctaaggaaaagacaattccaatatatcccagcagaagatcaaagtaaaataaaataatatcaaccataagctttatgttatggagcgtaagttcttaagttttagagaaggaaaaatattttgaaataatttttatttcttaatttattaaatgaataaaatctgggtggtctgctaggtcatggatttcctcctggtgacagaggggtaaatgaggcctacatgacgtaatcctatctaggactcacattttcgtgggagatatggatactgaaaatgtgggttaacaaacaaatatgtgcttacagattgtgataggatccataaagacatgtgagagggaacaaaaaagaagtcattctttcaataaaaaagtgcagaaggaaaggtttgctacttcttgcccaacttgggacattccttattcccactacttcctatgttatttttctccatagctcgtacatctacccactcagcaaatattaatagtttatttatgtgtctggttttttacttgtatttactcactaacatgcaaacttcgtgatggcagggatttgctcagcaattcaacaaacctggcacgtagcagatattcaattaataattattgaataaatacatgcataaatacacagataaatgcaccctcttgtttaaagagaaaatgggattggtattaacacagaatagtataattattaataaagtaaaaattgtagagaacagtaaaactcctgcgggaaaagaaagatacacctctggcgtttatagaagaaagccatccagaaccagcacagtcactcattcctgtaatcccagcactctgggagtccgaaggagggtggagtggcttgaacccaggaatttgaggccaacctgggcaacatggcaaaacccatctctacaaaaaatacaaaaattagccgggcatattgactggaacctgtaatccgagctacctgagagctgagatgggagaatcgcttgagctcaggaagcggaggttgcaatgagctgagatttcaccactaccctctagcctggatgacagagtaagaccctgtcttaaaaaaaga

SEQ ID NO: 458182 - DNA, 623 bp, Homo sapiens
ggagggatggatcccggtcccacctaaagaagcagtctggccatgatctgccacagcggctgtgctgcactgtgaagactgctgcccagtccaatctgcccagcctccctagcactgtcagaaactaaattccagtaattggatgccaatttgctgatgacaaggcacttcctgataatgagtctggaattctgagcagcagtttcacaatctgtaattacacgtttccgccctttgcaataaggaaatacatagtttactttcatttttgactctgaggctctttccaacgctgtaaaaaaggacagaggctgttccctatggcagaaggcaaccacagaaaaaagccacttaaggtgttggaatccctgggcaaagatttcctcactggtgttttggataacttggtggaacaaaatgtactgaactggaaggaagaggaaaaaaagaaatattacgatgctaaaactgaagacaaagttcgggtcattggaaccctttttgaaagaaaaaccacgttgggggagaaaaggtgcttttaaaacttttttatataaaacaacaatttctccccccaaaaaagggggtaattggttgccacacggaggaataccaaactatgt

SEQ ID NO: 458183 - DNA, 887 bp, Homo sapiens
cttggtgctaagagctattcctaacgttgggaataggtctgtaaatgagacaggaagttcccagccagcattcatctaggttacagtagagagaaacagtgaaattgtaagaaaaaagacaacttcaagcaccaggtgtgcatatgtgtgtctacaaaacagcgacaagacagccaaaagtaagtaaaaagaaaataaaaaggaaatatgagacagaattgtagggtggggagcaacgtttttgggttggttggagatggctctggaaagacatgaatgcagcgccttcaaagtaggagacgccacctgtgaaagagctgagctgaaaatgaacctggcacacgagaagcacaaagagaagaccagtgtgactagaggttgaaggagaaggaacatagtatgagggtggtgtatggtcaggccagaagtttgattctattctaagcatagtgggatggattttacaaagaacatggtgtgttgcatttataacacatgacttgctaggtaaggagatagaagattgagatggaaaagaaaaagtaacatgagtaacacatagcaatatacaatatactaagaagacagtatgtcagcaggaagagaaaatgggaatccacggccccataaagaaggaaaaataaaaccattaaacagctgtcatgactgagtaagcactaagtgaagcaccacgacctggatgttacatatgtttcttgtttcgctcatggtaaatctaggagtcccctttaattgtgatgcttctctgactgaagttagacattgctcttttacaggatatggagtcagcgctgagggcatttgctaccagaccagagcacaagtcctctgacagcacattcttggtactcatgtctcatggcatc

SEQ ID NO: 458184 - DNA, 1562 bp, Homo sapiens
ggagggatggatcccggtcccacctaaagaagcagtctggccatgatctgccacagcggctgtgctgcactgtgaagactgctgcccagtccaatctgcccagcctccctagcactgtcagaaactaaattccagtaattggatgccaatttgctgatgacaaggcacttcctgataatgagtctggaattctgagcagcagtttcacaatctgtaattacacgtttccgccctttgcaataaggaaatacatagtttactttcatttttgactctgaggctctttccaacgctgtaaaaaaggacagaggctgttccctatggcagaaggcaaccacagaaaaaagccacttaaggtgttggaatccctgggcaaagatttcctcactggtgttttggataacttggtggaacaaaatgtactgaactggaaggaagaggaaaaaaagaaatattacgatgctaaaactgaagacaaagttcgggtcatggcagactctatgcaagagaagcaacgtatggcaggacaaatgcttcttcaaaccttttttaacatagaccaaatatcccccaataaaaaagctcatccgaatatggaggctggaccacctgagtcaggagaatctacagatgccctcaagctttgtcctcatgaagaattcctgagactatgtaaagaaagagctgaagagatctatccaataaaggagagaaacaaccgcacacgcctggctctcatcatatgcaatacagagtttgaccatctgcctccgaggaatggagctgactttgacatcacagggatgaaggagctacttgagggtctggactatagtgtagatgtagaagagaatctgacagccagggatatggagtcagcgctgagggcatttgctaccagaccagagcacaagtcctctgacagcacattcttggtactcatgtctcatggcatcctggagggaatctgcggaactgtgcatgatgagaaaaaaccagatgtgctgctttatgacaccatcttccagatattcaacaaccgcaactgcctcagtctgaaggacaaacccaaggtcatcattgtccaggcctgcagaggtgcaaaccgtggggaactgtgggtcagagactctccagcatccttggaagtggcctcttcacagtcatctgagaacctggaggaagatgctgtttacaagacccacgtggagaaggacttcattgctttctgctcttcaacgccacacaacgtgtcctggagagacagcacaatgggctctatcttcatcacacaactcatcacatgcttccagaaatattcttggtgctgccacctagaggaagtatttcggaaggtacagcaatcatttgaaactccaagggccaaagctcaaatgcccaccatagaacgactgtccatgacaagatatttctacctctttcctggcaattgaaaatggaagccacaagcagcccagccctccttaatcaacttcaaggagcaccttcattagtacagcttgcatatttaacattttgtatttcaataaaagtgaagacaa

SEQ ID NO: 458185 - DNA, 5541 bp, Homo sapiens
  misc_feature (1827)..(1827): n is a, c, g, or t
ggagggatggatcccggtcccacctaaagaagcagtctggccatgatctgccacagcggctgtgctgcactgtgaagactgctgcccagtccaatctgcccagcctccctagcactgtcagaaactaaattccagtaattggatgccaatttgctgatgacaaggcacttcctgataatgagtctggaattctgagcagcagtttcacaatctgtaattacacgtttccgccctttgcaataaggaaatacatagtttactttcatttttgactctgaggctctttccaacgctgtaaaaaaggacagaggctgttccctatggcagaaggcaaccacagaaaaaagccacttaaggtgttggaatccctgggcaaagatttcctcactggtgttttggataacttggtggaacaaaatgtactgaactggaaggaagaggaaaaaaagaaatattacgatgctaaaactgaagacaaagttcgggtcatggcagactctatgcaagagaagcaacgtatggcaggacaaatgcttcttcaaaccttttttaacatagaccaaatatcccccaataaaaaagctcatccgaatatggaggctggaccacctgagtcaggagaatctacagatgccctcaagctttgtcctcatgaagaattcctgagactatgtaaagaaagagctgaagagatctatccaataaaggagagaaacaaccgcacacgcctggctctcatcatatgcaatacagagtttgaccatctgcctccgaggaatggagctgactttgacatcacagggatgaaggagctacttgagggtctggactatagtgtagatgtagaagagaatctgacagccagggatatggagtcagcgctgagggcatttgctaccagaccagagcacaagtcctctgacagcacattcttggtactcatgtctcatggcatcctggagggaatctgcggaactgtgcatgatgagaaaaaaccagatgtgctgctttatgacaccatcttccagatattcaacaaccgcaactgcctcagtctgaaggacaaacccaaggtcatcattgtccaggcctgcagaggtggtgagtgctgagactgaacatctaacagttatgaaggtgtatgcagaggattgtgatgtttggtttatatttaggggcaacattcttaaacctcatccagtgtaaagaaagtacattgaattctaaagaaactctacctaagggtctggtataacaagaaattgtctcatcaaaattagtggagaaatttctgttcaattttatccacagtaagtggtgaaggagatcatcagaatccctaaatcaaagttaaacagaaatactcaaactttggaatggaatcattttcatgatagcttgatttgtaaatgttttacagaaattttgacattgtgtggtttgagaagaatttcatttgaaactggggccattatgtaaaacagcatccctttttcttataattattgagggggaaattagtaaagagatcaggggactgtagaatgttgcagtgccactttgctccaaagattcaattgcctcatggctggctgaggatggtggctcatgcctataatcccaacactttgggaggccaagacaggaggatggcttgaggccaggaatttgagaccaattgtctgatagctcttgggagctatttttcaaaagaaaacagattttttttctagaaaatggtaaattcaagatgatttcactatcagtaggcacattgttgaatgacactggagagaaagaaaagtggtgtgtgtgtgtgtgtgtctntctctgtgtgtgtttgtatgtgtgtgggtctgtatgtatgaaactagtaagaatgaacattcaaaaagaacaaggtgggcaactgtgacagccattctgtgggaggcacagcagtgtgcagaaagttaatgtctccatagcaaaccgtggggaactgtgggtcagagactctccagcatccttggaagtggcctcttcacagtcatctgagaacctggaggaagatgctgtttacaagacccacgtggagaaggacttcattgctttctgctcttcaacgccacgtatgtatctttcagtggcagtaagggatttgtgggcctgaggccatctttgaatgaatctagaaaatcaagaatccctatgaaacaatgatctgatagaatgttgtgtgctctccacatattttacatgatcttatgtgtgccgtgagaacagattcctaaagcaacccgatacatggaaacccattcaccactcaccatttaaacagatgatgaattctgttttttttattaagcccatttaacattttacatagtgtttttatggattccaggaatggcttctctttctcaaatgatcaacttcaagtcttctttccatatttcacatctgattatacaatgagcagtgccattgcatgccctgctagaactgtggataccctttaaaacaagtagaaaatgatagggtggggctgattaggtctaatctcagggaacactggttagtatttcatgtctaggtaattatcttaaggagcgtacatttaactgtttttgatttgtatatttttaaatcttattttttaaaaccactttattgaggtatgattgacatacataatgttacatatttaatgtatacaacttaatgagtttggagatttctatgtactcctgaaatcatcaccactatctatgccataaacatatctctcttctccaaaagattcttacacttctctgtttattattatcatcattccgtgactgcgtgtgagaagtatacttagcataaaatctactctcttaacaaatttcaagtacataacacaatgttggttactactggcaccatcctgtacaatagatttttatcacttttttcagcttctatcactgaaacttgtcatgtgttcatctatttctattatacggtgaaagacagtgtggcataatctgcaaacaactttggagcctggtggcaattttttgttgcttactcactgtgtgaacatggggaagttccttcatctttctgtgcttctatttcttcctctgtaaagtgggataattctagttatttctcaagcccctataaaagctgagagaatgaacatgagttttgtagtagaaagccaatcccaagaatcaaaatttcttcaatacacaatctcttgcaatgcttaccaactgcaacttttgatcaccttttgctaggttttctgtttacgttctgtggaaagtaggtaaatgtcaggttgtaagtgcttcctacaaatctgtaaagataattcccaagctatgcttttctttttaaaaacattctcaaaacaaaaatatgaacaaaaacatagtgaaagtcatagcccaaggcatacccatctgtatcattatagacaacgtgtcctggagagacagcacaatgggctctatcttcatcacacaactcatcacatgcttccagaaatattcttggtgctgccacctagaggaagtatttcggaaggtacagcaatcatttgaaactccaagggccaaagctcaaatgcccaccatagaacgactgtccatgacaagatatttctacctctttcctggcaattgaaaatgggttaagtattgagagttgttggtggtatgtgaaataaataagagagtgatattggtggttaagttcaatgacaaatgacagctgagtacttggatggtcaaattggtgtttttgttgatatagtctggtgattatctgctacttctttccgacttacatgtatttggattcctccaactctacaattaatcaggcaatcaatcaatcaatcaaggaggtaaggaaaaccgcagcagaatgtgatgatgaaaaaccaaggatagtaattattaaaatagaaacatgctcatgcttccattactatttatattcatttatctctcatagtctttctcttttattcccctttcttacacacacacacacacacacacacagagagagagagagagagagagagacactaagtagccaaacattgcatcaaaccctaaacaaaacagagtaaacaaaggagctaactctggagaaagcagcattttgatcctctgagtgaggatgtcacagcaaataccacattactgacatccagataccattaccagatggtacagaatacatcctacactgtagagtttgtgttgatccaggctctggttctcagactgttctcacaatgcagatcaccaatcactcagggttggcttttgaatcttcaatcacagtccagaagttccttcaagctcccatgtaacttttgttattattttgaccaaaatattatagaatgggtacattgagtctggactaaatgattactttcttcactcataatagctttatttaacactagactataagactattatcaatctccctctaagatacatacttaaaattatattttatagtgaaatgtataaagttgttctcaatacttccaacatttaccacataatttttactcttggtttctgacacttcagtcacaatattgcatcatttcagcataacagctttcagtgcctaatccatccagtggggctgcatttggacattgaattgtttgttgactaatatttgccaacactaactgtgcaccaggttttgttctagatgcttggaatatgccaattaacaacgtaaatagatttcttacactctgaaagcttatattctagtgagtagaaacagactctgaagacataaagtggtaaatatatcacaggccagagagcaaaaaaaggtaaaaggaaaaataaaggaagacaaaggaaaacacagaatgatggatgctgtactcctatagatatttcactcaaaagcttttcttgaaataatgaaatcagaacaaagaatggacagagttggggagtgaataatgtggttcttatgcaggaaaagtgttccagcacagaatacagccagtgcaaatgccctgggatagcaatgcactaaacatgtttaaagaactgcaatgagacagtgtgaccaaaagagaacgtgagtggagaaaatggcagagacaaattaggagaagcagtgagaagccagatcgcgtggttctatgttatcacatggtaaacctttaaaaattattatctgagcgagacaggaagcctttctagtgctttagaaaaaagaaataatatgctttaaattaggttttacaaagatcacattttggtgaatagactaagatgtcacagatggaagtcaagggaagtggcaagagcacatggaagaggatgcaagaagaatcatgatgagggatgggatgaaggcagcaaggggtaaccatcttgaccttctgttttttctctcccctgcaggaagccacaagcagcccagccctccttaatcaacttcaaggagcaccttcattagtacagcttgcatatttaacattttgtatttcaataaaagtgaagacaa

SEQ ID NO: 458186 - DNA, 1194 bp, Homo sapiens
tactcgtggcattgcatgcagagtgcttggggataatcggtgagagtaatgtagttgaactggaaggaagaggaaaaaaagaaatattacgatgctaaaactgaagacaaagttcgggtcatggcagactctatgcaagagaagcaacgtatggcaggacaaatgcttcttcaaaccttttttaacatagaccaaatatcccccaataaaaaagctcatccgaatatggaggctggaccacctgagtcaggagaatctacagatgccctcaagctttgtcctcatgaagaattcctgagactatgtaaagaaagagctgaagagatctatccaataaaggagagaaacaaccgcacacgcctggctctcatcatatgcaatacagagtttgaccatctgcctccgaggaatggagctgactttgacatcacagggatgaaggagctacttgagggtctggactatagtgtagatgtagaagagaatctgacagccagggatatggagtcagcgctgagggcatttgctaccagaccagagcacaagtcctctgacagcacattcttggtactcatgtctcatggcatcctggagggaatctgcggaactgtgcatgatgagaaaaaaccagatgtgctgctttatgacaccatcttccagatattcaacaaccgcaactgcctcagtctgaaggacaaacccaaggtcatcattgtccaggcctgcagaggtgcaaaccgtggggaactgtgggtcagagactctccagcatccttggaagtggcctcttcacagtcatctgagaacctggaggaagatgctgtttacaagacccacgtggagaaggacttcattgctttctgctcttcaacgccacacaacgtgtcctggagagacagcacaatgggctctatcttcatcacacaactcatcacatgcttccagaaatattcttggtgctgccacctagaggaagtatttcggaaggtacagcaatcatttgaaactccaagggccaaagctcaaatgcccaccatagaacgactgtccatgacaagatatttctacctctttcctggcaattgaaaatggaagccacaagcagcccagccctccttaatcaacttcaaggagcaccttcattagtacagcttgcatatttaacattttgtatttcaataaaagtgaagacaa

SEQ ID NO: 458187 - DNA, 1617 bp, Homo sapiens
ggagggatggatcccggtcccacctaaagaagcagtctggccatgatctgccacagcggctgtgctgcactgtgaagactgctgcccagtccaatctgcccagcctccctagcactgtcagaaactaaattccagtaattggatgccaatttgctgatgacaaggcacttcctgataatgagtctggaattctgagcagcagtttcacaatctgtaattacacgtttccgccctttgcaataaggaaatacatagtttactttcatttttgactctgaggctctttccaacgctgtaaaaaaggacagaggctgttccctatggcagaaggcaaccacagaaaaaagccacttaaggtgttggaatccctgggcaaagatttcctcactggtgttttggataacttggtggaacaaaatgtactgaactggaaggaagaggaaaaaaagaaatattacgatgctaaaactgaagacaaagttcgggtcatggcagactctatgcaagagaagcaacgtatggcaggacaaatgcttcttcaaaccttttttaacatagaccaaatatcccccaataaaaaagctcatccgaatatggaggctggaccacctgagtcaggagaatctacagatgccctcaagctttgtcctcatgaagaattcctgagactatgtaaagaaagagctgaagagatctatccaataaaggagagaaacaaccgcacacgcctggctctcatcatatgcaatacagagtttgaccatctgcctccgaggaatggagctgactttgacatcacagggatgaaggagctacttgagggtctggactatagtgtagatgtagaagagaatctgacagccagggatatggagtcagcgctgagggcatttgctaccagaccagagcacaagtcctctgacagcacattcttggtactcatgtctcatggcatcctggagggaatctgcggaactgtgcatgatgagaaaaaaccagatgtgctgctttatgacaccatcttccagatattcaacaaccgcaactgcctcagtctgaaggacaaacccaaggtcatcattgtccaggcctgcagaggtgcaaaccgtggggaactgtgggtcagagactctccagcatccttggaagtggcctcttcacagtcatctgagaacctggaggaagatgctgtttacaagacccacgtggagaaggacttcattgctttctgctcttcaacgccacacaacgtgtcctggagagacagcacaatgggctctatcttcatcacacaactcatcacatgcttccagaaatattcttggtgctgccacctagaggaagtatttcggaaggtacagcaatcatttgaaactccaagggccaaagctcaaatgcccaccatagaacgactgtccatgacaagatatttctacctctttcctggcaattgaaaatggaagccacaagcagcccagccctccttaatcaacttcaaggagcaccttcattagtacagcttgcatatttaacattttgtatttcaataaaagtgaagacaatggacaaccacaacaacgacgacaaaaccctttcggggcgcactgggctctggaa

SEQ ID NO: 458188 - DNA, 1514 bp, Homo sapiens
ggagggatggatcccggtcccacctaaagaagcagtctggccatgatctgccacagcggctgtgctgcactgtgaagactgctgcccagtccaatctgcccagcctccctagcactgtcagaaactaaattccagtaattggatgccaatttgctgatgacaaggcacttcctgataatgagtctggaattctgagcagcagtttcacaatctgtaattacacgtttccgccctttgcaataaggaaatacatagtttactttcatttttgactctgaggctctttccaacgctgtaaaaaaggacagaggctgttccctatggcagaaggcaaccacagaaaaaagccacttaaggtgttggaatccctgggcaaagatttcctcactggtgttttggataacttggtggaacaaaatgtactgaactggaaggaagaggaaaaaaagaaatattacgatgctaaaactgaagacaaagttcgggtcatggcagactctatgcaagagaagcaacgtatggcaggacaaatgcttcttcaaaccttttttaacatagaccaaatatcccccaataaaaaagatgccctcaagctttgtcctcatgaagaattcctgagactatgtaaagaaagagctgaagagatctatccaataaaggagagaaacaaccgcacacgcctggctctcatcatatgcaatacagagtttgaccatctgcctccgaggaatggagctgactttgacatcacagggatgaaggagctacttgagggtctggactatagtgtagatgtagaagagaatctgacagccagggatatggagtcagcgctgagggcatttgctaccagaccagagcacaagtcctctgacagcacattcttggtactcatgtctcatggcatcctggagggaatctgcggaactgtgcatgatgagaaaaaaccagatgtgctgctttatgacaccatcttccagatattcaacaaccgcaactgcctcagtctgaaggacaaacccaaggtcatcattgtccaggcctgcagaggtgcaaaccgtggggaactgtgggtcagagactctccagcatccttggaagtggcctcttcacagtcatctgagaacctggaggaagatgctgtttacaagacccacgtggagaaggacttcattgctttctgctcttcaacgccacacaacgtgtcctggagagacagcacaatgggctctatcttcatcacacaactcatcacatgcttccagaaatattcttggtgctgccacctagaggaagtatttcggaaggtacagcaatcatttgaaactccaagggccaaagctcaaatgcccaccatagaacgactgtccatgacaagatatttctacctctttcctggcaattgaaaatggaagccacaagcagcccagccctccttaatcaacttcaaggagcaccttcattagtacagcttgcatatttaacattttgtatttcaataaaagtgaagacaa

SEQ ID NO: 458189 - DNA, 2582 bp, Homo sapiens
ggagggatggatcccggtcccacctaaagaagcagtctggccatgatctgccacagcggctgtgctgcactgtgaagactgctgcccagtccaatctgcccagcctccctagcactgtcagaaactaaattccagtaattggatgccaatttgctgatgacaaggcacttcctgataatgagtctggaattctgagcagcagtttcacaatctgtaattacacgtttccgccctttgcaataaggaaatacatagtttactttcatttttgactctgaggctctttccaacgctgtaaaaaaggacagaggctgttccctatggcagaaggcaaccacagaaaaaagccacttaaggtgttggaatccctgggcaaagatttcctcactggtgttttggataacttggtggaacaaaatgtactgaactggaaggaagaggaaaaaaagaaatattacgatgctaaaactgaagacaaagttcgggtcatggcagactctatgcaagagaagcaacgtatggcaggacaaatgcttcttcaaaccttttttaacatagaccaaatatcccccaataaaaaagctcatccgaatatggaggctggaccacctgagtcaggagaatctacagatgccctcaagctttgtcctcatgaagaattcctgagactatgtaaagaaagagctgaagagatctatccaataaaggagagaaacaaccgcacacgcctggctctcatcatatgcaatacagagtttgaccatctgcctccgaggaatggagctgactttgacatcacagggatgaaggagctacttgagggtctggactatagtgtagatgtagaagagaatctgacagccagggatatggagtcagcgctgagggcatttgctaccagaccagagcacaagtcctctgacagcacattcttggtactcatgtctcatggcatcctggagggaatctgcggaactgtgcatgatgagaaaaaaccagatgtgctgctttatgacaccatcttccagatattcaacaaccgcaactgcctcagtctgaaggacaaacccaaggtcatcattgtccaggcctgcagaggtgcaaaccgtggggaactgtgggtcagagactctccagcatccttggaagtggcctcttcacagtcatctgagaacctggaggaagatgctgtttacaagacccacgtggagaaggacttcattgctttctgctcttcaacgccacacaacgtgtcctggagagacagcacaatgggctctatcttcatcacacaactcatcacatgcttccagaaatattcttggtgctgccacctagaggaagtatttcggaaggtaagtgtctcttttctagttactcatttatttcttcaggaagaatttgtcatgattcactttttacttcacaatgacaatttttgtcagggaagtgaaagtagagaggtacccagtttctgtcattcagttgtttaaaatatggctaaggaaaagacaattccaatatatcccagcagaagatcaaagtaaaataaaataatatcaaccataagctttatgttatggagcgtaagttcttaagttttagagaaggaaaaatattttgaaataatttttatttcttaatttattaaatgaataaaatctgggtggtctgctaggtcatggatttcctcctggtgacagaggggtaaatgaggcctacatgacgtaatcctatctaggactcacattttcgtgggagatatggatactgaaaatgtgggttaacaaacaaatatgtgcttacagattgtgataggatccataaagacatgtgagagggaacaaaaaagaagtcattctttcaataaaaaagtgcagaaggaaaggtttgctacttcttgcccaacttgggacattccttattcccactacttcctatgttatttttctccatagctcgtacatctacccactcagcaaatattaatagtttatttatgtgtctggttttttacttgtatttactcactaacatgcaaacttcgtgatggcagggatttgctcagcaattcaacaaacctggcacgtagcagatattcaattaataattattgaataaatacatgcataaatacacagataaatgcaccctcttgtttaaagagaaaatgggattggtattaacacagaatagtataattattaataaagtaaaaattgtagagaacagtaaaactcctgcgggaaaagaaagatacacctctggcgtttatagaagaaagccatccagaaccagcacagtcactcattcctgtaatcccagcactctgggagtccgaaggagggtggagtggcttgaacccaggaatttgaggccaacctgggcaacatggcaaaacccatctctacaaaaaatacaaaaattagccgggcatattgactggaacctgtaatccgagctacctgagagctgagatgggagaatcgcttgagctcaggaagcggaggttgcaatgagctgagatttcaccactaccctctagcctggatgacagagtaagaccctgtcttaaaaaaaga

SEQ ID NO: 458190 - DNA, 1007 bp, Homo sapiens
ggagggatggatcccggtcccacctaaagaagcagtctggccatgatctgccacagcggctgtgctgcactgtgaagactgctgcccagtccaatctgcccagcctccctagcactgtcagaaactaaattccagtaattggatgccaatttgctgatgacaaggcacttcctgataatgagtctggaattctgagcagcagtttcacaatctgtaattacacgtttccgccctttgcaataaggaaatacatagtttactttcatttttgactctgaggctctttccaacgctgtaaaaaaggacagaggctgttccctatggcagaaggcaaccacagaaaaaagccacttaaggtgttggaatccctgggcaaagatttcctcactggtgttttggataacttggtggaacaaaatgtactgaactggaaggaagaggaaaaaaagaaatattacgatgctaaaactgaagacaaagttcgggtcatggcagactctatgcaagagaagcaacgtatggcaggacaaatgcttcttcaaaccttttttaacatagaccaaatatcccccaataaaaaagctcatccgaatatggaggctggaccacctgagtcaggagaatctacagatgccctcaagctttgtcctcatgaagaattcctgagactatgtaaagaaagagctgaagaggtgctatgctatctatatgaaatagaaaaaaaagaagagatatcattgctttccttcagtgcaccatttcttacagcactaaatgattgggggtggggatgacagtaaccattttcaataatgcttttactaagggaaagattatgtgacttcacaatgataccaatcctttctcaatccatgatgcagatcattttatcatgagttgaaagaaaattggtatttctattgctcctgtatttattcttgtaattatttggattttatggcaattgtagcattagccatggaataaacatatttggaggataaaaa

SEQ ID NO: 458191 - DNA, 6869 bp, Homo sapiens
cgcgcacagctgggacgtgggccgcggccgggcgggcgcagtcgggagccggccgtggtggctccgtgcgtccgagcgtccgtccgcgccgtcggccatggccaagcgctccaggggccccgggcgccgctgcctgttggcgctcgtgctgttctgcgcctgggggacgctggccgtggtggcccagaagccgggcgcagggtgtccgagccgctgcctgtgcttccgcaccaccgtgcgctgcatgcatctgctgctggaggccgtgcccgccgtggcgccgcagacctccatcctagatcttcgctttaacagaatcagagagatccaacctggggcattcaggcggctgaggaacttgaacacattgcttctcaataataatcagatcaagaggatacctagtggagcatttgaagacttggaaaatttaaaatatctctatctgtacaagaatgagatccagtcaattgacaggcaagcatttaagggacttgcctctctagagcaactatacctgcactttaatcagatagaaactttggacccagattcgttccagcatctcccgaagctcgagaggctatttttgcataacaaccggattacacatttagttccagggacatttaatcacttggaatctatgaagagattgcgactggactcaaacacacttcactgcgactgtgaaatcctgtggttggcggatttgctgaaaacctacgcggagtcggggaacgcgcaggcagcggccatctgtgaatatcccagacgcatccagggacgctcagtggcaaccatcaccccggaagagctgaactgtgaaaggccccggatcacctccgagccccaggacgcagatgtgacctcggggaacaccgtgtacttcacctgcagagccgaaggcaaccccaagcctgagatcatctggctgcgaaacaataatgagctgagcatgaagacagattcccgcctaaacttgctggacgatgggaccctgatgatccagaacacacaggagacagaccagggtatctaccagtgcatggcaaagaacgtggccggagaggtgaagacgcaagaggtgaccctcaggtacttcgggtctccagctcgacccacttttgtaatccagccacagaatacagaggtgctggttggggagagcgtcacgctggagtgcagcgccacaggccaccccccgccgcggatctcctggacgagaggtgaccgcacacccttgccagttgacccgcgggtgaacatcacgccttctggcgggctttacatacagaacgtcgtacagggggacagcggagagtatgcgtgctctgcgaccaacaacattgacagcgtccatgccaccgctttcatcatcgtccaggctcttcctcagttcactgtgacgcctcaggacagagtcgttattgagggccagaccgtggatttccagtgtgaagccaagggcaacccgccgcccgtcatcgcctggaccaagggagggagccagctctccgtggaccggcggcacctggtcctgtcatcgggaacacttagaatctctggtgttgccctccacgaccagggccagtacgaatgccaggctgtcaacatcatcggctcccagaaggtcgtggcccacctgactgtgcagcccagagtcaccccagtgtttgccagcattcccagcgacacaacagtggaggtgggcgccaatgtgcagctcccgtgcagctcccagggcgagcccgagccagccatcacctggaacaaggatggggttcaggtgacagaaagtggaaaatttcacatcagccctgaaggattcttgaccatcaatgacgttggccctgcagacgcaggtcgctatgagtgtgtggcccggaacaccattgggtcggcctcggtgagcatggtgctcagtgtgaacgttcctgacgtcagtcgaaatggagatccgtttgtagctacctccatcgtggaagcgattgcgactgttgacagagctataaactcaacccgaacacatttgtttgacagccgtcctcgttctccaaatgatttgctggccttgttccggtatccgagggatccttacacagttgaacaggcacgggcgggagaaatctttgaacggacattgcagctcattcaggagcatgtacagcatggcttgatggtcgacctcaacggaacaagttaccactacaacgacctggtgtctccacagtacctgaacctcatcgcaaacctgtcgggctgtaccgcccaccggcgcgtgaacaactgctcggacatgtgcttccaccagaagtaccggacgcacgacggcacctgtaacaacctgcagcaccccatgtggggcgcctcgctgaccgccttcgagcgcctgctgaaatccgtgtacgagaatggcttcaacacccctcggggcatcaacccccaccgactgtacaacgggcacgcccttcccatgccgcgcctggtgtccaccaccctgatcgggacggagaccgtcacacccgacgagcagttcacccacatgctgatgcagtggggccagttcctggaccacgacctcgactccacggtggtggccctgagccaggcacgcttctccgacggacagcactgcagcaacgtgtgcagcaacgaccccccctgcttctctgtcatgatcccccccaatgactcccgggccaggagcggggcccgctgcatgttcttcgtgcgctccagccctgtgtgcggcagcggcatgacttcgctgctcatgaactccgtgtacccgcgggagcagatcaaccagctcacctcctacatcgacgcatccaacgtgtacgggagcacggagcatgaggcccgcagcatccgcgacctggccagccaccgcggcctgctgcggcagggcatcgtgcagcggtccgggaagccgctgctccccttcgccaccgggccgcccacggagtgcatgcgggacgagaacgagagccccatcccctgcttcctggccggggaccaccgcgccaacgagcagctgggcctgaccagcatgcacacgctgtggttccgcgagcacaaccgcattgccacggagctgctcaagctgaacccgcactgggacggcgacaccatctactatgagaccaggaagatcgtgggtgcggagatccagcacatcacctaccagcactggctcccgaagatcctgggggaggtgggcatgaggacgctgggagagtaccacggctacgaccccggcatcaatgctggcatcttcaacgccttcgccaccgcggccttcaggtttggccacacgcttgtcaacccactgctttaccggctggacgagaacttccagcccattgcacaagatcacctcccccttcacaaagctttcttctctcccttccggattgtgaatgagggcggcatcgatccgcttctcagggggctgttcggggtggcggggaaaatgcgtgtgccctcgcagctgctgaacacggagctcacggagcggctgttctccatggcacacacggtggctctggacctggcggccatcaacatccagcggggccgggaccacgggatcccaccctaccacgactacagggtctactgcaatctatcggcggcacacacgttcgaggacctgaaaaatgagattaaaaaccctgagatccgggagaaactgaaaaggttgtatggctcgacactcaacatcgacctgtttccggcgctcgtggtggaggacctggtgcctggcagccggctgggccccaccctgatgtgtcttctcagcacacagttcaagcgcctgcgagatggggacaggttgtggtatgagaaccctggggtgttctccccggcccagctgactcagatcaagcagacgtcgctggccaggatcctatgcgacaacgcggacaacatcacccgggtgcagagcgacgtgttcagggtggcggagttccctcacggctacggcagctgtgacgagatccccagggtggacctccgggtgtggcaggactgctgtgaagactgtaggaccagggggcagttcaatgccttttcctatcatttccgaggcagacggtctcttgagttcagctaccaggaggacaagccgaccaagaaaacaagaccacggaaaatacccagtgttgggagacagggggaacatctcagcaacagcacctcagccttcagcacacgctcagatgcatctgggacaaatgacttcagagagtttgttctggaaatgcagaagaccatcacagacctcagaacacagataaagaaacttgaatcacggctcagtaccacagagtgcgtggatgccgggggcgaatctcacgccaacaacaccaagtggaaaaaagatgcatgcaccatttgtgaatgcaaagacgggcaggtcacctgcttcgtggaagcttgcccccctgccacctgtgctgtccccgtgaacatcccaggggcctgctgtccagtctgcttacagaagagggcggaggaaaagccctaggctcctgggaggctcctcagagtttgtctgctgtgccatcgtgagatcgggtggccgatggcagggagctgcggactgcagaccaggaaacacccagaactcgtgacatttcatgacaacgtccagctggtgctgttacagaaggcagtgcaggaggcttccaaccagagcatctgcggagaaggaggcacagcaggtgcctgaagggaagcaggcaggagtcctagcttcacgttagacttctcaggtttttatttaattcttttaaaatgaaaaattggtgctactattaaattgcacagttgaatcatttaggcgcctaaattgattttgcctcccaacaccatttctttttaaataaagcaggatacctctatatgtcagccttgccttgttcagatgccaggagccggcagacctgtcacccgcaggtggggtgagtctcggagctgccagaggggctcaccgaaatcggggttccatcacaagctatgtttaaaaagaaaattggtgtttggcaaacggaacagaacctttgatgagagcgttcacagggacactgtctgggggtgcagtgcaagcccccggcctcttccctgggaacctctgaactcctccttcctctgggctctctgtaacatttcaccacacgtcagcatctaatcccaagacaaacattcccgctgctcgaagcagctgtatagcctgtgactctccgtgtgtcagctccttccacacctgattagaacattcataagccacatttagaaacagatttgctttcagctgtcacttgcacacatactgcctagttgtgaaccaaatgtgaaaaaacctccttcatcccattgtgtatctgatacctgccgagggccaagggtgtgtgttgacaacgccgctcccagccggccctggttgcgtccacgtcctgaacaagagccgcttccggatggctcttcccaagggaggaggagctcaagtgtcgggaactgtctaacttcaggttgtgtgagtgcgttaaaaaaaaaaaaaaaaaaaagaatccctatacctcatttgtatttttaaaatgcgtgatgttttatgaaattgtgtccattttttaggtattagatatggcagaaaaaccatttccactatgcaaagttcttttagacgtcagtgaaaatcaactctcatacctcatggtctctctttaattgaccaaaaccttccatttttctctaaatacaaagcgatctgtgttctgagcaacctttccccgaacacacagcttcagtgcagcacgctgacctgagtatccaccatgtgccaggcacagtgctgggcacacgaggcaccaaggtccgggccacctgcccgcagcaaggcccagctgaggtggtggagggagcccctgaggtcaggggccgtttcggttcagggtggcaggtgtccagcactggggtatggcgtcgaggcttccatggggtgggggaggccagcttccttctgacaggatgggcgcatacagtgcctggtgtgatttgtgcacaacccgtgttccaggtgcacatcctcccaaggagacacccagacccttccagcacgggccggccaagttgctgcggcggaggcagcatttcagctgtgaggaaggtcattggattcatgtgttttatctgtaaaaatggttgtcttaacttcttaacctcatattggtaagtgattgataaaaattggttggtgtttcatgacatgtggacttcttttgaaatagcaagtcaaatgtagtgaccaaattgtggaagagatttctgtcaaataggaaatgtgtaagttcgtctaaaagctgatggttatgtaagttgctcaggcactcagatgacagcagattctgggttctgggagtgttctgtgcctcttacatgccctggaggcctcatggtctcagtgctgaggcggcacacctgtagcacacctgcgtaatgtgcggtctgggccagtcacaaggaattgtgttgtctaagccaaagggggaagctgactgtgatttaccaaaaaaaattctgtaattcaaaccaaaatgtctgcggaatcaccagtttgatactctctgtaatcagaacagtgggcagtgcctgggtgaacgtgtctagcagccactgtgcgggatcgctgtaacaggagtggaatgtacatatttatttacttttctaactgctccaacagccaaatgccttttttatgaccattgtattcagttcattaccaaagaaatgtttgcactttgtaatgatgcctttcagttcaaataaatgggtcacattttcaaatggaaaaagtctttatt

SEQ ID NO: 458192 - DNA, 420 bp, Homo sapiens
  misc_feature (381)..(381): n is a, c, g, or t
gagagagagagagagagagagagagagagagagagagagagagagagagagagagagagagagccgacagctgaaatggagtgctcaggaggaagagacaaggagaaaggaaatcacagtgagggggcaagtcccagtgaggagggggcaagagggggcaggttcctgtcaggaagggactaggtctcagtcaggaggggcaggtttcggtcaggagggggcacgtccttgtcaggagagggcgggtcccaatctggagggtgcaagtgcctgtcaggtggggacaggttccagacaacagggggcaggttcctgtcaggaaaggactaggtctcagtcaggagggggcccgtccctgtcaggtgggggcaggggtcgacncggccgcgaatttagtagtagtagtcgaccaggggccgc

SEQ ID NO: 458193 - DNA, 6176 bp, Homo sapiens
acctctgctgggacggcgtcctcaggagcctggagcgccatgcagctgctgacacagtaatgagctgagcatgaagacagattcccgcctaaacttgctggacgatgggaccctgatgatccagaacacacaggagacagaccagggtatctaccagtgcatggcaaagaacgtggccggagaggtgaagacgcaagaggtgaccctcaggtacttcgggtctccaggaacagcagccctatttagtatactagtctgagcatgtgggtgtagctccctcagatacacatgaagagtctcccgccatccggtgcacagggagtcactgcagcatgggggaaccagccctgagaagcccagaagcctaggctgacacactgcagcctgcagtccacacctgcctactgcctgtttttcctaagctcgacccacttttgtaatccagccacagaatacagaggtgctggttggggagagcgtcacgctggagtgcagcgccacaggccaccccccgccgcggatctcctggacgagaggtgaccgcacacccttgccagttgacccgcgggtgaacatcacgccttctggcgggctttacatacagaacgtcgtacagggggacagcggagagtatgcgtgctctgcgaccaacaacattgacagcgtccatgccaccgctttcatcatcgtccaggctcttcctcagttcactgtgacgcctcaggacagagtcgttattgagggccagaccgtggatttccagtgtgaagccaagggcaacccgccgcccgtcatcgcctggaccaagggagggagccagctctccgtggaccggcggcacctggtcctgtcatcgggaacacttagaatctctggtgttgccctccacgaccagggccagtacgaatgccaggctgtcaacatcatcggctcccagaaggtcgtggcccacctgactgtgcagcccagagtcaccccagtgtttgccagcattcccagcgacacaacagtggaggtgggcgccaatgtgcagctcccgtgcagctcccagggcgagcccgagccagccatcacctggaacaaggatggggttcaggtgacagaaagtggaaaatttcacatcagccctgaaggattcttgaccatcaatgacgttggccctgcagacgcaggtcgctatgagtgtgtggcccggaacaccattgggtcggcctcggtgagcatggtgctcagtgtgaacgttcctgacgtcagtcgaaatggagatccgtttgtagctacctccatcgtggaagcgattgcgactgttgacagagctataaactcaacccgaacacatttgtttgacagccgtcctcgttctccaaatgatttgctggccttgttccggtatccgagggatccttacacagttgaacaggcacgggcgggagaaatctttgaacggacattgcagctcattcaggagcatgtacagcatggcttgatggtcgacctcaacggaacaagttaccactacaacgacctggtgtctccacagtacctgaacctcatcgcaaacctgtcgggctgtaccgcccaccggcgcgtgaacaactgctcggacatgtgcttccaccagaagtaccggacgcacgacggcacctgtaacaacctgcagcaccccatgtggggcgcctcgctgaccgccttcgagcgcctgctgaaatccgtgtacgagaatggcttcaacacccctcggggcatcaacccccaccgactgtacaacgggcacgcccttcccatgccgcgcctggtgtccaccaccctgatcgggacggagaccgtcacacccgacgagcagttcacccacatgctgatgcagtggggccagttcctggaccacgacctcgactccacggtggtggccctgagccaggcacgcttctccgacggacagcactgcagcaacgtgtgcagcaacgaccccccctgcttctctgtcatgatcccccccaatgactcccgggccaggagcggggcccgctgcatgttcttcgtgcgctccagccctgtgtgcggcagcggcatgacttcgctgctcatgaactccgtgtacccgcgggagcagatcaaccagctcacctcctacatcgacgcatccaacgtgtacgggagcacggagcatgaggcccgcagcatccgcgacctggccagccaccgcggcctgctgcggcagggcatcgtgcagcggtccgggaagccgctgctccccttcgccaccgggccgcccacggagtgcatgcgggacgagaacgagagccccatcccctgcttcctggccggggaccaccgcgccaacgagcagctgggcctgaccagcatgcacacgctgtggttccgcgagcacaaccgcattgccacggagctgctcaagctgaacccgcactgggacggcgacaccatctactatgagaccaggaagatcgtgggtgcggagatccagcacatcacctaccagcactggctcccgaagatcctgggggaggtgggcatgaggacgctgggagagtaccacggctacgaccccggcatcaatgctggcatcttcaacgccttcgccaccgcggccttcaggtttggccacacgcttgtcaacccactgctttaccggctggacgagaacttccagcccattgcacaagatcacctcccccttcacaaagctttcttctctcccttccggattgtgaatgagggcggcatcgatccgcttctcagggggctgttcggggtggcggggaaaatgcgtgtgccctcgcagctgctgaacacggagctcacggagcggctgttctccatggcacacacggtggctctggacctggcggccatcaacatccagcggggccgggaccacgggatcccaccctaccacgactacagggtctactgcaatctatcggcggcacacacgttcgaggacctgaaaaatgagattaaaaaccctgagatccgggagaaactgaaaaggttgtatggctcgacactcaacatcgacctgtttccggcgctcgtggtggaggacctggtgcctggcagccggctgggccccaccctgatgtgtcttctcagcacacagttcaagcgcctgcgagatggggacaggttgtggtatgagaaccctggggtgttctccccggcccagctgactcagatcaagcagacgtcgctggccaggatcctatgcgacaacgcggacaacatcacccgggtgcagagcgacgtgttcagggtggcggagttccctcacggctacggcagctgtgacgagatccccagggtggacctccgggtgtggcaggactgctgtgaagactgtaggaccagggggcagttcaatgccttttcctatcatttccgaggcagacggtctcttgagttcagctaccaggaggacaagccgaccaagaaaacaagaccacggaaaatacccagtgttgggagacagggggaacatctcagcaacagcacctcagccttcagcacacgctcagatgcatctgggacaaatgacttcagagagtttgttctggaaatgcagaagaccatcacagacctcagaacacagataaagaaacttgaatcacggctcagtaccacagagtgcgtggatgccgggggcgaatctcacgccaacaacaccaagtggaaaaaagatgcatgcaccatttgtgaatgcaaagacgggcaggtcacctgcttcgtggaagcttgcccccctgccacctgtgctgtccccgtgaacatcccaggggcctgctgtccagtctgcttacagaagagggcggaggaaaagccctaggctcctgggaggctcctcagagtttgtctgctgtgccatcgtgagatcgggtggccgatggcagggagctgcggactgcagaccaggaaacacccagaactcgtgacatttcatgacaacgtccagctggtgctgttacagaaggcagtgcaggaggcttccaaccagagcatctgcggagaaggaggcacagcaggtgcctgaagggaagcaggcaggagtcctagcttcacgttagacttctcaggtttttatttaattcttttaaaatgaaaaattggtgctactattaaattgcacagttgaatcatttaggcgcctaaattgattttgcctcccaacaccatttctttttaaataaagcaggatacctctatatgtcagccttgccttgttcagatgccaggagccggcagacctgtcacccgcaggtggggtgagtctcggagctgccagaggggctcaccgaaatcggggttccatcacaagctatgtttaaaaagaaaattggtgtttggcaaacggaacagaacctttgatgagagcgttcacagggacactgtctgggggtgcagtgcaagcccccggcctcttccctgggaacctctgaactcctccttcctctgggctctctgtaacatttcaccacacgtcagcatctaatcccaagacaaacattcccgctgctcgaagcagctgtatagcctgtgactctccgtgtgtcagctccttccacacctgattagaacattcataagccacatttagaaacagatttgctttcagctgtcacttgcacacatactgcctagttgtgaaccaaatgtgaaaaaacctccttcatcccattgtgtatctgatacctgccgagggccaagggtgtgtgttgacaacgccgctcccagccggccctggttgcgtccacgtcctgaacaagagccgcttccggatggctcttcccaagggaggaggagctcaagtgtcgggaactgtctaacttcaggttgtgtgagtgcgttaaaaaaaaaaaaaaaaaaaagaatccctatacctcatttgtatttttaaaatgcgtgatgttttatgaaattgtgtccattttttaggtattagatatggcagaaaaaccatttccactatgcaaagttcttttagacgtcagtgaaaatcaactctcatacctcatggtctctctttaattgaccaaaaccttccatttttctctaaatacaaagcgatctgtgttctgagcaacctttccccgaacacacagcttcagtgcagcacgctgacctgagtatccaccatgtgccaggcacagtgctgggcacacgaggcaccaaggtccgggccacctgcccgcagcaaggcccagctgaggtggtggagggagcccctgaggtcaggggccgtttcggttcagggtggcaggtgtccagcactggggtatggcgtcgaggcttccatggggtgggggaggccagcttccttctgacaggatgggcgcatacagtgcctggtgtgatttgtgcacaacccgtgttccaggtgcacatcctcccaaggagacacccagacccttccagcacgggccggccaagttgctgcggcggaggcagcatttcagctgtgaggaaggtcattggattcatgtgttttatctgtaaaaatggttgtcttaacttcttaacctcatattggtaagtgattgataaaaattggttggtgtttcatgacatgtggacttcttttgaaatagcaagtcaaatgtagtgaccaaattgtggaagagatttctgtcaaataggaaatgtgtaagttcgtctaaaagctgatggttatgtaagttgctcaggcactcagatgacagcagattctgggttctgggagtgttctgtgcctcttacatgccctggaggcctcatggtctcagtgctgaggcggcacacctgtagcacacctgcgtaatgtgcggtctgggccagtcacaaggaattgtgttgtctaagccaaagggggaagctgactgtgatttaccaaaaaaaattctgtaattcaaaccaaaatgtctgcggaatcaccagtttgatactctctgtaatcagaacagtgggcagtgcctgggtgaacgtgtctagcagccactgtgcgggatcgctgtaacaggagtggaatgtacatatttatttacttttctaactgctccaacagccaaatgccttttttatgaccattgtattcagttcattaccaaagaaatgtttgcactttgtaatgatgcctttcagttcaaataaatgggtcacattttcaaatggaaaaagtctttatt

SEQ ID NO: 458194 - DNA, 3099 bp, Homo sapiens
gagagagagagagagagagagagagagagagagagagagagagagagagagagagagagagagccgacaggttgtggtatgagaaccctggggtgttctccccggcccagctgactcagatcaagcagacgtcgctggccaggatcctatgcgacaacgcggacaacatcacccgggtgcagagcgacgtgttcagggtggcggagttccctcacggctacggcagctgtgacgagatccccagggtggacctccgggtgtggcaggactgctgtgaagactgtaggaccagggggcagttcaatgccttttcctatcatttccgaggcagacggtctcttgagttcagctaccaggaggacaagccgaccaagaaaacaagaccacggaaaatacccagtgttgggagacagggggaacatctcagcaacagcacctcagccttcagcacacgctcagatgcatctgggacaaatgacttcagagagtttgttctggaaatgcagaagaccatcacagacctcagaacacagataaagaaacttgaatcacggctcagtaccacagagtgcgtggatgccgggggcgaatctcacgccaacaacaccaagtggaaaaaagatgcatgcaccatttgtgaatgcaaagacgggcaggtcacctgcttcgtggaagcttgcccccctgccacctgtgctgtccccgtgaacatcccaggggcctgctgtccagtctgcttacagaagagggcggaggaaaagccctaggctcctgggaggctcctcagagtttgtctgctgtgccatcgtgagatcgggtggccgatggcagggagctgcggactgcagaccaggaaacacccagaactcgtgacatttcatgacaacgtccagctggtgctgttacagaaggcagtgcaggaggcttccaaccagagcatctgcggagaaggaggcacagcaggtgcctgaagggaagcaggcaggagtcctagcttcacgttagacttctcaggtttttatttaattcttttaaaatgaaaaattggtgctactattaaattgcacagttgaatcatttaggcgcctaaattgattttgcctcccaacaccatttctttttaaataaagcaggatacctctatatgtcagccttgccttgttcagatgccaggagccggcagacctgtcacccgcaggtggggtgagtctcggagctgccagaggggctcaccgaaatcggggttccatcacaagctatgtttaaaaagaaaattggtgtttggcaaacggaacagaacctttgatgagagcgttcacagggacactgtctgggggtgcagtgcaagcccccggcctcttccctgggaacctctgaactcctccttcctctgggctctctgtaacatttcaccacacgtcagcatctaatcccaagacaaacattcccgctgctcgaagcagctgtatagcctgtgactctccgtgtgtcagctccttccacacctgattagaacattcataagccacatttagaaacagatttgctttcagctgtcacttgcacacatactgcctagttgtgaaccaaatgtgaaaaaacctccttcatcccattgtgtatctgatacctgccgagggccaagggtgtgtgttgacaacgccgctcccagccggccctggttgcgtccacgtcctgaacaagagccgcttccggatggctcttcccaagggaggaggagctcaagtgtcgggaactgtctaacttcaggttgtgtgagtgcgttaaaaaaaaaaaaaaaaaaaagaatccctatacctcatttgtatttttaaaatgcgtgatgttttatgaaattgtgtccattttttaggtattagatatggcagaaaaaccatttccactatgcaaagttcttttagacgtcagtgaaaatcaactctcatacctcatggtctctctttaattgaccaaaaccttccatttttctctaaatacaaagcgatctgtgttctgagcaacctttccccgaacacacagcttcagtgcagcacgctgacctgagtatccaccatgtgccaggcacagtgctgggcacacgaggcaccaaggtccgggccacctgcccgcagcaaggcccagctgaggtggtggagggagcccctgaggtcaggggccgtttcggttcagggtggcaggtgtccagcactggggtatggcgtcgaggcttccatggggtgggggaggccagcttccttctgacaggatgggcgcatacagtgcctggtgtgatttgtgcacaacccgtgttccaggtgcacatcctcccaaggagacacccagacccttccagcacgggccggccaagttgctgcggcggaggcagcatttcagctgtgaggaaggtcattggattcatgtgttttatctgtaaaaatggttgtcttaacttcttaacctcatattggtaagtgattgataaaaattggttggtgtttcatgacatgtggacttcttttgaaatagcaagtcaaatgtagtgaccaaattgtggaagagatttctgtcaaataggaaatgtgtaagttcgtctaaaagctgatggttatgtaagttgctcaggcactcagatgacagcagattctgggttctgggagtgttctgtgcctcttacatgccctggaggcctcatggtctcagtgctgaggcggcacacctgtagcacacctgcgtaatgtgcggtctgggccagtcacaaggaattgtgttgtctaagccaaagggggaagctgactgtgatttaccaaaaaaaattctgtaattcaaaccaaaatgtctgcggaatcaccagtttgatactctctgtaatcagaacagtgggcagtgcctgggtgaacgtgtctagcagccactgtgcgggatcgctgtaacaggagtggaatgtacatatttatttacttttctaactgctccaacagccaaatgccttttttatgaccattgtattcagttcattaccaaagaaatgtttgcactttgtaatgatgcctttcagttcaaataaatgggtcacattttcaaatggaaaaagtctttatt

SEQ ID NO: 458195 - DNA, 6736 bp, Homo sapiens
cgcgcacagctgggacgtgggccgcggccgggcgggcgcagtcgggagccggccgtggtggctccgtgcgtccgagcgtccgtccgcgccgtcggccatggccaagcgctccaggggccccgggcgccgctgcctgttggcgctcgtgctgttctgcgcctgggggacgctggccgtggtggcccagaagccgggcgcagggtgtccgagccgctgcctgtgcttccgcaccaccgtgcgctgcatgcatctgctgctggaggccgtgcccgccgtggcgccgcagacctccatcctagatcttcgctttaacagaatcagagagatccaacctggggcattcaggcggctgaggaacttgaacacattgcttctcaataataatcagatcaagaggatacctagtggagcatttgaagacttggaaaatttaaaatatctctatctgtacaagaatgagatccagtcaattgacaggcaagcatttaagggacttgcctctctagagcaactatacctgcactttaatcagatagaaactttggacccagattcgttccagcatctcccgaagctcgagaggctatttttgcataacaaccggattacacatttagttccagggacatttaatcacttggaatctatgaagagattgcgactggactcaaacacacttcactgcgactgtgaaatcctgtggttggcggatttgctgaaaacctacgcggagtcggggaacgcgcaggcagcggccatctgtgaatatcccagacgcatccagggacgctcagtggcaaccatcaccccggaagagctgaactgtgaaaggccccggatcacctccgagccccaggacgcagatgtgacctcggggaacaccgtgtacttcacctgcagagccgaaggcaaccccaagcctgagatcatctggctgcgaaacaataatgagctgagcatgaagacagattcccgcctaaacttgctggacgatgggaccctgatgatccagaacacacaggagacagaccagggtatctaccagtgcatggcaaagaacgtggccggagaggtgaagacgcaagaggtgaccctcaggtacttcgggtctccagctcgacccacttttgtaatccagccacagaatacagaggtgctggttggggagagcgtcacgctggagtgcagcgccacaggccaccccccgccgcggatctcctggacgagaggtgaccgcacacccttgccagttgacccgcgggtgaacatcacgccttctggcgggctttacatacagaacgtcgtacagggggacagcggagagtatgcgtgctctgcgaccaacaacattgacagcgtccatgccaccgctttcatcatcgtccaggctcttcctcagttcactgtgacgcctcaggacagagtcgttattgagggccagaccgtggatttccagtgtgaagccaagggcaacccgccgcccgtcatcgcctggaccaagggagggagccagctctccgtggaccggcggcacctggtcctgtcatcgggaacacttagaatctctggtgttgccctccacgaccagggccagtacgaatgccaggctgtcaacatcatcggctcccagaaggtcgtggcccacctgactgtgcagcccagagtcaccccagtgtttgccagcattcccagcgacacaacagtggaggtgggcgccaatgtgcagctcccgtgcagctcccagggcgagcccgagccagccatcacctggaacaaggatggggttcaggtgacagaaagtggaaaatttcacatcagccctgaaggattcttgaccatcaatgacgttggccctgcagacgcaggtcgctatgagtgtgtggcccggaacaccattgggtcggcctcggtgagcatggtgctcagtgtgaacgttcctgacgtcagtcgaaatggagatccgtttgtagctacctccatcgtggaagcgattgcgactgttgacagagctataaactcaacccgaacacatttgtttgacagccgtcctcgttctccaaatgatttgctggccttgttccggtatccgagggatccttacacagttgaacaggcacgggcgggagaaatctttgaacggacattgcagctcattcaggagcatgtacagcatggcttgatggtcgacctcaacggaacaagttaccactacaacgacctggtgtctccacagtacctgaacctcatcgcaaacctgtcgggctgtaccgcccaccggcgcgtgaacaactgctcggacatgtgcttccaccagaagtaccggacgcacgacggcacctgtaacaacctgcagcaccccatgtggggcgcctcgctgaccgccttcgagcgcctgctgaaatccgtgtacgagaatggcttcaacacccctcggggcatcaacccccaccgactgtacaacgggcacgcccttcccatgccgcgcctggtgtccaccaccctgatcgggacggagaccgtcacacccgacgagcagttcacccacatgctgatgcagtggggccagttcctggaccacgacctcgactccacggtggtggccctgagccaggcacgcttctccgacggacagcactgcagcaacgtgtgcagcaacgaccccccctgcttctctgtcatgatcccccccaatgactcccgggccaggagcggggcccgctgcatgttcttcgtgcgctccagccctgtgtgcggcagcggcatgacttcgctgctcatgaactccgtgtacccgcgggagcagatcaaccagctcacctcctacatcgacgcatccaacgtgtacgggagcacggagcatgaggcccgcagcatccgcgacctggccagccaccgcggcctgctgcggcagggcatcgtgcagcggtccgggaagccgctgctccccttcgccaccgggccgcccacggagtgcatgcgggacgagaacgagagccccatcccctgcttcctggccggggaccaccgcgccaacgagcagctgggcctgaccagcatgcacacgctgtggttccgcgagcacaaccgcattgccacggagctgctcaagctgaacccgcactgggacggcgacaccatctactatgagaccaggaagatcgtgggtgcggagatccagcacatcacctaccagcactggctcccgaagatcctgggggaggtgggcatgaggacgctgggagagtaccacggctacgaccccggcatcaatgctggcatcttcaacgccttcgccaccgcggccttcaggtttggccacacgcttgtcaacccactgctttaccggctggacgagaacttccagcccattgcacaagatcacctcccccttcacaaagctttcttctctcccttccggattgtgaatgagggcggcatcgatccgcttctcagggggctgttcggggtggcggggaaaatgcgtgtgccctcgcagctgctgaacacggagctcacggagcggctgttctccatggcacacacggtggctctggacctggcggccatcaacatccagcggggccgggaccacgggatcccaccctaccacgactacagggtctactgcaatctatcggcggcacacacgttcgaggacctgaaaaatgagattaaaaaccctgagatccgggagaaactgaaaaggttgtatggctcgacactcaacatcgacctgtttccggcgctcgtggtggaggacctggtgcctggcagccggctgggccccaccctgatgtgtcttctcagcacacagttcaagcgcctgcgagatggggacaggttgtggtatgagaaccctggggtgttctccccggcccagctgactcagatcaagcagacgtcgctggccaggatcctatgcgacaacgcggacaacatcacccgggtgcagagcgacgtgttcagggtggcggagttccctcacggctacggcagctgtgacgagatccccagggtggacctccgggtgtggcaggactgctgtgaagactgtaggaccagggggcagttcaatgccttttcctatcatttccgaggcagacggtctcttgagttcagctaccaggaggacaagccgaccaagaaaacaagaccacggaaaatacccagataaagaaacttgaatcacggctcagtaccacagagtgcgtggatgccgggggcgaatctcacgccaacaacaccaagtggaaaaaagatgcatgcaccatttgtgaatgcaaagacgggcaggtcacctgcttcgtggaagcttgcccccctgccacctgtgctgtccccgtgaacatcccaggggcctgctgtccagtctgcttacagaagagggcggaggaaaagccctaggctcctgggaggctcctcagagtttgtctgctgtgccatcgtgagatcgggtggccgatggcagggagctgcggactgcagaccaggaaacacccagaactcgtgacatttcatgacaacgtccagctggtgctgttacagaaggcagtgcaggaggcttccaaccagagcatctgcggagaaggaggcacagcaggtgcctgaagggaagcaggcaggagtcctagcttcacgttagacttctcaggtttttatttaattcttttaaaatgaaaaattggtgctactattaaattgcacagttgaatcatttaggcgcctaaattgattttgcctcccaacaccatttctttttaaataaagcaggatacctctatatgtcagccttgccttgttcagatgccaggagccggcagacctgtcacccgcaggtggggtgagtctcggagctgccagaggggctcaccgaaatcggggttccatcacaagctatgtttaaaaagaaaattggtgtttggcaaacggaacagaacctttgatgagagcgttcacagggacactgtctgggggtgcagtgcaagcccccggcctcttccctgggaacctctgaactcctccttcctctgggctctctgtaacatttcaccacacgtcagcatctaatcccaagacaaacattcccgctgctcgaagcagctgtatagcctgtgactctccgtgtgtcagctccttccacacctgattagaacattcataagccacatttagaaacagatttgctttcagctgtcacttgcacacatactgcctagttgtgaaccaaatgtgaaaaaacctccttcatcccattgtgtatctgatacctgccgagggccaagggtgtgtgttgacaacgccgctcccagccggccctggttgcgtccacgtcctgaacaagagccgcttccggatggctcttcccaagggaggaggagctcaagtgtcgggaactgtctaacttcaggttgtgtgagtgcgttaaaaaaaaaaaaaaaaaaaagaatccctatacctcatttgtatttttaaaatgcgtgatgttttatgaaattgtgtccattttttaggtattagatatggcagaaaaaccatttccactatgcaaagttcttttagacgtcagtgaaaatcaactctcatacctcatggtctctctttaattgaccaaaaccttccatttttctctaaatacaaagcgatctgtgttctgagcaacctttccccgaacacacagcttcagtgcagcacgctgacctgagtatccaccatgtgccaggcacagtgctgggcacacgaggcaccaaggtccgggccacctgcccgcagcaaggcccagctgaggtggtggagggagcccctgaggtcaggggccgtttcggttcagggtggcaggtgtccagcactggggtatggcgtcgaggcttccatggggtgggggaggccagcttccttctgacaggatgggcgcatacagtgcctggtgtgatttgtgcacaacccgtgttccaggtgcacatcctcccaaggagacacccagacccttccagcacgggccggccaagttgctgcggcggaggcagcatttcagctgtgaggaaggtcattggattcatgtgttttatctgtaaaaatggttgtcttaacttcttaacctcatattggtaagtgattgataaaaattggttggtgtttcatgacatgtggacttcttttgaaatagcaagtcaaatgtagtgaccaaattgtggaagagatttctgtcaaataggaaatgtgtaagttcgtctaaaagctgatggttatgtaagttgctcaggcactcagatgacagcagattctgggttctgggagtgttctgtgcctcttacatgccctggaggcctcatggtctcagtgctgaggcggcacacctgtagcacacctgcgtaatgtgcggtctgggccagtcacaaggaattgtgttgtctaagccaaagggggaagctgactgtgatttaccaaaaaaaattctgtaattcaaaccaaaatgtctgcggaatcaccagtttgatactctctgtaatcagaacagtgggcagtgcctgggtgaacgtgtctagcagccactgtgcgggatcgctgtaacaggagtggaatgtacatatttatttacttttctaactgctccaacagccaaatgccttttttatgaccattgtattcagttcattaccaaagaaatgtttgcactttgtaatgatgcctttcagttcaaataaatgggtcacattttcaaatggaaaaagtctttatt

SEQ ID NO: 458196 - DNA, 6304 bp, Homo sapiens
cgcgcacagctgggacgtgggccgcggccgggcgggcgcagtcgggagccggccgtggtggctccgtgcgtccgagcgtccgtccgcgccgtcggccatggccaagcgctccaggggccccgggcgccgctgcctgttggcgctcgtgctgttctgcgcctgggggacgctggccgtggtggcccagaagccgggcgcagggtgtccgagccgctgcctgtgcttccgcaccaccgtgcgctgcatgcatctgctgctggaggccgtgcccgccgtggcgccgcagacctccatcctagatcttcgctttaacagaatcagagagatccaacctggggcattcaggcggctgaggaacttgaacacattgcttctcaataataatcagatcaagaggatacctagtggagcatttgaagacttggaaaatttaaaatatctctatctgtacaagaatgagatccagtcaattgacaggcaagcatttaagggacttgcctctctagagcaactatacctgcactttaatcagatagaaactttggacccagattcgttccagcatctcccgaagctcgagaggctatttttgcataacaaccggattacacatttagttccagggacatttaatcacttggaatctatgaagagattgcgactggactcaaacacacttcactgcgactgtgaaatcctgtggttggcggatttgctgaaaacctacgcggagtcggggaacgcgcaggcagcggccatctgtgaatatcccagacgcatccagggacgctcagtggcaaccatcaccccggaagagctgaactgtgaaaggccccggatcacctccgagccccaggacgcagatgtgacctcggggaacaccgtgtacttcacctgcagagccgaaggcaaccccaagcctgagatcatctggctgcgaaacaataatgagctgagcatgaagacagattcccgcctaaacttgctggacgatgggaccctgatgatccagaacacacaggagacagaccagggtatctaccagtgcatggcaaagaacgtggccggagaggtgaagacgcaagaggtgaccctcaggtacttcgggtctccagctcgacccacttttgtaatccagccacagaatacagaggtgctggttggggagagcgtcacgctggagtgcagcgccacaggccaccccccgccgcggatctcctggacgagaggtgaccgcacacccttgccagttgacccgcgggtgaacatcacgccttctggcgggctttacatacagaacgtcgtacagggggacagcggagagtatgcgtgctctgcgaccaacaacattgacagcgtccatgccaccgctttcatcatcgtccaggctcttcctcagttcactgtgacgcctcaggacagagtcgttattgagggccagaccgtggatttccagtgtgaagccaagggcaacccgccgcccgtcatcgcctggaccaagggagggagccagctctccgtggaccggcggcacctggtcctgtcatcgggaacacttagaatctctggtgttgccctccacgaccagggccagtacgaatgccaggctgtcaacatcatcggctcccagaaggtcgtggcccacctgactgtgcagcccagagtcaccccagtgtttgccagcattcccagcgacacaacagtggaggtgggcgccaatgtgcagctcccgtgcagctcccagggcgagcccgagccagccatcacctggaacaaggatggggttcaggtgacagaaagtggaaaatttcacatcagccctgaaggattcttgaccatcaatgacgttggccctgcagacgcaggtcgctatgagtgtgtggcccggaacaccattgggtcggcctcggtgagcatggtgctcagtgtgaacgttcctgacgtcagtcgaaatggagatccgtttgtagctacctccatcgtggaagcgattgcgactgttgacagagctataaactcaacccgaacacatttgtttgacagccgtcctcgttctccaaatgatttgctggccttgttccggtatccgagggatccttacacagttgaacaggcacgggcgggagaaatctttgaacggacattgcagctcattcaggagcatgtacagcatggcttgatggtcgacctcaacggaacaagttaccactacaacgacctggtgtctccacagtacctgaacctcatcgcaaacctgtcgggctgtaccgcccaccggcgcgtgaacaactgctcggacatgtgcttccaccagaagtaccggacgcacgacggcacctgtaacaacctgcagcaccccatgtggggcgcctcgctgaccgccttcgagcgcctgctgaaatccgtgtacgagaatggcttcaacacccctcggggcatcaacccccaccgactgtacaacgggcacgcccttcccatgccgcgcctggtgtccaccaccctgatcgggacggagaccgtcacacccgacgagcagttcacccacatgctgatgcagtggggccagttcctggaccacgacctcgactccacggtggtggccctgagccaggcacgcttctccgacggacagcactgcagcaacgtgtgcagcaacgaccccccctgcttctctgtcatgatcccccccaatgactcccgggccaggagcggggcccgctgcatgttcttcgtgcgctccagccctgtgtgcggcagcggcatgacttcgctgctcatgaactccgtgtacccgcgggagcagatcaaccagctcacctcctacatcgacgcatccaacgtgtacgggagcacggagcatgaggcccgcagcatccgcgacctggccagccaccgcggcctgctgcggcagggcatcgtgcagcggtccgggaagccgctgctccccttcgccaccgggccgcccacggagtgcatgcgggacgagaacgagagccccatcccctgcttcctggccggggaccaccgcgccaacgagcagctgggcctgaccagcatgcacacgctgtggttccgcgagcacaaccgcattgccacggagctgctcaagctgaacccgcactgggacggcgacaccatctactatgagaccaggaagatcgtgggtgcggagatccagcacatcacctaccagcactggctcccgaagatcctgggggaggtgggcatgaggacgctgggagagtaccacggctacgaccccggcatcaatgctggcatcttcaacgccttcgccaccgcggccttcaggtttggccacacgcttgtcaacccactgctttaccggctggacgagaacttccagcccattgcacaagatcacctcccccttcacaaagctttcttctctcccttccggattgtgaatgagggcggcatcgatccgcttctcagggggctgttcggggtggcggggaaaatgcgtgtgccctcgcagctgctgaacacggagctcacggagcggctgttctccatggcacacacggtggctctggacctggcggccatcaacatccagcggggccgggaccacgggatcccaccctaccacgactacagggtctactgcaatctatcggcggcacacacgttcgaggacctgaaaaatgagattaaaaaccctgagatccgggagaaactgaaaaggttgtatggctcgacactcaacatcgacctgtttccggcgctcgtggtggaggacctggtgcctggcagccggctgggccccaccctgatgtgtcttctcagcacacagttcaagcgcctgcgagatggggacaggttgtggtatgagaaccctggggtgttctccccggcccagctgactcagatcaagcagacgtcgctggccaggatcctatgcgacaacgcggacaacatcacccgggtgcagagcgacgtgttcagggtggcggagttccctcacggctacggcagctgtgacgagatccccagggtggacctccgggtgtggcaggactgctgtgaagactgtaggaccagggggcagttcaatgccttttcctatcatttccgaggcagacggtctcttgagttcagctaccaggaggacaagccgaccaagaaaacaagaccacggaaaatacccagtgttgggagacagggggaacatctcagcaacagcacctcagccttcagcacacgctcagatgcatctgggacaaatgacttcagagagtttgttctggaaatgcagaagaccatcacagacctcagaacacagataaagaaacttgaatcacggctcagtaccacagagtgcgtggatgccgggggcgaatctcacgccaacaacaccaagtggaaaaaagatgcatgcaccatttgtgaatgcaaagacgggcaggtcacctgcttcgtggaagcttgcccccctgccacctgtgctgtccccgtgaacatcccaggggcctgctgtccagtctgcttacagaagagggcggaggaaaagccctaggctcctgggaggctcctcagagtttgtctgctgtgccatcgtgagatcgggtggccgatggcagggagctgcggactgcagaccaggaaacacccagaactcgtgacatttcatgacaacgtccagctggtgctgttacagaaggcagtgcaggaggcttccaaccagagcatctgcggagaaggaggcacagcaggtgcctgaagggaagcaggcaggagtcctagcttcacgttagacttctcaggtttttatttaattcttttaaaatgaaaaattggtgctactattaaattgcacagttgaatcatttaggcgcctaaattgattttgcctcccaacaccatttctttttaaataaagcaggatacctctatatgtcagccttgccttgttcagatgccaggagccggcagacctgtcacccgcaggtggggtgagtctcggagctgccagaggggctcaccgaaatcggggttccatcacaagctatgtttaaaaagaaaattggtgtttggcaaacggaacagaacctttgatgagagcgttcacagggacactgtctgggggtgcagtgcaagcccccggcctcttccctgggaacctctgaactcctccttcctctgggctctctgtaacatttcaccacacgtcagcatctaatcccaagacaaacattcccgctgctcgaagcagctgtatagcctgtgactctccgtgtgtcagctccttccacacctgattagaacattcataagccacatttagaaacagatttgctttcagctgtcacttgcacacatactgcctagttgtgaaccaaatgtgaaaaaacctccttcatcccattgtgtatctgatacctgccgagggccaagggtgtgtgttgacaacgccgctcccagccggccctggttgcgtccacgtcctgaacaagagccgcttccggatggctcttcccaagggaggaggagctcaagtgtcgggaactgtctaacttcaggttgtgtgagtgcgttaaaaaaaaaaaaaaaaaaaagaatccctatacctcatttgtatttttaaaatgcgtgatgttttatgaaattgtgtccattttttaggtattagatatggcagaaaaaccatttccactatgcaaagttcttttagacgtcagtgaaaatcaactctcatacctcatggtctctctttaattgaccaaaaccttccatttttctctaaatacaaagcgatctgtgttctgagcaacctttccccgaacacacagcttcagtgcagcacgctgacctgagtatccaccatgtgccaggcacagtgctgggcacacgaggcaccaaggtccgggccacctgcccgcagcaaggcccagctgagacacctgtagcacacctgcgtaatgtgcggtctgggccagtcacaaggaattgtgttgtctaagccaaagggggaagctgactgtgatttaccaaaaaaaattctgtaattcaaaccaaaatgtctgcggaatcaccagtttgatactctctgtaatcagaacagtgggcagtgcctgggtgaacgtgtctagcagccactgtgcgggatcgctgtaacaggagtggaatgtacatatttatttacttttctaactgctccaacagccaaatgccttttttatgaccattgtattcagttcattaccaaagaaatgtttgcactttgtaatgatgcctttcagttcaaataaatgggtcacattttcaaatggaaaaagtctttatt

SEQ ID NO: 458197 - DNA, 5904 bp, Homo sapiens
  misc_feature (5865)..(5865): n is a, c, g, or t
cgcgcacagctgggacgtgggccgcggccgggcgggcgcagtcgggagccggccgtggtggctccgtgcgtccgagcgtccgtccgcgccgtcggccatggccaagcgctccaggggccccgggcgccgctgcctgttggcgctcgtgctgttctgcgcctgggggacgctggccgtggtggcccagaagccgggcgcagggtgtccgagccgctgcctgtgcttccgcaccaccgtgcgctgcatgcatctgctgctggaggccgtgcccgccgtggcgccgcagacctccatcctagatcttcgctttaacagaatcagagagatccaacctggggcattcaggcggctgaggaacttgaacacattgcttctcaataataatcagatcaagaggatacctagtggagcatttgaagacttggaaaatttaaaatatctctatctgtacaagaatgagatccagtcaattgacaggcaagcatttaagggacttgcctctctagagcaactatacctgcactttaatcagatagaaactttggacccagattcgttccagcatctcccgaagctcgagaggctatttttgcataacaaccggattacacatttagttccagggacatttaatcacttggaatctatgaagagattgcgactggactcaaacacacttcactgcgactgtgaaatcctgtggttggcggatttgctgaaaacctacgcggagtcggggaacgcgcaggcagcggccatctgtgaatatcccagacgcatccagggacgctcagtggcaaccatcaccccggaagagctgaactgtgaaaggccccggatcacctccgagccccaggacgcagatgtgacctcggggaacaccgtgtacttcacctgcagagccgaaggcaaccccaagcctgagatcatctggctgcgaaacaataatgagctgagcatgaagacagattcccgcctaaacttgctggacgatgggaccctgatgatccagaacacacaggagacagaccagggtatctaccagtgcatggcaaagaacgtggccggagaggtgaagacgcaagaggtgaccctcaggtacttcgggtctccagctcgacccacttttgtaatccagccacagaatacagaggtgctggttggggagagcgtcacgctggagtgcagcgccacaggccaccccccgccgcggatctcctggacgagaggtgaccgcacacccttgccagttgacccgcgggtgaacatcacgccttctggcgggctttacatacagaacgtcgtacagggggacagcggagagtatgcgtgctctgcgaccaacaacattgacagcgtccatgccaccgctttcatcatcgtccaggctcttcctcagttcactgtgacgcctcaggacagagtcgttattgagggccagaccgtggatttccagtgtgaagccaagggcaacccgccgcccgtcatcgcctggaccaagggagggagccagctctccgtggaccggcggcacctggtcctgtcatcgggaacacttagaatctctggtgttgccctccacgaccagggccagtacgaatgccaggctgtcaacatcatcggctcccagaaggtcgtggcccacctgactgtgcagcccagagtcaccccagtgtttgccagcattcccagcgacacaacagtggaggtgggcgccaatgtgcagctcccgtgcagctcccagggcgagcccgagccagccatcacctggaacaaggatggggttcaggtgacagaaagtggaaaatttcacatcagccctgaaggattcttgaccatcaatgacgttggccctgcagacgcaggtcgctatgagtgtgtggcccggaacaccattgggtcggcctcggtgagcatggtgctcagtgtgaacgttcctgacgtcagtcgaaatggagatccgtttgtagctacctccatcgtggaagcgattgcgactgttgacagagctataaactcaacccgaacacatttgtttgacagccgtcctcgttctccaaatgatttgctggccttgttccggtatccgagggatccttacacagttgaacaggcacgggcgggagaaatctttgaacggacattgcagctcattcaggagcatgtacagcatggcttgatggtcgacctcaacggaacaagttaccactacaacgacctggtgtctccacagtacctgaacctcatcgcaaacctgtcgggctgtaccgcccaccggcgcgtgaacaactgctcggacatgtgcttccaccagaagtaccggacgcacgacggcacctgtaacaacctgcagcaccccatgtggggcgcctcgctgaccgccttcgagcgcctgctgaaatccgtgtacgagaatggcttcaacacccctcggggcatcaacccccaccgactgtacaacgggcacgcccttcccatgccgcgcctggtgtccaccaccctgatcgggacggagaccgtcacacccgacgagcagttcacccacatgctgatgcagtggggccagttcctggaccacgacctcgactccacggtggtggccctgagccaggcacgcttctccgacggacagcactgcagcaacgtgtgcagcaacgaccccccctgcttctctgtcatgatcccccccaatgactcccgggccaggagcggggcccgctgcatgttcttcgtgcgctccagccctgtgtgcggcagcggcatgacttcgctgctcatgaactccgtgtacccgcgggagcagatcaaccagctcacctcctacatcgacgcatccaacgtgtacgggagcacggagcatgaggcccgcagcatccgcgacctggccagccaccgcggcctgctgcggcagggcatcgtgcagcggtccgggaagccgctgctccccttcgccaccgggccgcccacggagtgcatgcgggacgagaacgagagccccatcccctgcttcctggccggggaccaccgcgccaacgagcagctgggcctgaccagcatgcacacgctgtggttccgcgagcacaaccgcattgccacggagctgctcaagctgaacccgcactgggacggcgacaccatctactatgagaccaggaagatcgtgggtgcggagatccagcacatcacctaccagcactggctcccgaagatcctgggggaggtgggcatgaggacgctgggagagtaccacggctacgaccccggcatcaatgctggcatcttcaacgccttcgccaccgcggccttcaggtttggccacacgcttgtcaacccactgctttaccggctggacgagaacttccagcccattgcacaagatcacctcccccttcacaaagctttcttctctcccttccggattgtgaatgagggcggcatcgatccgcttctcagggggctgttcggggtggcggggaaaatgcgtgtgccctcgcagctgctgaacacggagctcacggagcggctgttctccatggcacacacggtggctctggacctggcggccatcaacatccagcggggccgggaccacgggatcccaccctaccacgactacagggtctactgcaatctatcggcggcacacacgttcgaggacctgaaaaatgagattaaaaaccctgagatccgggagaaactgaaaaggttgtatggctcgacactcaacatcgacctgtttccggcgctcgtggtggaggacctggtgcctggcagccggctgggccccaccctgatgtgtcttctcagcacacagttcaagcgcctgcgagatggggacaggttgtggtatgagaaccctggggtgttctccccggcccagctgactcagatcaagcagacgtcgctggccaggatcctatgcgacaacgcggacaacatcacccgggtgcagagcgacgtgttcagggtggcggagttccctcacggctacggcagctgtgacgagatccccagggtggacctccgggtgtggcaggactgctgtgaagactgtaggaccagggggcagttcaatgccttttcctatcatttccgaggcagacggtctcttgagttcagctaccaggaggacaagccgaccaagaaaacaagaccacggaaaatacccagtgttgggagacagggggaacatctcagcaacagcacctcagccttcagcacacgctcagatgcatctgggacaaatgacttcagagagtttgttctggaaatgcagaagaccatcacagacctcagaacacagataaagaaacttgaatcacggctcagtaccacagagtgcgtggatgccgggggcgaatctcacgccaacaacaccaagtggaaaaaagatgcatgcaccatttgtgaatgcaaagacgggcaggtcacctgcttcgtggaagcttgcccccctgccacctgtgctgtccccgtgaacatcccaggggcctgctgtccagtctgcttacagaagagggcggaggaaaagccctaggctcctgggaggctcctcagagtttgtctgctgtgccatcgtgagatcgggtggccgatggcagggagctgcggactgcagaccaggaaacacccagaactcgtgacatttcatgacaacgtccagctggtgctgttacagaaggcagtgcaggaggcttccaaccagagcatctgcggagaaggaggcacagcaggtgcctgaagggaagcaggcaggagtcctagcttcacgttagacttctcaggtttttatttaattcttttaaaatgaaaaattggtgctactattaaattgcacagttgaatcatttaggcgcctaaattgattttgcctcccaacaccatttctttttaaataaagcaggatacctctatatgtcagccttgccttgttcagatgccaggagccggcagacctgtcacccgcaggtggggtgagtctcggagctgccagaggggctcaccgaaatcggggttccatcacaagctatgtttaaaaagaaaattggtgtttggcaaacggaacagaacctttgatgagagcgttcacagggacactgtctgggggtgcagtgcaagcccccggcctcttccctgggaacctctgaactcctccttcctctgggctctctgtaacatttcaccacacgtcagcatctaatcccaagacaaacattcccgctgctcgaagcagctgtatagcctgtgactctccgtgtgtcagctccttccacacctgattagaacattcataagccacatttagaaacagatttgctttcagctgtcacttgcacacatactgcctagttgtgaaccaaatgtgaaaaaacctccttcatcccattgtgtatctgatacctgccgagggccaagggtgtgtgttgacaacgccgctcccagccggccctggttgcgtccacgtcctgaacaagagccgcttccggatggctcttcccaagggaggaggagctcaagtgtcgggaactgtctaacttcaggttgtgtgagtgcgttaaaaaaaaaaaaaaaaaaaagaatccctatacctcatttgtatttttaaaatgcgtgatgttttatgaaattgtgtccattttttaggtattagatatggcagaaaaaccatttccactatgcaaagttcttttagacgtcagtgaaaatcaactctcatacctcatggtctctctttaattgaccaaaaccttccatttttctctaaatacaaagcgatctgtgttctgagcaacctttccccgaacacacagcttcagtgcagcacgctgacctgagtatccaccatgtgccaggcacaggtcgacncggccgcgaatttagtagtagtagtcgaccaggggccgc

SEQ ID NO: 458198 - DNA, 1858 bp, Homo sapiens
  misc_feature (22)..(23): n is a, c, g, or t
gcggccgcccctggggggtggnnattaacgcactcacacaacctgaagttagacagttcccgacacttgagctcctcctcccttgggaagagccatccggaagcggctcttgttcaggacgtggacgcaaccagggccggctgggagcggcgttgtcaacacacacccttggcccccggcctcttccctgggaacctctgaactcctccttcctctgggctctctgtaacatttcaccacacgtcagcatctaatcccaagacaaacattcccgctgctcgaagcagctgtatagcctgtgactctccgtgtgtcagctccttccacacctgattagaacattcataagccacatttagaaacagatttgctttcagctgtcacttgcacacatactgcctagttgtgaaccatgacaacgccgctcccagccggccctggttgcgtccacgtcctgaacaagagccgcttccggatggctcttcccaagggaggaggagctcaagtgtcgggaactgtctaacttcaggttgtgtgagtgcgttaaaaaaaaaaaaaaaaaaaagaatccctatacctcatttgtatttttaaaatgcgtgatgttttatgaaattgtgtccattttttaggtattagatatggcagaaaaaccatttccactatgcaaagttcttttagacgtcagtgaaaatcaactctcatacctcatggtctctctttaattgaccaaaaccttccatttttctctaaatacaaagcgatctgtgttctgagcaacctttccccgaacacacagcttcagtgcagcacgctgacctgagtatccaccatgtgccaggcacagtgctgggcacacgaggcaccaaggtccgggccacctgcccgcagcaaggcccagctgaggtggtggagggagcccctgaggtcaggggccgtttcggttcagggtggcaggtgtccagcactggggtatggcgtcgaggcttccatggggtgggggaggccagcttccttctgacaggatgggcgcatacagtgcctggtgtgatttgtgcacaacccgtgttccaggtgcacatcctcccaaggagacacccagacccttccagcacgggccggccaagttgctgcggcggaggcagcatttcagctgtgaggaaggtcattggattcatgtgttttatctgtaaaaatggttgtcttaacttcttaacctcatattggtaagtgattgataaaaattggttggtgtttcatgacatgtggacttcttttgaaatagcaagtcaaatgtagtgaccaaattgtggaagagatttctgtcaaataggaaatgtgtaagttcgtctaaaagctgatggttatgtaagttgctcaggcactcagatgacagcagattctgggttctgggagtgttctgtgcctcttacatgccctggaggcctcatggtctcagtgctgaggcggcacacctgtagcacacctgcgtaatgtgcggtctgggccagtcacaaggaattgtgttgtctaagccaaagggggaagctgactgtgatttaccaaaaaaaattctgtaattcaaaccaaaatgtctgcggaatcaccagtttgatactctctgtaatcagaacagtgggcagtgcctgggtgaacgtgtctagcagccactgtgcgggatcgctgtaacaggagtggaatgtacatatttatttacttttctaactgctccaacagccaaatgccttttttatgaccattgtattcagttcattaccaaagaaatgtttgcactttgtaatgatgcctttcagttcaaataaatgggtcacattttcaaatggaaaaagtctttatt

SEQ ID NO: 458199 - DNA, 3575 bp, Homo sapiens
cgcgcacagctgggacgtgggccgcggccgggcgggcgcagtcgggagccggccgtggtggctccgtgcgtccgagcgtccgtccgcgccgtcggccatggccaagcgctccaggggccccgggcgccgctgcctgttggcgctcgtgctgttctgcgcctgggggacgctggccgtggtggcccagaagccgggcgcagggtgtccgagccgctgcctgtgcttccgcaccaccgtgcgctgcatgcatctgctgctggaggccgtgcccgccgtggcgccgcagacctccatcctagatcttcgctttaacagaatcagagagatccaacctggggcattcaggcggctgaggaacttgaacacattgcttctcaataataatcagatcaagaggatacctagtggagcatttgaagacttggaaaatttaaaatatctctatctgtacaagaatgagatccagtcaattgacaggcaagcatttaagggacttgcctctctagagcaactatacctgcactttaatcagatagaaactttggacccagattcgttccagcatctcccgaagctcgagaggctatttttgcataacaaccggattacacatttagttccagggacatttaatcacttggaatctatgaagagattgcgactggactcaaacacacttcactgcgactgtgaaatcctgtggttggcggatttgctgaaaacctacgcggagtcggggaacgcgcaggcagcggccatctgtgaatatcccagacgcatccagggacgctcagtggcaaccatcaccccggaagagctgaactgtgaaaggccccggatcacctccgagccccaggacgcagatgtgacctcggggaacaccgtgtacttcacctgcagagccgaaggcaaccccaagcctgagatcatctggctgcgaaacaataatgagctgagcatgaagacagattcccgcctaaacttgctggacgatgggaccctgatgatccagaacacacaggagacagaccagggtatctaccagtgcatggcaaagaacgtggccggagaggtgaagacgcaagaggtgaccctcaggtacttcgggtctccagctcgacccacttttgtaatccagccacagaatacagaggtgctggttggggagagcgtcacgctggagtgcagcgccacaggccaccccccgccgcggatctcctggacgagaggtgaccgcacacccttgccagttgacccgcgggtgaacatcacgccttctggcgggctttacatacagaacgtcgtacagggggacagcggagagtatgcgtgctctgcgaccaacaacattgacagcgtccatgccaccgctttcatcatcgtccaggctcttcctcagttcactgtgacgcctcaggacagagtcgttattgagggccagaccgtggatttccagtgtgaagccaagggcaacccgccgcccgtcatcgcctggaccaagggagggagccagctctccgtggaccggcggcacctggtcctgtcatcgggaacacttagaatctctggtgttgccctccacgaccagggccagtacgaatgccaggctgtcaacatcatcggctcccagaaggtcgtggcccacctgactgtgcagcccagagtcaccccagtgtttgccagcattcccagcgacacaacagtggaggtgggcgccaatgtgcagctcccgtgcagctcccagggcgagcccgagccagccatcacctggaacaaggatggggttcaggtgacagaaagtggaaaatttcacatcagccctgaaggattcttgaccatcaatgacgttggccctgcagacgcaggtcgctatgagtgtgtggcccggaacaccattgggtcggcctcggtgagcatggtgctcagtgtgaacgttcctgacgtcagtcgaaatggagatccgtttgtagctacctccatcgtggaagcgattgcgactgttgacagagctataaactcaacccgaacacatttgtttgacagccgtcctcgttctccaaatgatttgctggccttgttccggtatccgagggatccttacacagttgaacaggcacgggcgggagaaatctttgaacggacattgcagctcattcaggagcatgtacagcatggcttgatggtcgacctcaacggaacaagttaccactacaacgacctggtgtctccacagtacctgaacctcatcgcaaacctgtcgggctgtaccgcccaccggcgcgtgaacaactgctcggacatgtgcttccaccagaagtaccggacgcacgacggcacctgtaacaacctgcagcaccccatgtggggcgcctcgctgaccgccttcgagcgcctgctgaaatccgtgtacgagaatggcttcaacacccctcggggcatcaacccccaccgactgtacaacgggcacgcccttcccatgccgcgcctggtgtccaccaccctgatcgggacggagaccgtcacacccgacgagcagttcacccacatgctgatgcagtggggccagttcctggaccacgacctcgactccacggtggtggccctgagccaggcacgcttctccgacggacagcactgcagcaacgtcaggggccgtttcggttcagggtggcaggtgtccagcactggggtatggcgtcgaggcttccatggggtgggggaggccagcttccttctgacaggatgggcgcatacagtgcctggtgtgatttgtgcacaacccgtgttccaggtgcacatcctcccaaggagacacccagacccttccagcacgggccggccaagttgctgcggcggaggcagcatttcagctgtgaggaaggtcattggattcatgtgttttatctgtaaaaatggttgtcttaacttcttaacctcatattggtaagtgattgataaaaattggttggtgtttcatgacatgtggacttcttttgaaatagcaagtcaaatgtagtgaccaaattgtggaagagatttctgtcaaataggaaatgtgtaagttcgtctaaaagctgatggttatgtaagttgctcaggcactcagatgacagcagattctgggttctgggagtgttctgtgcctcttacatgccctggaggcctcatggtctcagtgctgaggcggcacacctgtagcacacctgcgtaatgtgcggtctgggccagtcacaaggaattgtgttgtctaagccaaagggggaagctgactgtgatttaccaaaaaaaattctgtaattcaaaccaaaatgtctgcggaatcaccagtttgatactctctgtaatcagaacagtgggcagtgcctgggtgaacgtgtctagcagccactgtgcgggatcgctgtaacaggagtggaatgtacatatttatttacttttctaactgctccaacagccaaatgccttttttatgaccattgtattcagttcattaccaaagaaatgtttgcactttgtaatgatgcctttcagttcaaataaatgggtcacattttcaaatggaaaaagtctttatt

SEQ ID NO: 458200 - DNA, 708 bp, Homo sapiens
tacccaaactgaaggtagctttttattactcctgtggggagcatgtacgagctctgtgtatacaccggcttcacacccacctgattgataaaaattggttggtgtttcatgacatgtggacttcttttgaaatagcaagtcaaatgtagtgaccaaattgtggaagagatttctgtcaaataggaaatgtgtaagttcgtctaaaagctgatggttatgtaagttgctcaggcactcagatgacagcagattctgggttctgggagtgttctgtgcctcttacatgccctggaggcctcatggtctcagtgctgaggcggcacacctgtagcacacctgcgtaatgtgcggtctgggccagtcacaaggaattgtgttgtctaagccaaagggggaagctgactgtgatttaccaaaaaaaattctgtaattcaaaccaaaatgtctgcggaatcaccagtttgatactctctgtaatcagaacagtgggcagtgcctgggtgaacgtgtctagcagccactgtgcgggatcgctgtaacaggagtggaatgtacatatttatttacttttctaactgctccaacagccaaatgccttttttatgaccattgtattcagttcattaccaaagaaatgtttgcactttgtaatgatgcctttcagttcaaataaatgggtcacattttcaaatggaaaaagtctttatt

SEQ ID NO: 458201 - DNA, 5391 bp, Homo sapiens
cgcgcacagctgggacgtgggccgcggccgggcgggcgcagtcgggagccggccgtggtggctccgtgcgtccgagcgtccgtccgcgccgtcggccatggccaagcgctccaggggccccgggcgccgctgcctgttggcgctcgtgctgttctgcgcctgggggacgctggccgtggtggcccagaagccgggcgcagggtgtccgagccgctgcctgtgcttccgcaccaccgtgcgctgcatgcatctgctgctggaggccgtgcccgccgtggcgccgcagacctccatcctagatcttcgctttaacagaatcagagagatccaacctggggcattcaggcggctgaggaacttgaacacattgcttctcaataataatcagatcaagaggatacctagtggagcatttgaagacttggaaaatttaaaatatctctatctgtacaagaatgagatccagtcaattgacaggcaagcatttaagggacttgcctctctagagcaactatacctgcactttaatcagatagaaactttggacccagattcgttccagcatctcccgaagctcgagaggctatttttgcataacaaccggattacacatttagttccagggacatttaatcacttggaatctatgaagagattgcgactggactcaaacacacttcactgcgactgtgaaatcctgtggttggcggatttgctgaaaacctacgcggagtcggggaacgcgcaggcagcggccatctgtgaatatcccagacgcatccagggacgctcagtggcaaccatcaccccggaagagctgaactgtgaaaggccccggatcacctccgagccccaggacgcagatgtgacctcggggaacaccgtgtacttcacctgcagagccgaaggcaaccccaagcctgagatcatctggctgcgaaacaataatgagctgagcatgaagacagattcccgcctaaacttgctggacgatgggaccctgatgatccagaacacacaggagacagaccagggtatctaccagtgcatggcaaagaacgtggccggagaggtgaagacgcaagaggtgaccctcaggtacttcgggtctccagctcgacccacttttgtaatccagccacagaatacagaggtgctggttggggagagcgtcacgctggagtgcagcgccacaggccaccccccgccgcggatctcctggacgagaggtgaccgcacacccttgccagttgacccgcgggtgaacatcacgccttctggcgggctttacatacagaacgtcgtacagggggacagcggagagtatgcgtgctctgcgaccaacaacattgacagcgtccatgccaccgctttcatcatcgtccaggctcttcctcagttcactgtgacgcctcaggacagagtcgttattgagggccagaccgtggatttccagtgtgaagccaagggcaacccgccgcccgtcatcgcctggaccaagggagggagccagctctccgtggaccggcggcacctggtcctgtcatcgggaacacttagaatctctggtgttgccctccacgaccagggccagtacgaatgccaggctgtcaacatcatcggctcccagaaggtcgtggcccacctgactgtgcagcccagagtcaccccagtgtttgccagcattcccagcgacacaacagtggaggtgggcgccaatgtgcagctcccgtgcagctcccagggcgagcccgagccagccatcacctggaacaaggatggggttcaggtgacagaaagtggaaaatttcacatcagccctgaaggattcttgaccatcaatgacgttggccctgcagacgcaggtcgctatgagtgtgtggcccggaacaccattgggtcggcctcggtgagcatggtgctcagtgtgaacgttcctgacgtcagtcgaaatggagatccgtttgtagctacctccatcgtggaagcgattgcgactgttgacagagctataaactcaacccgaacacatttgtttgacagccgtcctcgttctccaaatgatttgctggccttgttccggtatccgagggatccttacacagttgaacaggcacgggcgggagaaatctttgaacggacattgcagctcattcaggagcatgtacagcatggcttgatggtcgacctcaacggaacaagttaccactacaacgacctggtgtctccacagtacctgaacctcatcgcaaacctgtcgggctgtaccgcccaccggcgcgtgaacaactgctcggacatgtgcttccaccagaagtaccggacgcacgacggcacctgtaacaacctgcagcaccccatgtggggcgcctcgctgaccgccttcgagcgcctgctgaaatccgtgtacgagaatggcttcaacacccctcggggcatcaacccccaccgactgtacaacgggcacgcccttcccatgccgcgcctggtgtccaccaccctgatcgggacggagaccgtcacacccgacgagcagttcacccacatgctgatgcagtggggccagttcctggaccacgacctcgactccacggtggtggccctgagccaggcacgcttctccgacggacagcactgcagcaacgtgtgcagcaacgaccccccctgcttctctgtcatgatcccccccaatgactcccgggccaggagcggggcccgctgcatgttcttcgtgcgctccagccctgtgtgcggcagcggcatgacttcgctgctcatgaactccgtgtacccgcgggagcagatcaaccagctcacctcctacatcgacgcatccaacgtgtacgggagcacggagcatgaggcccgcagcatccgcgacctggccagccaccgcggcctgctgcggcagggcatcgtgcagcggtccgggaagccgctgctccccttcgccaccgggccgcccacggagtgcatgcgggacgagaacgagagccccatcccctgcttcctggccggggaccaccgcgccaacgagcagctgggcctgaccagcatgcacacgctgtggttccgcgagcacaaccgcattgccacggagctgctcaagctgaacccgcactgggacggcgacaccatctactatgagaccaggaagatcgtgggtgcggagatccagcacatcacctaccagcactggctcccgaagatcctgggggaggtgggcatgaggacgctgggagagtaccacggctacgaccccggcatcaatgctggcatcttcaacgccttcgccaccgcggccttcaggtttggccacacgcttgtcaacccactgctttaccggctggacgagaacttccagcccattgcacaagatcacctcccccttcacaaagctttcttctctcccttccggattgtgaatgagggcggcatcgatccgcttctcagggggctgttcggggtggcggggaaaatgcgtgtgccctcgcagctgctgaacacggagctcacggagcggctgttctccatggcacacacggtggctctggacctggcggccatcaacatccagcggggccgggaccacgggatcccaccctaccacgactacagggtctactgcaatctatcggcggcacacacgttcgaggacctgaaaaatgagattaaaaaccctgagatccgggagaaactgaaaaggttgtatggctcgacactcaacatcgacctgtttccggcgctcgtggtggaggacctggtgcctggcagccggctgggccccaccctgatgtgtcttctcagcacacagttcaagcgcctgcgagatggggacaggttgtggtatgagaaccctggggtgttctccccggcccagctgactcagatcaagcagacgtcgctggccaggatcctatgcgacaacgcggacaacatcacccgggtgcagagcgacgtgttcagggtggcggagttccctcacggctacggcagctgtgacgagatccccagggtggacctccgggtgtggcaggactgctgtgaagactgtaggaccagggggcagttcaatgccttttcctatcatttccgaggcagacggtctcttgagttcagctaccaggaggacaagccgaccaagaaaacaagaccacggaaaatacccagtgttgggagacagggggaacatctcagcaacagcacctcagccttcagcacacgctcagatgcatctgggacaaatgacttcagagagtttgttctggaaatgcagaagaccatcacagacctcagaacacagataaagaaacttgaatcacggctcagtaccacagagtgcgtggatgccgggggcgaatctcacgccaacaacaccaagtggaaaaaagatgcatgcaccatttgtgaatgcaaagacgggcaggtcacctgcttcgtggaagcttgcccccctgccacctgtgctgtccccgtgaacatcccaggggcctgctgtccagtctgcttacagaagagggcggaggaaaagccctaggctcctgggaggctcctcagagtttgtctgctgtgccatcgtgagatcgggtggccgatggcagggagctgcggactgcagaccaggaaacacccagaactcgtgacatttcatgacaacgtccagctggtgctgttacagaaggcagtgcaggaggcttccaaccagagcatctgcggagaaggaggcacagcaggtgcctgaagggaagcaggcaggagtcctagcttcacgttagacttctcaggtttttatttaattcttttaaaatgaaaaattggtgctactattaaattgcacagttgaatcatttaggcgcctaaattgattttgcctcccaacaccatttctttttaaataaagcaggatacctctatatgtcagccttgccttgttcagatgccaggagccggcagacctgtcacccgcaggtggggtgagtctcggagctgccagaggggctcaccgaaatcggggttccatcacaagctatgtttaaaaagaaaattggtgtttggcaaacggaacagaacctttgatgagagcgttcacagggacactgtctgggggtgcagtgcaagcccccggcctcttccctgggaacctctgaactcctccttcctctgggctctctgtaacatttcaccacacgtcagcatctaatcccaagacaaacattcccgctgctcgaagcagctgtatagcctgtgactctccgtgtgtcagctccttccacacctgattagaacattcataagccacatttagaaacagatttgctttcagctgtcacttgcacacatactgcctagttgtgaaccaggggtcctcataggaacggctatgagccagat

SEQ ID NO: 458202 - DNA, 3877 bp, Homo sapiens
cgcgcacagctgggacgtgggccgcggccgggcgggcgcagtcgggagccggccgtggtggctccgtgcgtccgagcgtccgtccgcgccgtcggccatggccaagcgctccaggggccccgggcgccgctgcctgttggcgctcgtgctgttctgcgcctgggggacgctggccgtggtggcccagaagccgggcgcagggtgtccgagccgctgcctgtgcttccgcaccaccgtgcgctgcatgcatctgctgctggaggccgtgcccgccgtggcgccgcagacctccatcctagatcttcgctttaacagaatcagagagatccaacctggggcattcaggcggctgaggaacttgaacacattgcttctcaataataatcagatcaagaggatacctagtggagcatttgaagacttggaaaatttaaaatatctctatctgtacaagaatgagatccagtcaattgacaggcaagcatttaagggacttgcctctctagagcaactatacctgcactttaatcagatagaaactttggacccagattcgttccagcatctcccgaagctcgagaggctatttttgcataacaaccggattacacatttagttccagggacatttaatcacttggaatctatgaagagattgcgactggactcaaacacacttcactgcgactgtgaaatcctgtggttggcggatttgctgaaaacctacgcggagtcggggaacgcgcaggcagcggccatctgtgaatatcccagacgcatccagggacgctcagtggcaaccatcaccccggaagagctgaactgtgaaaggccccggatcacctccgagccccaggacgcagatgtgacctcggggaacaccgtgtacttcacctgcagagccgaaggcaaccccaagcctgagatcatctggctgcgaaacaataatgagctgagcatgaagacagattcccgcctaaacttgctggacgatgggaccctgatgatccagaacacacaggagacagaccagggtatctaccagtgcatggcaaagaacgtggccggagaggtgaagacgcaagaggtgaccctcaggtacttcgggtctccagctcgacccacttttgtaatccagccacagaatacagaggtgctggttggggagagcgtcacgctggagtgcagcgccacaggccaccccccgccgcggatctcctggacgagaggtgaccgcacacccttgccagttgacccgcgggtgaacatcacgccttctggcgggctttacatacagaacgtcgtacagggggacagcggagagtatgcgtgctctgcgaccaacaacattgacagcgtccatgccaccgctttcatcatcgtccaggctcttcctcagttcactgtgacgcctcaggacagagtcgttattgagggccagaccgtggatttccagtgtgaagccaagggcaacccgccgcccgtcatcgcctggaccaagggagggagccagctctccgtggaccggcggcacctggtcctgtcatcgggaacacttagaatctctggtgttgccctccacgaccagggccagtacgaatgccaggctgtcaacatcatcggctcccagaaggtcgtggcccacctgactgtgcagcccagagtcaccccagtgtttgccagcattcccagcgacacaacagtggaggtgggcgccaatgtgcagctcccgtgcagctcccagggcgagcccgagccagccatcacctggaacaaggatggggttcaggtgacagaaagtggaaaatttcacatcagccctgaaggattcttgaccatcaatgacgttggccctgcagacgcaggtcgctatgagtgtgtggcccggaacaccattgggtcggcctcggtgagcatggtgctcagtgtgaacgttcctgacgtcagtcgaaatggagatccgtttgtagctacctccatcgtggaagcgattgcgactgttgacagagctataaactcaacccgaacacatttgtttgacagccgtcctcgttctccaaatgatttgctggccttgttccggtatccgagggatccttacacagttgaacaggcacgggcgggagaaatctttgaacggacattgcagctcattcaggagcatgtacagcatggcttgatggtcgacctcaacggaacaagttaccactacaacgacctggtgtctccacagtacctgaacctcatcgcaaacctgtcgggctgtaccgcccaccggcgcgtgaacaactgctcggacatgtgcttccaccagaagtaccggacgcacgacggcacctgtaacaacctgcagcaccccatgtggggcgcctcgctgaccgccttcgagcgcctgctgaaatccgtgtacgagaatggcttcaacacccctcggggcatcaacccccaccgactgtacaacgggcacgcccttcccatgccgcgcctggtgtccaccaccctgatcgggacggagaccgtcacacccgacgagcagttcacccacatgctgatgcagtggggccagttcctggaccacgacctcgactccacggtggtggccctgagccaggcacgcttctccgacggacagcactgcagcaacgtgtgcagcaacgaccccccctgcttctctgtcatgatcccccccaatgactcccgggccaggagcggggcccgctgcatgttcttcgtgcgctccagccctgtgtgcggcagcggcatgacttcgctgctcatgaactccgtgtacccgcgggagcagatcaaccagctcacctcctacatcgacgcatccaacgtgtacgggagcacggagcatgaggcccgcagcatccgcgacctggccagccaccgcggcctgctgcggcagggcatcgtgcagcggtccgggaagccgctgctccccttcgccaccgggccgcccacggagtgcatgcgggacgagaacgagagccccatcccctgcttcctggccggggaccaccgcgccaacgagcagctgggcctgaccagcatgcacacgctgtggttccgcgagcacaaccgcattgccacggagctgctcaagctgaacccgcactgggacggcgacaccatctactatgagaccaggaagatcgtgggtgcggagatccagcacatcacctaccagcactggctcccgaagatcctgggggaggtgggcatgaggacgctgggagagtaccacggctacgaccccggcatcaatgctggcatcttcaacgccttcgccaccgcggccttcaggtttggccacacgcttgtcaacccactgctttaccggctggacgagaacttccagcccattgcacaagatcacctcccccttcacaaagctttcttctctcccttccggattgtgaatgagggcggcatcgatccgcttctcagggggctgttcggggtggcggggaaaatgcgtgtgccctcgcagctgctgaacacggagctcacggagcggctgttctccatggcacacacggtggctctggacctggcggccatcaacatccagcggggccgggaccacgggatcccaccctaccacgactacagggtctactgcaatctatcggcggcacacacgttcgaggacctgaaaaatgagattaaaaaccctgagatccgggagaaactgaaaaggttgtatggctcgacactcaacatcgacctgtttccggcgctcgtggtggaggacctggtgcctggcagccggctgggccccaccctgatgtgtcttctcagcacacagttcaagcgcctgcgagatggggacagagttgtggtatgagacctgggtgtctccgccacgaaa

SEQ ID NO: 458203 - DNA, 224 bp, Homo sapiens
aggaagggactaggtctcagtcaggaggggcaggtttcggtcaggagggggcacgtccttgtcaggagagggcgggtcccaatctggagggtgcaagtgcctgtcaggtggggacaggttccagacaacagggggcaggttcctgtcaggaaaggactaggtctcagtcaggagggggcccgtccctgtcaggtgggggcaggttcttgtcaggagggggaagg

SEQ ID NO: 458204 - DNA, 493 bp, Homo sapiens
ggtagatttcagttttctctttattttttaggttgtatggctcgacactcaacatcgacctgtttccggcgctcgtggtggaggacctggtgcctggcagccggctgggccccaccctgatgtgtcttctcagcacacagttcaagcgcctgcgagatggggacagaggtgagcacgtgcaccagaaaggggagcacgctcctaagccaccttcttagggactccagaggagaagagctgtcctggttgagactgagggaggcacgaggccctagtgtcttctgtgtgtccccggttgagaatgaggaaggcactgaggccctggtatcttctgtgcaccgccttgggcttacatgtccttgcagcctcaaaactcaaccacaccaggttcaatgatgcttttcccaccccttcatttataggaatatttctgttcctgtaaacctgttggacagtccatacagctaaaccactgtgggactttagaggagtt
